(19) United States
(12) Patent Application Publication
(10) Pub. No.: US 2021/0260178 A1
(43) Pub. Date: Aug. 26, 2021

(54) NOVEL LASSA VIRUS RNA MOLECULES AND COMPOSITIONS FOR VACCINATION

(71) Applicant: CureVac AG, Tübingen (DE)

(72) Inventors: Edith JASNY, Tübingen (DE); Benjamin PETSCH, Tübingen (DE); Hans Wolfgang GROSSE, Tübingen (DE)

(73) Assignee: CureVac AG, Tübingen (DE)

(21) Appl. No.: 17/254,847

(22) PCT Filed: Jun. 27, 2019
(86) PCT No.: PCT/EP2019/067205

§ 371 Date: Dec. 21, 2020

(30) Foreign Application Priority Data
Jun. 27, 2018 (EP) PCT/EP2018/067330

(51) Int. Cl. A61K 39/12; C07K 14/005; C12N 7/00; A61P 31/14

(52) U.S. Cl. CPC A61K 39/12; C07K 14/005; C12N 7/00; A61K 2039/53; C12N 2760/10022; C12N 2760/10034; A61P 31/14

(57) ABSTRACT

The present invention is directed to RNA suitable for use in treatment and/or prophylaxis of an infection with Lassa virus (LASV) or of a disorder related to such an infection. The invention further concerns a method of treating or preventing a disorder or a disease, first and second medical uses of the RNA, compositions, and vaccines. Further, the invention is directed to a kit, particularly to a kit of parts, comprising the RNA, compositions and vaccines.

### INTRODUCTION

[0001] The present invention is directed to an RNA suitable for use in the treatment or prophylaxis of an infection with Lassa virus (LASV) or of a disorder related to such an infection. In particular, the RNA of the invention comprises at least one heterologous untranslated region (UTR), preferably a 3′-UTR and/or a 5′-UTR, and a coding sequence encoding at least one antigenic peptide or protein derived from LASV glycoprotein precursor (GPC), prefusion-stabilized GPC, LASV nucleoprotein (NP), or LASV zinc-binding matrix protein (Z). The RNA is preferably characterized by increased expression efficacies of said coding sequences operably linked to said advantageous UTR elements. The invention is also directed to compositions and vaccines comprising said RNA in association or in complexation with a polymeric carrier, a polycationic protein or peptide, or a lipid nanoparticle (LNP). Further, the invention concerns a kit, particularly a kit of parts comprising the RNA or composition or vaccine. The invention is further directed to a method of treating or preventing a disorder or a disease, and first and second medical uses of the RNA, composition, or vaccine.

[0002] Lassa virus, or Lassa mammarenavirus (LASV), belongs to the Arenaviridae, a family of enveloped viruses with bi-segmented, single-stranded RNA genomes. The large (L) genomic segment encodes an RNA-dependent RNA polymerase (RdRp) and a small RING finger z protein (analogous of matrix protein). The small (S) genomic segment encodes the nucleoprotein (NP), and the glycoprotein precursor (GPC). GPC is translated as single polypeptide precursor and undergoes processing by signal peptidases and cellular pro-protein convertases yielding the stable signal peptide (SSP), the N-terminal GP1, and the transmembrane GP2. The virion form of GPC is a trimer of heterodimers, each containing the N-terminal subunit GP1 and the transmembrane fusion-mediating subunit GP2. GPC represents the sole antigen on the LASV surface and is therefore considered the primary target of protective humoral immune responses.

[0003] LASV is endemic in West Africa with estimated 100,000-300,000 infections and 5,000-10,000 deaths annually. The early stage of human LASV infection is characterized by unspecific symptoms. After an incubation period of about 3-21 days, early symptoms include fever, sore throat, retrosternal pain, and myalgia. In progressed patients, elevated liver enzymes and high viral load in plasma (viremia) combined with vascular manifestations are indicators of poor prognosis and a fatal outcome. Human infection occurs via contact with rodents (e.g., Mastomys natalensis), inhalation of contaminated droplets/dust, ingestion of contaminated food, or contact with infected patients. Importantly, adaptive cellular immune response seems to play a key role in outcome of LASV infection in humans. Growing body of evidence indicates that very early events during the natural infection can affect the balance between effective adaptive immune responses and virus replication and determine the clinical outcome. T cell responses seem to be central for immunity to LASV. In humans, strong CD4+ T cell memory responses against LASV NP can be recalled in PBMCs for up to six years after the initial infection, and T cell memory responses to GPC are similarly long-lived. LASV infection that results in a fatal outcome is associated with a lack of demonstrable T cell activation.

[0004] Accordingly, provision of a LASV vaccine is an imperative public health need. In the art, several approaches for developing a LASV vaccine exist that are summarized in the following.

[0005] A potential approach includes epitope-based vaccines comprising e.g. HLA-binding LASV peptides. However, there are serious safety concerns regarding peptide-based vaccination of individuals recently infected with the virus or in immune individuals previously exposed to the pathogen due to the potential reactivation of CD8+ memory cell progeny leading to potentially fatal immune reactions.

[0006] Another potential approach includes virus-based vaccine platforms e.g. alphavirus vector-based vaccines or recombinant vaccinia virus-based vaccines expressing LASV antigens. However, recombinant replication-defective viruses may exhibit a low immunogenicity and thus insufficient protection, and viruses exhibiting an immunosuppressive phenotype such as e.g. vaccinia virus, harboring the risk of reversion to virulence.

[0007] Another challenge associated with past and future LASV vaccine development is the great genetic diversity among LASV strains. Recent studies using next-generation sequencing showed LASV clustering into four major clades and provided further evidence for high LASV genome diversity. Moreover, LASV in vivo re-assortment has been documented suggesting infection of individual hosts with at least two LASV strains from distinguished clades.

[0008] As outlined above, there is currently no licensed LASV vaccine and vaccine development is hampered by high cost of biocontainment requirement, the absence of appropriate small animal models and the genetic diversity of LASV species. LASV vaccine platforms currently under development have been falling short of expectations in terms of safety and efficacy. Accordingly, there remains an unmet medical need for an efficient vaccine for prophylaxis or treatment of LASV infections.

[0009] Accordingly, it is the object of the underlying invention to provide novel RNA coding for antigenic peptides or proteins of LASV and compositions/vaccines comprising said RNA for the use as vaccine for prophylaxis or treatment of LASV infections.

[0010] Further it would be desirable that an RNA-based composition or vaccine has some of the following advantageous features:
[0011] Improved translation of RNA constructs at the site of injection (e.g. muscle).
[0012] Very efficient induction of LASV antigen-specific immune responses against the encoded antigenic peptide or protein at a low dosages and dosing regimen.
[0013] Suitability for intramuscular administration.
[0014] Induction of an LASV-specific functional humoral immune response.
[0015] Induction of an LASV-specific neutralizing antibody immune response.
[0016] Induction of LASV-specific B-cell memory.
[0017] Faster onset of immune protection against LASV.
[0018] Longevity of the induced immune responses against LASV.
[0019] Induction of broad T-cell responses against LASV.
[0020] Induction of a (local and transient) pro-inflammatory environment.
[0021] No induction of systemic cytokine or chemokine response after application of the vaccine.
[0022] Good tolerability, no side-effects, non toxic effects.
[0023] Advantageous stability characteristics of the RNA, the composition and the vaccine.
[0024] Speed, adaptability, simplicity and scalability of LASV vaccine production.
[0025] Protection against a broad spectrum of LASV strains.
[0026] Formulation(s) and production compatible with many different antigens.

[0027] The objects outlined above are solved by the claimed subject matter of the independent claims, wherein further embodiments are incorporated in the dependent claims.

[0028] Definitions

[0029] For the sake of clarity and readability the following definitions are provided. Any technical feature mentioned for these definitions may be read on each and every embodiment of the invention. Additional definitions and explanations may be specifically provided in the context of these embodiments.

[0030] Percentages in the context of numbers should be understood as relative to the total number of the respective items. In other cases, and unless the context dictates otherwise, percentages should be understood as percentages by weight (wt.-%).

[0031] Adaptive immune response: The term “adaptive immune response” as used herein will be recognized and understood by the person of ordinary skill in the art, and is e.g. intended to refer to an antigen-specific response of the immune system (the adaptive immune system). Antigen specificity allows for the generation of responses that are tailored to specific pathogens or pathogen-infected cells. The ability to mount these tailored responses is usually maintained in the body by “memory cells” (B-cells). In the context of the invention, the antigen is provided by the RNA coding sequence encoding at least one antigenic peptide or protein.

[0032] Antigen: The term “antigen” as used herein will be recognized and understood by the person of ordinary skill in the art, and is e.g. intended to refer to a substance which may be recognized by the immune system, preferably by the adaptive immune system, and is capable of triggering an antigen-specific immune response, e.g. by formation of antibodies and/or antigen-specific T cells as part of an adaptive immune response. Typically, an antigen may be or may comprise a peptide or protein which may be presented by the MHC to T-cells. Also fragments, variants and derivatives of peptides or proteins derived from LASV comprising at least one epitope may be understood as antigens. In the context of the present invention, an antigen may be the product of translation of a provided RNA of the first aspect.

[0033] Antigenic peptide or protein: The term “antigenic peptide or protein” will be recognized and understood by the person of ordinary skill in the art, and is e.g. intended to refer to a peptide or protein derived from a (antigenic) protein which may stimulate the body's adaptive immune system to provide an adaptive immune response. Therefore an “antigenic peptide or protein” comprises at least one epitope (as defined herein) or antigen (as defined herein) of the protein it is derived from (i.e., a LASV antigenic peptide or protein).

[0034] Artificial RNA: The term “artificial RNA” as used herein is intended to refer to an RNA that does not occur naturally. In other words, an artificial RNA may be understood as a non-natural nucleic acid molecule. Such RNA molecules may be non-natural due to its individual sequence (e.g. G/C content modified coding sequence, UTRs) and/or due to other modifications, e.g. structural modifications of nucleotides. Typically, artificial RNA may be designed and/or generated by genetic engineering to correspond to a desired artificial sequence of nucleotides (i.e., heterologous sequence). In this context an artificial RNA is a sequence that may not occur naturally, i.e. it differs from the wild type sequence by at least one nucleotide. The term “artificial RNA” is not restricted to mean “one single molecule” but is understood to comprise an ensemble of essentially identical molecules. Accordingly, it may relate to a plurality of essentially identical RNA molecules. The RNA of the invention is preferably an artificial RNA.

[0035] Cationic, cationisable: Unless a different meaning is clear from the specific context, the term “cationic” means that the respective structure bears a positive charge, either permanently or not permanently but in response to certain conditions such as e.g. pH. Thus, the term “cationic” covers both “permanently cationic” and “cationisable”. The term “cationisable” as used herein means that a compound, or group or atom, is positively charged at a lower pH and uncharged at a higher pH of its environment. Also in non-aqueous environments where no pH value can be determined, a cationisable compound, group or atom is positively charged at a high hydrogen ion concentration and uncharged at a low concentration or activity of hydrogen ions. It depends on the individual properties of the cationisable or polycationisable compound, in particular the pKa of the respective cationisable group or atom, at which pH or hydrogen ion concentration it is charged or uncharged. In diluted aqueous environments, the fraction of cationisable compounds, groups or atoms bearing a positive charge may be estimated using the so-called Henderson-Hasselbalch equation which is well-known to a person skilled in the art. E.g., if a compound or moiety is cationisable, it is preferred that it is positively charged at a pH value of about 1 to 9, preferably 4 to 9, 5 to 8 or even 6 to 8, more preferably of a pH value of or below 9, of or below 8, of or below 7, most preferably at physiological pH values, e.g. about 7.3 to 7.4, i.e. under physiological conditions, particularly under physiological salt conditions of the cell in vivo. In embodiments, it is preferred that the cationisable compound or moiety is predominantly neutral at physiological pH values, e.g. about 7.0-7.4, but becomes positively charged at lower pH values. In some embodiments, the preferred range of pKa for the cationisable compound or moiety is about 5 to about 7.

[0036] Cellular immunity/cellular immune response: “Cellular immunity”, “cellular immunity”, “cellular immune response” or “cellular T-cell responses” relates to the activation of macrophages, natural killer cells, antigen- specific cytotoxic T-lymphocytes, and the release of various cytokines in response to an antigen. In more general terms, cellular immunity is not based on antibodies, but on the activation of cells of the immune system. Typically, a cellular immune response may be characterized e.g. by activating antigen-specific cytotoxic T-lymphocytes that are able to induce apoptosis in cells, e.g. specific immune cells like dendritic cells or other cells, displaying epitopes of foreign antigens on their surface. Such cells may be virus-infected or infected with intracellular bacteria, or cancer cells displaying tumor antigens. Further characteristics may be activation of macrophages and natural killer cells, enabling them to destroy pathogens and stimulation of cells to secrete a variety of cytokines that influence the function of other cells involved in adaptive immune responses and innate immune responses. In the context of the invention, the antigen is provided by the RNA of the first aspect, suitably inducing T-cell responses against LASV antigens (e.g. LASV NP).

[0037] Coding sequence/coding region: The terms “coding sequence” or “coding region” and “cds” as used herein will be recognized and understood by the person of ordinary skill in the art, and are e.g. intended to refer to a sequence of several nucleotides which may be translated into a peptide or protein. In the context of the present invention a cds is preferably an RNA sequence, consisting of a number of nucleotide triplets, starting with a start codon and preferably terminating with a stop codon.

[0038] Composition: In the context of the invention, a “composition” refers to any type of composition in which the specified ingredients (e.g. RNA e.g. in association with LNP), may be incorporated, optionally along with any further constituents, usually with at least one pharmaceutically acceptable carrier or excipient. Thus, the composition may be a dry composition such as a powder or granules, or a solid unit such as a lyophilized form or a tablet. Alternatively, the composition may be in liquid form, and each constituent may be independently incorporated in dissolved or dispersed (e.g. suspended or emulsified) form.

[0039] Derived from: The term “derived from” as used throughout the present specification in the context of a nucleic acid, i.e. for a nucleic acid “derived from” (another) nucleic acid, means that the nucleic acid, which is derived from (another) nucleic acid, shares e.g. at least 60%, 70%, 80%, 81%, 82%, 83%, 84%, 85%, 86%, 87%, 88%, 89%, 90%, 91%, 92%, 93%, 94%, 95%, 96%, 97%, 98%, or 99% sequence identity with the nucleic acid from which it is derived. The skilled person is aware that sequence identity is typically calculated for the same types of nucleic acids, i.e. for DNA sequences or for RNA sequences. Thus, it is understood, if a DNA is “derived from” an RNA or if an RNA is “derived from” a DNA, in a first step the RNA sequence is converted into the corresponding DNA sequence (in particular by replacing the uracils (U) by thymidines (T) throughout the sequence) or, vice versa, the DNA sequence is converted into the corresponding RNA sequence (in particular by replacing the T by U throughout the sequence). Thereafter, the sequence identity of the DNA sequences or the sequence identity of the RNA sequences is determined. Preferably, a nucleic acid “derived from” a nucleic acid also refers to nucleic acid, which is modified in comparison to the nucleic acid from which it is derived, e.g. in order to increase RNA stability even further and/or to prolong and/or increase protein production. In the context of amino acid sequences (e.g. antigenic peptides or proteins) the term “derived from” means that the amino acid sequence, which is derived from (another) amino acid sequence, shares e.g. at least 60%, 70%, 75%, 80%, 81%, 82%, 83%, 84%, 85%, 86%, 87%, 88%, 89%, 90%, 91%, 92%, 93%, 94%, 95%, 96%, 97%, 98%, or 99% sequence identity with the amino acid sequence from which it is derived.

[0040] Epitope: The term “epitope” as used herein will be recognized and understood by the person of ordinary skill in the art, and is e.g. intended to refer to T cell and B cell epitopes. T cell epitopes or parts of the antigenic peptides or proteins may comprise fragments preferably having a length of about 6 to about 20 or even more amino acids (aa), e.g. fragments as processed and presented by MHC class I molecules have a typical length of about 8 aa to about 10 aa, or fragments as processed and presented by MHC class II molecules have a typical length of about 13 aa to about 20 aa. These fragments are typically recognized by T cells in form of a complex consisting of the peptide fragment and an MHC molecule, i.e. the fragments are typically not recognized in their native form. B cell epitopes are typically fragments located on the outer surface of (native) protein or peptide antigens typically having a length of about 5 aa to about 15 aa which may be recognized by antibodies. Such epitopes of proteins or peptides may furthermore be selected from any of the herein mentioned variants of such proteins or peptides. In this context epitopes can be conformational or discontinuous which are composed of segments of the proteins or peptides as defined herein that are discontinuous in the amino acid sequence of the proteins or peptides as defined herein but are brought together in the three-dimensional structure or continuous or linear epitopes which are composed of a single polypeptide chain. In the context of the present invention, an epitope may be the product of translation (and subsequent post-translational modification and processing) of a provided RNA.

[0041] Fragment: The term “fragment” as used throughout the present specification in the context of a nucleic acid sequence or an amino acid (aa) sequence may typically be a shorter portion of a full-length sequence of e.g. a nucleic acid sequence or an amino acid sequence. A fragment typically consists of a sequence that is identical to the corresponding stretch within the full-length sequence. The term “fragment” as used throughout the present specification in the context of proteins or peptides may, typically, comprise a sequence of a protein or peptide as defined herein, which is, with regard to its amino acid sequence (or its encoded nucleic acid molecule), N-terminally and/or C-terminally truncated compared to the amino acid sequence of the original (native) protein (or its encoded nucleic acid molecule). Such truncation may thus occur either on the aa level or correspondingly on the nucleic acid level. A sequence identity with respect to such a fragment as defined herein may therefore preferably refer to the entire protein or peptide as defined herein or to the entire (coding) nucleic acid molecule of such a protein or peptide. Fragments of antigenic proteins or peptides may comprise at least one epitope of those proteins or peptides. Furthermore also domains of a protein, like the extracellular domain, the intracellular domain or the transmembrane domain and shortened or truncated versions of a protein may be understood to comprise a fragment of a protein.

[0042] Heterologous: The terms “heterologous” or “heterologous sequence” as used throughout the present specification in the context of a nucleic acid sequence or an amino acid sequence refers to a sequence (e.g. DNA, RNA, amino acid) will be recognized and understood by the person of ordinary skill in the art, and is intended to refer to a sequence that is derived from another gene, from another allele, from another species. Two sequences are typically understood to be “heterologous” if they are not derivable from the same gene or in the same allele. I.e., although heterologous sequences may be derivable from the same organism, they naturally (in nature) do not occur in the same nucleic acid molecule, such as e.g. in the same RNA or protein.

[0043] Humoral immune response: The terms “humoral immunity” or “humoral immune response” will be recognized and understood by the person of ordinary skill in the art, and are e.g. intended to refer to B-cell mediated antibody production and optionally to accessory processes accompanying antibody production. A humoral immune response may be typically characterized, e.g. by Th2 activation and cytokine production, germinal center formation and isotype switching, affinity maturation and memory cell generation. Humoral immunity may also refer to the effector functions of antibodies, which include pathogen and toxin neutralization, classical complement activation, and opsonin promotion of phagocytosis and pathogen elimination.

[0044] Identity (of a sequence): The term “identity” as used throughout the present specification in the context of a nucleic acid sequence or an amino acid sequence will be recognized and understood by the person of ordinary skill in the art, and is e.g. intended to refer to the percentage to which two sequences are identical. To determine the percentage to which two sequences are identical, e.g. nucleic acid sequences or aa sequences as defined herein, preferably the aa sequences encoded by the nucleic acid sequence as defined herein or the aa sequences themselves, the sequences can be aligned in order to be subsequently compared to one another. Therefore, e.g. a position of a first sequence may be compared with the corresponding position of the second sequence. If a position in the first sequence is occupied by the same residue as is the case at a position in the second sequence, the two sequences are identical at this position. If this is not the case, the sequences differ at this position. If insertions occur in the second sequence in comparison to the first sequence, gaps can be inserted into the first sequence to allow a further alignment. If deletions occur in the second sequence in comparison to the first sequence, gaps can be inserted into the second sequence to allow a further alignment. The percentage to which two sequences are identical is then a function of the number of identical positions divided by the total number of positions including those positions which are only occupied in one sequence. The percentage to which two sequences are identical can be determined using an algorithm, e.g. an algorithm integrated in the BLAST program.

[0045] Immunogen, immunogenic: The terms “immunogen” or “immunogenic” will be recognized and understood by the person of ordinary skill in the art, and are e.g. intended to refer to a compound that is able to stimulate/induce an immune response. Preferably, an immunogen is a peptide, or protein. An immunogen in the sense of the present invention is the product of translation of a provided RNA.

[0046] Immune response: The term “immune response” will be recognized and understood by the person of ordinary skill in the art, and is e.g. intended to refer to a specific reaction of the adaptive immune system to a particular antigen (so called specific or adaptive immune response) or an unspecific reaction of the innate immune system (so called unspecific or innate immune response), or a combination thereof.

[0047] Immune system: The term “immune system” will be recognized and understood by the person of ordinary skill in the art, and is e.g. intended to refer to a system of an organism that may protect said organisms from infection. If a pathogen enters an organism, the innate immune system provides an immediate, non-specific response. The adaptive immune system adapts its response during an infection to improve recognition of the pathogen. This improved response is then retained after the pathogen has been eliminated, in the form of an immunological memory, allowing for faster and stronger attacks each time that pathogen is encountered.

[0048] Innate immune system: The term “innate immune system” (also known as non-specific or unspecific immune system) will be recognized and understood by the person of ordinary skill in the art, and is e.g. intended to refer to a system typically comprising the cells and mechanisms that defend the host from infection by other organisms in a non-specific manner. This means that the cells of the innate system may recognize and respond to pathogens in a generic way, but unlike the adaptive immune system, it does not confer long-lasting or protective immunity to the host. The innate immune system may be, e.g. activated by ligands of Toll-like receptors (TLRs) or other auxiliary substances such as lipopolysaccharides, TNF-alpha, CD40 ligand, or cytokines, monokines, lymphokines, interleukins or chemokines, IL-1 to IL-33, IFN-alpha, IFN-beta, IFN-gamma, GM-CSF, G-CSF, M-CSF, LT-beta, TNF-alpha, growth factors, and hGH, a ligand of human TLR1 to TLR10, a ligand of murine TLR1 to TLR13 a ligand of a NOD-like receptor, a ligand of a RIG-I like receptor, an immunostimulatory nucleic acid, an immunostimulatory RNA (isRNA), a CpG-DNA etc.

[0049] Monovalent vaccine, monovalent composition: The terms “monovalent vaccine”, “monovalent composition” “univalent vaccine” or “univalent composition” will be recognized and understood by the person of ordinary skill in the art, and are e.g. intended to refer to a composition or a vaccine comprising only one antigen from a virus. Accordingly, said vaccine or composition comprises only one RNA species encoding a single antigen for a single organism. The term “monovalent vaccine” includes the immunization against a single valence. In the context of the invention, a monovalent LASV vaccine or composition would comprise an RNA encoding one single antigenic peptide or protein derived from one LASV.

[0050] Nucleic acid: The terms “nucleic acid” or “nucleic acid molecule” will be recognized and understood by the person of ordinary skill in the art, and are e.g. intended to refer to a molecule comprising, preferably consisting of nucleic acid components. The term nucleic acid molecule preferably refers to DNA or RNA. It is preferably used synonymous with the term polynucleotide. Preferably, a nucleic acid or a nucleic acid molecule is a polymer comprising or consisting of nucleotide monomers (natural and/or modified), which are covalently linked to each other by phosphodiester-bonds of a sugar/phosphate-backbone. The term “nucleic acid molecule” also encompasses modified nucleic acid molecules, such as base-modified, sugar-modified or backbone-modified DNA or RNA molecules as defined herein.

[0051] Nucleic acid sequence/ RNA sequence/ amino acid sequence: The terms “nucleic acid sequence”, “RNA sequence” or “amino acid sequence” will be recognized and understood by the person of ordinary skill in the art, and are e.g. intended to refer to particular and individual order of the succession of its nucleotides or amino acids respectively.

[0052] Pharmaceutically effective amount: The terms “pharmaceutically effective amount” or “effective amount” will be recognized and understood by the person of ordinary skill in the art, and are e.g. intended to refer to an amount of a compound sufficient to induce a pharmaceutical effect, i.e. an immune response.

[0053] Polyvalent/multivalent vaccine, polyvalent/multivalent composition: The terms “polyvalent vaccine”, “polyvalent composition” “multivalent vaccine” or “multivalent composition” will be recognized and understood by the person of ordinary skill in the art, and are e.g. intended to refer to a composition or a vaccine comprising antigens from more than one strain of a virus, or comprising different antigens of the same virus, or any combination thereof. The terms describe that said vaccine or composition has more than one valence. In the context of the invention, a polyvalent LASV vaccine would comprise an RNA encoding antigenic peptides or proteins derived from several different LASV strains and/or clades or an RNA encoding different antigens from the same LASV strain, or a combination thereof.

[0054] Variant (of a sequence): The term “variant” as used throughout the present specification in the context of a nucleic acid sequence will be recognized and understood by the person of ordinary skill in the art, and is e.g. intended to refer to a variant of a nucleic acid sequence derived from another nucleic acid sequence. E.g., a variant of a nucleic acid sequence may exhibit one or more nucleotide deletions, insertions, additions and/or substitutions compared to the nucleic acid sequence from which the variant is derived. A variant of a nucleic acid sequence may at least 50%, 60%, 70%, 80%, 90%, or 95% identical to the nucleic acid sequence the variant is derived from. The variant is a functional variant in the sense that the variant has retained at least 50%, 60%, 70%, 80%, 90%, or 95% or more of the function of the sequence where it is derived from. A “variant” of a nucleic acid sequence may have at least 70%, 75%, 80%, 85%, 90%, 95%, 98% or 99% nucleotide identity over a stretch of at least 10, 20, 30, 50, 75 or 100 nucleotide of such nucleic acid sequence.

[0055] The term “variant” as used throughout the present specification in the context of proteins or peptides will be recognized and understood by the person of ordinary skill in the art, and is e.g. intended to refer to a proteins or peptide variant having an amino acid sequence which differs from the original sequence in one or more mutation(s), such as one or more substituted, inserted and/or deleted amino acid(s). Preferably, these fragments and/or variants have the same biological function or specific activity compared to the full-length native protein, e.g. its specific antigenic property. “Variants” of proteins or peptides as defined herein may comprise conservative amino acid substitution(s) compared to their native, i.e. non-mutated physiological, sequence. Those amino acid sequences as well as their encoding nucleotide sequences in particular fall under the term variants as defined herein. Substitutions in which amino acids, which originate from the same class, are exchanged for one another are called conservative substitutions. In particular, these are amino acids having aliphatic side chains, positively or negatively charged side chains, aromatic groups in the side chains or amino acids, the side chains of which can enter into hydrogen bridges, e.g. side chains which have a hydroxyl function. This means that e.g. an amino acid having a polar side chain is replaced by another amino acid having a likewise polar side chain, or, e.g., an amino acid characterized by a hydrophobic side chain is substituted by another amino acid having a likewise hydrophobic side chain (e.g. serine (threonine) by threonine (serine) or leucine (isoleucine) by isoleucine (leucine)). Insertions and substitutions are possible, in particular, at those sequence positions which cause no modification to the three-dimensional structure or do not affect the binding region. Modifications to a three-dimensional structure by insertion(s) or deletion(s) can easily be determined e.g. using CD spectra (circular dichroism spectra). A “variant” of a protein or peptide may have at least 70%, 75%, 80%, 85%, 90%, 95%, 98% or 99% amino acid identity over a stretch of at least 10, 20, 30, 50, 75 or 100 amino acids of such protein or peptide. Preferably, a variant of a protein comprises a functional variant of the protein, which means that the variant exerts the same effect or functionality or at least 40%, 50%, 60%, 70%, 80%, 90%, or 95% of the effect or functionality as the protein it is derived from.

[0056] 3′-untranslated region, 3′-UTR element, 3′-UTR: The terms “3′-untranslated region” or “3′-UTR” will be recognized and understood by the person of ordinary skill in the art, and are e.g. intended to refer to a part of a nucleic acid molecule located 3′ (i.e. downstream) of a coding sequence and which is not translated into protein. A 3′-UTR may be part of an mRNA located between a cds and a terminal poly(A) sequence. A 3′-UTR may comprise elements for controlling gene expression, also called regulatory elements. Such regulatory elements may be, e.g., ribosomal binding sites, miRNA binding sites etc.

[0057] 5′-untranslated region, 5′-UTR element, 5′-UTR: The terms “5′-untranslated region” or “3′-UTR” will be recognized and understood by the person of ordinary skill in the art, and are e.g. intended to refer to a part of a nucleic acid molecule located 5′ (i.e. “upstream”) of a coding sequence and which is not translated into protein. A 5′-UTR may be part of an mRNA located 5′ of the cds. Typically, a 5′-UTR starts with the transcriptional start site and ends before the start codon of the coding sequence. A 5′-UTR may comprise elements for controlling gene expression, also called regulatory elements. Such regulatory elements may be, e.g., ribosomal binding sites, miRNA binding sites etc. The 5′-UTR may be post-transcriptionally modified, e.g. by enzymatic addition of a 5′-cap structure.

[0058] 5′-terminal oligopyrimidine tract (TOP), TOP-UTR: The term “5′-terminal oligopyrimidine tract (TOP)” has to be understood as a stretch of pyrimidine nucleotides located in the 5′-terminal region of a nucleic acid molecule, such as the 5′-terminal region of certain mRNA molecules or the 5′-terminal region of a functional entity, e.g. the transcribed region of certain genes. The sequence starts with a cytidine, which usually corresponds to the transcriptional start site, and is followed by a stretch of usually about 3 to 30 pyrimidine nucleotides. A TOP may e.g. comprise 3-30 or even more nucleotides. The pyrimidine stretch and thus the 5′-TOP ends one nucleotide 5′ to the first purine nucleotide located downstream of the TOP. mRNA that contains a 5′-terminal oligopyrimidine tract is often referred to as TOP mRNA. Accordingly, genes that provide such mRNAs are referred to as TOP genes. The term “TOP motif” or “5′-TOP motif” has to be understood as a nucleic acid sequence which corresponds to a 5′-TOP as defined above. Thus, a TOP motif in the context of the present invention is preferably a stretch of pyrimidine nucleotides having a length of 3-30 nucleotides. The TOP-motif may consist of at least 3, 4, 5, 6, 7, or 8 pyrimidine nucleotides, wherein the stretch of pyrimidine nucleotides may start at its 5′-end with a cytosine nucleotide. In TOP genes and TOP mRNAs, the TOP-motif may start at its 5′-end with the transcriptional start site and ends one nucleotide 5′ to the first purine residue in said gene or mRNA. A TOP motif may be located at the 5′-end of a sequence which represents a 5′-UTR or at the 5′-end of a sequence which codes for a 5′-UTR. A stretch of 3 or more pyrimidine nucleotides may be called “TOP motif” if this stretch is located at the 5′-end of a respective sequence, such as the nucleic acid, the 5′-UTR element of the nucleic acid, or the nucleic acid sequence which is derived from the 5′-UTR of a TOP gene as described herein. The nucleic acid sequence of the 5′-UTR element, which is derived from a 5′-UTR of a TOP gene, may also terminate at its 3′-end with a nucleotide located at position 1, 2, 3, 4, 5, 6, 7, 8, 9 or 10 upstream of the start codon of the gene or RNA it is derived from.

### Short Description of the Invention

[0059] The present invention is based on the surprising finding that at least one peptide or protein derived from of a Lassa virus (LASV) glycoprotein precursor (GPC), nucleoprotein (NP), or zinc-binding matrix protein (Z) encoded by the RNA of the invention can efficiently be expressed in a mammalian cell. Even more unexpected, the inventors showed that the RNA of the invention can induce antigen-specific functional immune responses, e.g. effective cellular and humoral responses. Through optimizations of LASV antigen design (e.g. prefusion-stabilized GPC), the immune responses could be further improved. In addition, the expression of the LASV antigen encoded by the RNA could be increased via suitable heterologous 5′ untranslated regions (UTRs) and suitable heterologous 3′ untranslated regions (UTRs). Advantageously, said RNA comprising suitable 3′-UTR/5′-UTR combinations induce very efficient antigen-specific immune responses against the encoded LASV antigenic protein. Further, the RNA of the invention comprised in lipid nanoparticles (LNPs) very efficiently induces antigen-specific immune responses against LASV protein at a low dosages and dosing regimen. Furthermore, RNAs encoding different antigens (e.g GPC and NP, optionally derived from different LASV viruses) can be effectively combined in one RNA-based vaccine, e.g. to improve T-cell responses and/or to induce virus-like particle formation and/or to confer broad protection against different LASV clades. The RNA and the composition/vaccine comprising said RNA is therefore suitable for use as a vaccine, e.g. as a human vaccine. Advantageously, the RNA according to the invention enables rapid and rational vaccine design with flexibility, speed, and scalability of production.

[0060] In a first aspect, the present invention provides an RNA comprising at least one coding sequence encoding at least one antigenic peptide or protein derived from a Lassa virus (LASV) protein or a fragment or variant thereof, wherein said coding sequence is operably linked to a 5′-UTR derived from a HSD17B4 gene, a NDUFA4 gene, or a RPL32 gene and/or a 3′-UTR derived from a PSMB3 gene, a CASP1 gene, an ALB7 gene, or an alpha-globin gene.

[0061] The at least one antigenic peptide or protein may suitably be derived from LASV glycoprotein precursor (GPC), LASV nucleoprotein (NP), LASV zinc-binding matrix protein (Z), or a variant, fragment, or combination thereof, wherein GPC, NP, Z are preferably full-length proteins.

[0062] The at least one antigenic peptide or protein may suitably be derived from a GPC protein comprising a mutation to stabilize prefusion conformation, herein referred to as “prefusion-stabilized GPC” or “GPCstabilized”.

[0063] The RNA may comprise a codon modified coding sequence selected from C maximized coding sequence, CAI maximized coding sequence, human codon usage adapted coding sequence, G/C content modified coding sequence, and G/C optimized coding sequence, or any combination thereof.

[0064] Preferably, the RNA may comprise a coding sequence being identical or at least 70%, 80%, 85%, 86%, 87%, 88%, 89%, 90%, 91%, 92%, 93%, 94%, 95%, 96%, 97%, 98%, or 99% identical to any one of SEQ ID NOs: 255-2286, 3821-6106, 7798-9805, 11348-12803, 18002-18103, 19362-19463, 20723-20824, 22981-23108, 24677-24804, 26373-26500, 28069-28196, 29765-29892, 31461-31588, 33157-33284, 34853-34980, 36549-36676, 38245-38372, 41637-41764 or a fragment or variant of any of these sequences.

[0065] The RNA may further comprise at least one selected from a cap structure, a poly(A) sequence, a poly(C)sequence, a histone-stem loop, and/or a 3′-terminal sequence element.

[0066] The RNA preferably comprises or consists of an RNA sequence which is identical or at least 70%, 80%, 85%, 86%, 87%, 88%, 89%, 90%, 91%, 92%, 93%, 94%, 95%, 96%, 97%, 98%, or 99% identical to a nucleic acid sequence selected from the group consisting of SEQ ID NOs: 2287-3566, 14056-15207 (encoding GPC) or a fragment or variant of any of these, SEQ ID NOs: 6107-7546, 15208-16743, 23109-24644, 24805-26340, 26501-28036, 28197-29732, 29893-31428, 31589-33124, 33285-34820, 34981-36516, 36677-38212, 38373-39908, 40069-41604, 41765-43300 (encoding prefusion-stabilized GPC) or a fragment or variant of any of these, SEQ ID NOs: 9806-11165, 16744-17967, 18104-19327, 19464-20687, 20825-22048 (encoding NP or SP-NP) or a fragment or variant of any of these, SEQ ID NOs: 12804-13803, 22049-22948 (encoding Z) or a fragment or variant of any of these.

[0067] In a second aspect, the present invention provides a composition comprising at least one or more than one or a plurality, e.g. 2, 3, 4, 5, 6, 7, 8, 9, 10, 11, 12, 13, 14, 15 of the RNAs of the first aspect.

[0068] The composition may comprises at least one RNA encoding at least one antigenic peptide or protein derived from GPC or prefusion-stabilized GPC or a variant or fragment thereof and at least one additional RNA encoding at least one antigenic peptide or protein derived from NP or a variant or fragment thereof. Advantageously, NP may promote efficient T-cell responses of the composition or vaccine when administered to a subject.

[0069] The composition may comprise at least one RNA encoding at least one antigenic peptide or protein derived from GPC or prefusion-stabilized GPC or a variant or fragment thereof and at least one additional RNA encoding at least one antigenic peptide or protein derived from NP or a variant or fragment thereof and at least one additional RNA encoding at least one antigenic peptide or protein derived from Z or a variant or fragment thereof. Advantageously, GPC, NP and Z may promote the formation of virus-like particles (VLP).

[0070] In embodiments, antigenic peptides or proteins may be derived from the same LASV or from different LASV or combinations thereof, wherein the different LASV belong to different LASV clades or different LASV lineages, preferably to the LASV clades I, II, III and IV or to the LASV lineages I, II, III and IV.

[0071] The composition may preferably comprise the an RNA of the invention complexed with one or more lipids thereby forming lipid nanoparticles (LNP), wherein the LNP essentially consists of

[0072] (i) at least one cationic lipid as defined herein, preferably a lipid of formula (III), more preferably lipid III-3;

[0073] (ii) a neutral lipid as defined herein, preferably 1,2-distearoyl-sn-glycero-3-phosphocholine (DSPC);

[0074] (iii) a steroid or steroid analogue as defined herein, preferably cholesterol; and

[0075] (iv) a PEG-lipid as defined herein, e.g. PEG-DMG or PEG-cDMA, preferably a PEGylated lipid of formula (IVa);

[0076] wherein (i) to (iv) are in a molar ratio of about 20-60% cationic lipid: 5-25% neutral lipid: 25-55% sterol; 0.5-15% PEG-lipid.

[0077] In a third aspect, the invention provides a LASV vaccine comprising the RNA of the first aspect or the composition of the second aspect.

[0078] In a fourth aspect, the invention provides a kit, particularly a kit of parts, comprising the RNA, compositions and vaccines.

[0079] In further aspects, the invention relates to the first and second medical use of the RNA, the composition, the vaccine, the kit or kit of parts and to a method of treating or preventing an infection with a LASV, or a disorder related to such an infection.

### DETAILED DESCRIPTION OF THE INVENTION

[0080] The present application is filed together with a sequence listing in electronic format, which is part of the description of the present application (WIPO standard ST.25). The information contained in the electronic format of the sequence listing filed together with this application is incorporated herein by reference in its entirety. For many sequences, the sequence listing also provides additional detailed information, e.g. regarding certain structural features, sequence optimizations, GenBank identifiers, or additional detailed information regarding its coding capacity. In particular, such information is provided under numeric identifier <223> in the WIPO standard ST.25 sequence listing. Accordingly, information provided under said numeric identifier <223> is explicitly included herein in its entirety and has to be understood as integral part of the description of the underlying invention.

[0081] RNA:

[0082] In a first aspect, the invention relates to an RNA comprising
[0083] a) at least one heterologous 5′ untranslated region (5′-UTR) and/or at least one heterologous 3′ untranslated region (3′-UTR); and
[0084] b) at least one coding sequence (or coding region) operably linked to said 3′-UTR and/or 5′-UTR encoding at least one antigenic peptide or protein derived from a LASV protein or a fragment or variant thereof.

[0085] The RNA of the invention may be composed of a protein-coding region (“coding sequence” or “cds”), and 5′- and/or 3′-UTR. Notably, UTRs may harbor regulatory sequence elements that determine RNA turnover, stability, and localization. Moreover, UTRs may harbor sequence elements that enhance translation. In medical application of RNA, translation of said RNA into protein is of paramount importance to therapeutic efficacy. The inventors surprisingly found that certain combinations of 3′-UTRs and/or 5′-UTRs enhance the expression of operably linked coding sequences encoding LASV antigenic peptides or proteins. RNA molecules harboring said UTR combinations advantageously enable rapid and transient expression of LASV antigenic peptides or proteins. Accordingly, the RNA provided herein is particularly suitable for vaccination against LASV.

[0086] Suitably, the RNA of the first aspect may comprise at least one heterologous 5′-UTR and/or at least one heterologous 3′-UTR. Said heterologous 5′-UTRs or 3′-UTRs may be derived from naturally occurring genes or may be synthetically engineered.

[0087] In preferred embodiments, the at least one RNA comprises at least one heterologous 3′-UTR.

[0088] Preferably the RNA comprises a 3′-UTR, which may be derivable from a gene that relates to an RNA with enhanced half-life (i.e. that provides a stable RNA).

[0089] In preferred embodiments of the first aspect, the RNA comprises at least one heterologous 3′-UTR, wherein the at least one heterologous 3′-UTR comprises a nucleic acid sequence derived from a 3′-UTR of a gene selected from PSMB3, ALB7, alpha-globin (referred to as “muag”), CASP1, COX6B1, GNAS, NDUFA1 and RPS9, or from a homolog, a fragment or variant of any one of these genes. Particularly preferred 3′-UTRs are PSMB3, CASP1, ALB7, or muag.

[0090] ALB7-derived 3′-UTR: The RNA may comprise a 3′-UTR which is derived from the 3′-UTR of a vertebrate albumin gene or from a variant thereof, preferably from the 3′-UTR of a mammalian albumin gene or from a variant thereof, more preferably from the 3′-UTR of a human albumin gene or from a variant thereof, even more preferably from the 3′-UTR of the human albumin gene, or from a homolog, fragment or variant thereof. Accordingly, the RNA may comprise a 3′-UTR derived from a ALB7 gene, wherein said 3′-UTR derived from an ALB7 gene comprises or consists of a nucleic acid sequence being identical or at least 70%, 80%, 85%, 86%, 87%, 88%, 89%, 90%, 91%, 92%, 93%, 94%, 95%, 96%, 97%, 98%, or 99% identical to SEQ ID NO: 13838 or 13839 or a fragment or a variant thereof.

[0091] Alpha-globin gene -derived 3′-UTR: The RNA may comprise a 3′-UTR which is derived from the 3′-UTR of a vertebrate alpha-globin gene (referred to as “muag”) or from a variant thereof, preferably from the 3′-UTR of a mammalian alpha-globin or from a variant thereof, more preferably from the 3′-UTR of a human alpha-globin gene or from a variant thereof, even more preferably from the 3′-UTR of the human alpha-globin gene.

[0092] Accordingly, the RNA may comprise a 3′-UTR derived from a alpha-globin gene, wherein said 3′-UTR derived from a alpha-globin gene comprises or consists of a nucleic acid sequence being identical or at least 70%, 80%, 85%, 86%, 87%, 88%, 89%, 90%, 91%, 92%, 93%, 94%, 95%, 96%, 97%, 98%, or 99% identical to SEQ ID NO: 13840 or 13841 or a fragment or a variant thereof.

[0093] PSMB3-derived 3′-UTR: The RNA may comprise a 3′-UTR which is derived from a 3′-UTR of a gene encoding a proteasome subunit beta type-3 (PSMB3) protein, or a homolog, variant, fragment or derivative thereof. Such 3′-UTRs preferably comprise or consist of a nucleic acid sequences derived from the 3′-UTR of a proteasome subunit beta type-3 (PSMB3) gene, preferably from a vertebrate, more preferably a mammalian, most preferably a human proteasome subunit beta type-3 (PSMB3) gene, or a homolog, variant, fragment or derivative thereof. Accordingly, the RNA may comprise a 3′-UTR derived from a PSMB3 gene, wherein said 3′-UTR derived from a PSMB3 gene comprises or consists of a nucleic acid sequence being identical or at least 70%, 80%, 85%, 86%, 87%, 88%, 89%, 90%, 91%, 92%, 93%, 94%, 95%, 96%, 97%, 98%, or 99% identical to SEQ ID NO: 13826 or 13827 or a fragment or a variant thereof.

[0094] CASP1-derived 3′-UTR: The RNA may comprise a 3′-UTR which is derived from a 3′-UTR of a gene encoding a Caspase-1 (CASP1) protein, or a homolog, variant, fragment or derivative thereof. Such 3′-UTRs preferably comprise or consist of a nucleic acid sequence derived from the 3′-UTR of a Caspase-1 (CASP1) gene, preferably from a vertebrate, more preferably a mammalian, most preferably a human Caspase-1 (CASP1) gene, or a homolog, variant, fragment or derivative thereof. Accordingly, the RNA may comprise a 3′-UTR derived from a CASP1 gene, wherein said 3′-UTR derived from a CASP1 gene comprises or consists of a nucleic acid sequence being identical or at least 70%, 80%, 85%, 86%, 87%, 88%, 89%, 90%, 91%, 92%, 93%, 94%, 95%, 96%, 97%, 98%, or 99% identical to SEQ ID NO: 13828 or 13829 or a fragment or a variant thereof.

[0095] COX6B1-derived 3′-UTR: The RNA may comprise a 3′-UTR which is derived from a 3′-UTR of a COX6B1 gene encoding a cytochrome c oxidase subunit 6B1 (COX6B1) protein, or a homolog, variant, fragment or derivative thereof. Such 3′-UTRs preferably comprise or consist of a nucleic acid sequence which is derived from the 3′-UTR of a cytochrome c oxidase subunit 6B1 (COX6B1) gene, preferably from a vertebrate, more preferably a mammalian, most preferably a human cytochrome c oxidase subunit 6B1 (COX6B1) gene, or a homolog, variant, fragment or derivative thereof. Accordingly, the RNA may comprise a 3′-UTR derived from a COX6B1 gene, wherein said 3′-UTR derived from a COX6B1 gene comprises or consists of a nucleic acid sequence being identical or at least 70%, 80%, 85%, 86%, 87%, 88%, 89%, 90%, 91%, 92%, 93%, 94%, 95%, 96%, 97%, 98%, or 99% identical to SEQ ID NO: 13830 or 13831 or a fragment or a variant thereof.

[0096] GNAS-derived 3′-UTR: The RNA may comprise a 3′-UTR which is derived from a 3′-UTR of a GNAS gene encoding a Guanine nucleotide-binding protein G(s) subunit alpha isoforms short (GNAS) protein, or a homolog, variant, fragment or derivative thereof. Such 3′-UTRs preferably comprise or consist of a nucleic acid sequence which is derived from the 3′-UTR of a Guanine nucleotide-binding protein G(s) subunit alpha isoforms short (GNAS) gene, preferably from a vertebrate, more preferably a mammalian Guanine nucleotide- binding protein G(s) subunit alpha isoforms short (GNAS) gene, or a homolog, variant, fragment or derivative thereof. Accordingly, the RNA may comprise a 3′-UTR derived from a GNAS gene, wherein said 3′-UTR derived from a GNAS gene comprises or consists of a nucleic acid sequence being identical or at least 70%, 80%, 85%, 86%, 87%, 88%, 89%, 90%, 91%, 92%, 93%, 94%, 95%, 96%, 97%, 98%, or 99% identical to SEQ ID NO: 13832 or 13833 or a fragment or a variant thereof.

[0097] NDUFA1-derived 3′-UTR: The RNA may comprise a 3′-UTR which is derived from a 3′-UTR of a gene encoding a NADH dehydrogenase [ubiquinone] 1 alpha sub complex subunit 1 (NDUFA1) protein, or a homolog, variant, fragment or derivative thereof. Such 3′-UTRs preferably comprise or consist of a nucleic acid sequence derived from the 3′-UTR of a NADH dehydrogenase [ubiquinone] 1 alpha sub complex subunit 1 (NDUFA1) gene, preferably from a vertebrate, more preferably a mammalian NADH dehydrogenase [ubiquinone] 1 alpha sub complex subunit 1 (NDUFA1) gene, or a homolog, variant, fragment or derivative thereof. Accordingly, the RNA may comprise a 3′-UTR derived from a NDUFA1 gene, wherein said 3′-UTR derived from a NDUFA1 gene comprises or consists of a nucleic acid sequence being identical or at least 70%, 80%, 85%, 86%, 87%, 88%, 89%, 90%, 91%, 92%, 93%, 94%, 95%, 96%, 97%, 98%, or 99% identical to SEQ ID NO: 13834 or 13835 or a fragment or a variant thereof.

[0098] RPS9-derived 3′-UTR: The RNA may comprise a 3′-UTR which is derived from a 3′-UTR of a gene encoding a 40S ribosomal protein S9 (RPS9) protein, or a homolog, variant, fragment or derivative thereof. Such 3′-UTRs preferably comprise or consist of a nucleic acid sequence derived from the 3′-UTR of a 40S ribosomal protein S9 (RPS9) gene, preferably from a vertebrate, more preferably a mammalian, most preferably a human 40S ribosomal protein S9 (RPS9) gene, or a homolog, variant, fragment or derivative thereof. Accordingly, the RNA may comprise a 3′-UTR derived from a RPS9 gene, wherein said 3′-UTR derived from a RPS9 gene comprises or consists of a nucleic acid sequence being identical or at least 70%, 80%, 85%, 86%, 87%, 88%, 89%, 90%, 91%, 92%, 93%, 94%, 95%, 96%, 97%, 98%, or 99% identical to SEQ ID NO: 13836 or 13837 or a fragment or a variant thereof.

[0099] Further suitable 3′-UTRs: In embodiments, the RNA of the first aspect comprises a 3′-UTR as described in WO2016/107877, the disclosure of WO2016/107877 relating to 3′-UTR sequences herewith incorporated by reference. Suitable 3′-UTRs are SEQ ID NOs: 1 to 24 and SEQ ID NOs: 49 to 318 of WO2016/107877, or fragments or variants of these sequences. Accordingly, the 3′-UTRs of the RNA may comprise or consist of a corresponding RNA sequence of the nucleic acid sequence according SEQ ID NOs: 1 to 24 and SEQ ID NOs: 49 to 318 of WO2016/107877. In other embodiments, the RNA of the first aspect comprises a 3′-UTR as described in WO2017/036580, the disclosure of WO2017/036580 relating to 3′-UTR sequences herewith incorporated by reference. Suitable 3′-UTRs are SEQ ID NOs: 152 to 204 of WO2017/036580, or fragments or variants of these sequences. Accordingly, the 3′-UTR of the RNA may comprise or consist of a corresponding RNA sequence of the nucleic acid sequence according SEQ ID NOs: 152 to 204 of WO2017/036580.

[0100] In preferred embodiments, the at least one RNA comprises at least one heterologous 5′-UTR.

[0101] Preferably the RNA comprises a 5′-UTR, which may be derivable from a gene that relates to an RNA with enhanced half-life (i.e. that provides a stable RNA).

[0102] In preferred embodiments of the first aspect, the RNA comprises at least one heterologous 5′-UTR, wherein the at least one heterologous 5′-UTR comprises a nucleic acid sequence derived from a 5′-UTR of gene selected from HSD17B4, RPL32, ASAH1, ATP5A1, MP68, NDUFA4, NOSIP, RPL31, SLC7A3, TUBB4B, and UBQLN2, or from a homolog, a fragment or variant of any one of these genes. Particularly preferred 5′-UTRs are HSD17B4, NDUFA4 or RPL32.

[0103] RPL32-derived 5′-UTR: The RNA may comprise a 5′-UTR derived from a 5′-UTR of a gene encoding a 60S ribosomal protein L32, or a homolog, variant, fragment or derivative thereof, wherein said 5′-UTR preferably lacks the TOP motif. Such 5′-UTRs preferably comprise or consist of a nucleic acid sequence derived from the 5′-UTR of a 60S ribosomal protein L32 (RPL32) gene, preferably from a vertebrate, more preferably a mammalian, most preferably a human 60S ribosomal protein L32 (RPL32) gene, or a homolog, variant, fragment or derivative thereof, wherein the 5′-UTR preferably does not comprise the TOP motif of said gene. Accordingly, the RNA may comprise a 5′-UTR derived from a RPL32 gene, wherein said 5′-UTR derived from a RPL32 gene comprises or consists of a nucleic acid sequence being identical or at least 70%, 80%, 85%, 86%, 87%, 88%, 89%, 90%, 91%, 92%, 93%, 94%, 95%, 96%, 97%, 98%, or 99% identical to SEQ ID NO: 13824 or 13825 or a fragment or a variant thereof.

[0104] HSD17B4-derived 5′-UTR: The RNA may comprise a 5′-UTR derived from a 5′-UTR of a gene encoding a 17-beta-hydroxysteroid dehydrogenase 4, or a homolog, variant, fragment or derivative thereof, preferably lacking the TOP motif. Such 5′-UTRs preferably comprise or consist of a nucleic acid sequence derived from the 5′-UTR of a 17-beta-hydroxysteroid dehydrogenase 4 gene, preferably from a vertebrate, more preferably mammalian, most preferably human 17-beta-hydroxysteroid dehydrogenase 4 (HSD17B4) gene, or a homolog, variant, fragment or derivative thereof, wherein preferably the 5′-UTR does not comprise the TOP motif of said gene. Accordingly, the RNA may comprise a 5′-UTR derived from a HSD17B4 gene, wherein said 5′-UTR derived from a HSD17B4 gene comprises or consists of a nucleic acid sequence being identical or at least 70%, 80%, 85%, 86%, 87%, 88%, 89%, 90%, 91%, 92%, 93%, 94%, 95%, 96%, 97%, 98%, or 99% identical to SEQ ID NO: 13804 or 13805 or a fragment or a variant thereof.

[0105] ASAH1-derived 5′-UTR: The RNA may comprise a 5′-UTR derived from a 5′-UTR of a gene encoding acid ceramidase (ASAH1), or a homolog, variant, fragment or derivative thereof. Such 5′-UTRs preferably comprise or consist of a nucleic acid sequence derived from the 5′-UTR of an acid ceramidase (ASAH1) gene, preferably from a vertebrate, more preferably mammalian, most preferably human acid ceramidase (ASAH1) gene, or a homolog, variant, fragment or derivative thereof. Accordingly, the RNA may comprise a 5′-UTR derived from a ASAH1 gene, wherein said 5′-UTR derived from a ASAH1 gene comprises or consists of a nucleic acid sequence being identical or at least 70%, 80%, 85%, 86%, 87%, 88%, 89%, 90%, 91%, 92%, 93%, 94%, 95%, 96%, 97%, 98%, or 99% identical to SEQ ID NO: 13806 or 13807 or a fragment or a variant thereof.

[0106] ATP5A1-derived 5′-UTR: The RNA may comprise a 5′-UTR which is derived from a 5′-UTR of a gene encoding mitochondrial ATP synthase subunit alpha (ATP5A1), or a homolog, variant, fragment or derivative thereof, wherein said 5′-UTR preferably lacks the TOP motif. Such 5′-UTRs preferably comprise or consist of a nucleic acid sequence derived from the 5′-UTR of a mitochondrial ATP synthase subunit alpha (ATP5A1) gene, preferably from a vertebrate, more preferably a mammalian and most preferably a human mitochondrial ATP synthase subunit alpha (ATP5A1) gene, or a homolog, variant, fragment or derivative thereof, wherein the 5′-UTR preferably does not comprise the TOP motif of said gene. Accordingly, the RNA may comprise a 5′-UTR derived from a ATP5A1 gene, wherein said 5′-UTR derived from a ATP5A1 gene comprises or consists of a nucleic acid sequence being identical or at least 70%, 80%, 85%, 86%, 87%, 88%, 89%, 90%, 91%, 92%, 93%, 94%, 95%, 96%, 97%, 98%, or 99% identical to SEQ ID NO: 13808 or 13809 or a fragment or a variant thereof.

[0107] MP68-derived 5′-UTR: The RNA may comprise a 5′-UTR which is derived from a 5′-UTR of a gene encoding MP68, or a homolog, fragment or variant thereof. Such 5′-UTRs preferably comprise or consist of a nucleic acid sequence derived from the 5′-UTR of a 6.8 kDa mitochondrial proteolipid (MP68) gene, preferably from a vertebrate, more preferably a mammalian 6.8 kDa mitochondrial proteolipid (MP68) gene, or a homolog, variant, fragment or derivative thereof. Accordingly, the RNA may comprise a 5′-UTR derived from a MP68 gene, wherein said 5′-UTR derived from a MP68 gene comprises or consists of a nucleic acid sequence being identical or at least 70%, 80%, 85%, 86%, 87%, 88%, 89%, 90%, 91%, 92%, 93%, 94%, 95%, 96%, 97%, 98%, or 99% identical to SEQ ID NO: 13810 or 13811 or a fragment or a variant thereof.

[0108] NDUFA4-derived 5′-UTR: The RNA may comprise a 5′-UTR which is derived from a 5′-UTR of a gene encoding a Cytochrome c oxidase subunit (NDUFA4), or a homolog, fragment or variant thereof. Such 5′-UTRs preferably comprise or consist of a nucleic acid sequence derived from the 5′-UTR of a Cytochrome c oxidase subunit (NDUFA4) gene, preferably from a vertebrate, more preferably a mammalian Cytochrome c oxidase subunit (NDUFA4) gene, or a homolog, variant, fragment or derivative thereof. Accordingly, the RNA may comprise a 5′-UTR derived from a NDUFA4 gene, wherein said 5′-UTR derived from a NDUFA4 gene comprises or consists of a nucleic acid sequence being identical or at least 70%, 80%, 85%, 86%, 87%, 88%, 89%, 90%, 91%, 92%, 93%, 94%, 95%, 96%, 97%, 98%, or 99% identical to SEQ ID NO: 13812 or 13813 or a fragment or a variant thereof.

[0109] NOSIP-derived 5′-UTR: The RNA may comprise a 5′-UTR which is derived from a 5′-UTR of a gene encoding a Nitric oxide synthase-interacting (NOSIP) protein, or a homolog, variant, fragment or derivative thereof. Such 5′-UTRs preferably comprise or consist of a nucleic acid sequence derived from the 5′-UTR of a Nitric oxide synthase-interacting protein (NOSIP) gene, preferably from a vertebrate, more preferably a mammalian, most preferably a human Nitric oxide synthase-interacting protein (NOSIP) gene, or a homolog, variant, fragment or derivative thereof. Accordingly, the RNA may comprise a 5′-UTR derived from a NOSIP gene, wherein said 5′-UTR derived from a NOSIP gene comprises or consists of a nucleic acid sequence being identical or at least 70%, 80%, 85%, 86%, 87%, 88%, 89%, 90%, 91%, 92%, 93%, 94%, 95%, 96%, 97%, 98%, or 99% identical to SEQ ID NO: 13814 or 13815 or a fragment or a variant thereof.

[0110] RPL31-derived 5′-UTR: The RNA may comprise a 5′-UTR which is derived from a 5′-UTR of a gene encoding a 60S ribosomal protein L31, ora homolog, variant, fragment or derivative thereof, wherein said 5′-UTR preferably lacks the TOP motif. Such 5′-UTR preferably comprise or consist of a nucleic acid sequence derived from the 5′-UTR of a 60S ribosomal protein L31 (RPL31) gene, preferably from a vertebrate, more preferably a mammalian 60S ribosomal protein L31 (RPL31) gene, or a homolog, variant, fragment or derivative thereof, wherein the 5′-UTR preferably does not comprise the TOP motif of said gene. Accordingly, the RNA may comprise a 5′-UTR derived from a RPL31 gene, wherein said 5′-UTR derived from a RPL31 gene comprises or consists of a nucleic acid sequence being identical or at least 70%, 80%, 85%, 86%, 87%, 88%, 89%, 90%, 91%, 92%, 93%, 94%, 95%, 96%, 97%, 98%, or 99% identical to SEQ ID NO: 13816 or 13817 or a fragment or a variant thereof.

[0111] SLC7A3-derived 5′-UTR: The RNA may comprise a 5′-UTR which is derived from a 5′-UTR of a gene encoding a cationic amino acid transporter 3 (solute carrier family 7 member 3, SLC7A3) protein, or a homolog, variant, fragment or derivative thereof. Such 5′-UTRs preferably comprise or consist of a nucleic acid sequence derived from the 5′-UTR of a cationic amino acid transporter 3 (SLC7A3) gene, preferably from a vertebrate, more preferably a mammalian cationic amino acid transporter 3 (SLC7A3) gene, or a homolog, variant, fragment or derivative thereof. Accordingly, the RNA may comprise a 5′-UTR derived from a SLC7A3 gene, wherein said 5′-UTR derived from a SLC7A3 gene comprises or consists of a nucleic acid sequence being identical or at least 70%, 80%, 85%, 86%, 87%, 88%, 89%, 90%, 91%, 92%, 93%, 94%, 95%, 96%, 97%, 98%, or 99% identical to SEQ ID NO: 13818 or 13819 or a fragment or a variant thereof.

[0112] TUBB4B-derived 5′-UTR: The RNA may comprise a 5′-UTR which is derived from a 5′-UTR of a gene encoding a tubulin beta-4B chain (TUBB4B) protein, or a homolog, variant, fragment or derivative thereof. Such 5′-UTRs preferably comprise or consist of a nucleic acid sequence derived from the 5′-UTR of a tubulin beta-4B chain (TUBB4B) gene, preferably from a vertebrate, more preferably a mammalian and most preferably a human tubulin beta-4B chain (TUBB4B) gene, or a homolog, variant, fragment or derivative thereof. Accordingly, the RNA may comprise a 5′-UTR derived from a TUBB4B gene, wherein said 5′-UTR derived from a TUBB4B gene comprises or consists of a nucleic acid sequence being identical or at least 70%, 80%, 85%, 86%, 87%, 88%, 89%, 90%, 91%, 92%, 93%, 94%, 95%, 96%, 97%, 98%, or 99% identical to SEQ ID NO: 13821 or 13821 or a fragment or a variant thereof.

[0113] UBQLN2-derived 5′-UTR: The RNA may comprise a 5′-UTR which is derived from a 5′-UTR of a gene encoding an ubiquilin-2 (UBQLN2) protein, or a homolog, variant, fragment or derivative thereof. Such 5′-UTRs preferably comprise or consist of a nucleic acid sequence derived from the 5′-UTR of an ubiquilin-2 (UBQLN2) gene, preferably from a vertebrate, more preferably a mammalian ubiquilin-2 (UBQLN2) gene, or a homolog, variant, fragment or derivative thereof. Accordingly, the RNA may comprise a 5′-UTR derived from a UBQLN2 gene, wherein said 5′-UTR derived from a UBQLN2 gene comprises or consists of a nucleic acid sequence being identical or at least 70%, 80%, 85%, 86%, 87%, 88%, 89%, 90%, 91%, 92%, 93%, 94%, 95%, 96%, 97%, 98%, or 99% identical to SEQ ID NO: 13822 or 13823 or a fragment or a variant thereof.

[0114] Further suitable 5′-UTRs: In embodiments, the RNA of the first aspect comprises a 5′-UTR as described in WO2013/143700, the disclosure of WO2013/143700 relating to 5′-UTR sequences herewith incorporated by reference. Particularly preferred 5′-UTRs are nucleic acid sequences derived from SEQ ID NOs: 1-1363, SEQ ID NO: 1395, SEQ ID NO: 1421 and SEQ ID NO: 1422 of WO2013/143700, or fragments or variants of these sequences. In this context, it is preferred that the 5′-UTR of the RNA comprises or consists of a corresponding RNA sequence of the nucleic acid sequence according SEQ ID NOs: 1-1363, SEQ ID NO: 1395, SEQ ID NO: 1421 and SEQ ID NO: 1422 of WO2013/143700. In other embodiments, the RNA of the first aspect comprises a 5′-UTR as described in WO2016/107877, the disclosure of WO2016/107877 relating to 5′-UTR sequences herewith incorporated by reference. Particularly preferred 5′-UTRs are nucleic acid sequences according to SEQ ID NOs: 25 to 30 and SEQ ID NOs: 319 to 382 of WO2016/107877, or fragments or variants of these sequences. In this context, it is particularly preferred that the 5′-UTR of the RNA comprises or consists of a corresponding RNA sequence of the nucleic acid sequence according SEQ ID NOs: 25 to 30 and SEQ ID NOs: 319 to 382 of WO2016/107877. In other embodiments, the RNA of the first aspect comprises a 5′-UTR as described in WO2017/036580, the disclosure of WO2017/036580 relating to 5′-UTR sequences herewith incorporated by reference. Particularly preferred 5′-UTRs are nucleic acid sequences according to SEQ ID NOs: 1 to 151 of WO2017/036580, or fragments or variants of these sequences. In this context, it is particularly preferred that the 5′-UTR of the RNA comprises or consists of a corresponding RNA sequence of the nucleic acid sequence according to SEQ ID NOs: 1 to 151 of WO2017/036580.

[0115] The inventors observed that certain combinations of 5′-UTR and/or 3′-UTR as described herein may increase the expression of the at least one coding sequence (encoding at least one antigenic peptide or protein derived from a LASV protein). Said increase in LASV protein expression may be particularly pronounced in the dermis (after intradermal application), the epidermis (after epidermal application) or, most advantageously, in the muscle (after intramuscular application).

[0116] Accordingly it is preferred that the at least one heterologous 5′-UTR as defined herein and the at least one heterologous 3′-UTR as defined herein act synergistically to increase production (that is translation) of antigenic peptide or protein from the RNA of the first aspect. These advantageous combinations of 5′-UTR and 3′-UTR are specified in the following. Each of the abbreviation introduced below, namely “a-1”, “a-2”, “a-3”, “a-4”, “a-5”, “b-1”, “b-2”, “b-3”, “b-4”, “b-5”, “c-1”, “c-2”, “c-3”, “c-4”, “c-5”, “d-1”, “d-2”, “d-3”, “d-4”, “d-5”, “e-1”, “e-2”, “e-3”, “e-4”, “e-5”, “e-6”, “f-1”, 1-2″, 1-3″, 1-4″,1-5″, “g-1”, “g-2”, “g-3”, “g-4”, “g-5”, “h-1”, “h-2”, “h-3”, “h-4”, “h-5”, 1-1″, “i-2”, “i-3”, are used throughout the specification of the present invention and represent one advantageous combination of 5′-UTR and/or 3′UTR.

[0117] Accordingly, in a preferred embodiment of the first aspect, the RNA comprises at least one coding sequence encoding at least one antigenic peptide or protein derived from a Lassa virus (LASV) protein or a fragment or variant thereof, wherein said coding sequence is operably linked to 5′-UTR and/or 3′-UTR, comprising
[0118] a-1. at least one 5′-UTR derived from a 5′-UTR of a HSD17B4 gene, or from a corresponding RNA sequence, homolog, fragment or variant thereof and at least one 3′-UTR derived from a 3′-UTR of a PSMB3 gene, or from a corresponding RNA sequence, homolog, fragment or variant thereof; or
[0119] a-2. at least one 5′-UTR derived from a 5′-UTR of a NDUFA4 gene, or from a corresponding RNA sequence, homolog, fragment or variant thereof and at least one 3′-UTR derived from a 3′-UTR of a PSMB3 gene, or from a corresponding RNA sequence, homolog, fragment or variant thereof; or
[0120] b-4. at least one 5′-UTR derived from a 5′-UTR of a HSD17B4 gene, or from a corresponding RNA sequence, homolog, fragment or variant thereof and at least one 3′-UTR derived from a 3′-UTR of a CASP1 gene, or from a corresponding RNA sequence, homolog, fragment or variant thereof; or
[0121] a-3. at least one 5′-UTR derived from a 5′-UTR of a SLC7A3 gene, or from a corresponding RNA sequence, homolog, fragment or variant thereof and at least one 3′-UTR derived from a 3′-UTR of a PSMB3 gene, or from a corresponding RNA sequence, homolog, fragment or variant thereof; or
[0122] a-4. at least one 5′-UTR from a 5′-UTR of a NOSIP gene, or from a corresponding RNA sequence, homolog, fragment or variant thereof and at least one 3′-UTR derived from a 3′-UTR of a PSMB3 gene, or from a corresponding RNA sequence, homolog, fragment or variant thereof; or
[0123] a-5. at least one 5′-UTR derived from a 5′-UTR of a MP68 gene, or from a corresponding RNA sequence, homolog, fragment or variant thereof and at least one 3′-UTR derived from a 3′-UTR of a PSMB3 gene, or from a corresponding RNA sequence, homolog, fragment or variant thereof; or
[0124] b-1. at least one 5′-UTR derived from a 5′-UTR of a UBQLN2 gene, or from a corresponding RNA sequence, homolog, fragment or variant thereof and at least one 3′-UTR derived from a 3′-UTR of a RPS9 gene, or from a corresponding RNA sequence, homolog, fragment or variant thereof; or
[0125] b-2. at least one 5′-UTR derived from a 5′-UTR of a ASAH1 gene, or from a corresponding RNA sequence, homolog, fragment or variant thereof and at least one 3′-UTR derived from a 3′-UTR of a RPS9 gene, or from a corresponding RNA sequence, homolog, fragment or variant thereof; or
[0126] b-3. at least one 5′-UTR derived from a 5′-UTR of a HSD17B4 gene, or from a corresponding RNA sequence, homolog, fragment or variant thereof and at least one 3′-UTR derived from a 3′-UTR of a RPS9 gene, or from a corresponding RNA sequence, homolog, fragment or variant thereof; or
[0127] b-5. at least one 5′-UTR derived from a 5′-UTR of a NOSIP gene, or from a corresponding RNA sequence, homolog, fragment or variant thereof and at least one 3′-UTR derived from a 3′-UTR of a COX6B1 gene, or from a corresponding RNA sequence, homolog, fragment or variant thereof; or
[0128] c-1. at least one 5′-UTR derived from a 5′-UTR of a NDUFA4 gene, or from a corresponding RNA sequence, homolog, fragment or variant thereof and at least one 3′-UTR derived from a 3′-UTR of a RPS9 gene, or from a corresponding RNA sequence, homolog, fragment or variant thereof; or
[0129] c-2. at least one 5′-UTR derived from a 5′-UTR of a NOSIP gene, or from a corresponding RNA sequence, homolog, fragment or variant thereof and at least one 3′-UTR derived from a 3′-UTR of a NDUFA1 gene, or from a corresponding RNA sequence, homolog, fragment or variant thereof; or
[0130] c-3. at least one 5′-UTR derived from a 5′-UTR of a NDUFA4 gene, or from a corresponding RNA sequence, homolog, fragment or variant thereof and at least one 3′-UTR derived from a 3′-UTR of a COX6B1 gene, or from a corresponding RNA sequence, homolog, fragment or variant thereof; or
[0131] c-4. at least one 5′-UTR derived from a 5′-UTR of a NDUFA4 gene, or from a corresponding RNA sequence, homolog, fragment or variant thereof and at least one 3′-UTR derived from a 3′-UTR of a NDUFA1 gene, or from a corresponding RNA sequence, homolog, fragment or variant thereof; or
[0132] c-5. at least one 5′-UTR derived from a 5′-UTR of a ATP5A1 gene, or from a corresponding RNA sequence, homolog, fragment or variant thereof and at least one 3′-UTR derived from a 3′-UTR of a PSMB3 gene, or from a corresponding RNA sequence, homolog, fragment or variant thereof; or
[0133] d-1. at least one 5′-UTR derived from a 5′-UTR of a RPL31 gene, or from a corresponding RNA sequence, homolog, fragment or variant thereof and at least one 3′-UTR derived from a 3′-UTR of a PSMB3 gene, or from a corresponding RNA sequence, homolog, fragment or variant thereof; or
[0134] d-2. at least one 5′-UTR derived from a 5′-UTR of a ATP5A1 gene, or from a corresponding RNA sequence, homolog, fragment or variant thereof and at least one 3′-UTR derived from a 3′-UTR of a CASP1 gene, or from a corresponding RNA sequence, homolog, fragment or variant thereof; or
[0135] d-3. at least one 5′-UTR derived from a 5′-UTR of a SLC7A3 gene, or from a corresponding RNA sequence, homolog, fragment or variant thereof and at least one 3′-UTR derived from a 3′-UTR of a GNAS gene, or from a corresponding RNA sequence, homolog, fragment or variant thereof; or
[0136] d-4. at least one 5′-UTR derived from a 5′-UTR of a HSD17B4 gene, or from a corresponding RNA sequence, homolog, fragment or variant thereof and at least one 3′-UTR derived from a 3′-UTR of a NDUFA1 gene, or from a corresponding RNA sequence, homolog, fragment or variant thereof; or
[0137] d-5. at least one 5′-UTR derived from a 5′-UTR of a SLC7A3 gene, or from a corresponding RNA sequence, homolog, fragment or variant thereof and at least one 3′-UTR derived from a 3′-UTR of a NDUFA1 gene, or from a corresponding RNA sequence, homolog, fragment or variant thereof; or
[0138] e-1. at least one 5′-UTR derived from a 5′-UTR of a TUBB4B gene, or from a corresponding RNA sequence, homolog, fragment or variant thereof and at least one 3′-UTR derived from a 3′-UTR of a RPS9 gene, or from a corresponding RNA sequence, homolog, fragment or variant thereof; or
[0139] e-2. at least one 5′-UTR derived from a 5′-UTR of a RPL31 gene, or from a corresponding RNA sequence, homolog, fragment or variant thereof and at least one 3′-UTR derived from a 3′-UTR of a RPS9 gene, or from a corresponding RNA sequence, homolog, fragment or variant thereof; or
[0140] e-3. at least one 5′-UTR derived from a 5′-UTR of a MP68 gene, or from a corresponding RNA sequence, homolog, fragment or variant thereof and at least one 3′-UTR derived from a 3′-UTR of a RPS9 gene, or from a corresponding RNA sequence, homolog, fragment or variant thereof; or
[0141] e-4. at least one 5′-UTR derived from a 5′-UTR of a NOSIP gene, or from a corresponding RNA sequence, homolog, fragment or variant thereof and at least one 3′-UTR derived from a 3′-UTR of a RPS9 gene, or from a corresponding RNA sequence, homolog, fragment or variant thereof; or
[0142] e-5. at least one 5′-UTR derived from a 5′-UTR of a ATP5A1 gene, or from a corresponding RNA sequence, homolog, fragment or variant thereof and at least one 3′-UTR derived from a 3′-UTR of a RPS9 gene, or from a corresponding RNA sequence, homolog, fragment or variant thereof; or
[0143] e-6. at least one 5′-UTR derived from a 5′-UTR of a ATP5A1 gene, or from a corresponding RNA sequence, homolog, fragment or variant thereof and at least one 3′-UTR derived from a 3′-UTR of a COX6B1 gene, or from a corresponding RNA sequence, homolog, fragment or variant thereof; or
[0144] f-1. at least one 5′-UTR derived from a 5′-UTR of a ATP5A1 gene, or from a corresponding RNA sequence, homolog, fragment or variant thereof and at least one 3′-UTR derived from a 3′-UTR of a GNAS gene, or from a corresponding RNA sequence, homolog, fragment or variant thereof; or
[0145] f-2. at least one 5′-UTR derived from a 5′-UTR of a ATP5A1 gene, or from a corresponding RNA sequence, homolog, fragment or variant thereof and at least one 3′-UTR derived from a 3′-UTR of a NDUFA1 gene, or from a corresponding RNA sequence, homolog, fragment or variant thereof; or
[0146] f-3. at least one 5′-UTR derived from a 5′-UTR of a HSD17B4 gene, or from a corresponding RNA sequence, homolog, fragment or variant thereof and at least one 3′-UTR derived from a 3′-UTR of a COX6B1 gene, or from a corresponding RNA sequence, homolog, fragment or variant thereof; or
[0147] f-4. at least one 5′-UTR derived from a 5′-UTR of a HSD17B4 gene, or from a corresponding RNA sequence, homolog, fragment or variant thereof and at least one 3′-UTR derived from a 3′-UTR of a GNAS gene, or from a corresponding RNA sequence, homolog, fragment or variant thereof; or
[0148] f-5. at least one 5′-UTR derived from a 5′-UTR of a MP68 gene, or from a corresponding RNA sequence, homolog, fragment or variant thereof and at least one 3′-UTR derived from a 3′-UTRof a COX6B1 gene, or from a corresponding RNA sequence, homolog, fragment or variant thereof; or
[0149] g-1. at least one 5′-UTR derived from a 5′-UTR of a MP68 gene, or from a corresponding RNA sequence, homolog, fragment or variant thereof and at least one 3′-UTR derived from a 3′-UTR of a NDUFA1 gene, or from a corresponding RNA sequence, homolog, fragment or variant thereof; or
[0150] g-2. at least one 5′-UTR derived from a 5′-UTR of a NDUFA4 gene, or from a corresponding RNA sequence, homolog, fragment or variant thereof and at least one 3′-UTR derived from a 3′-UTR of a CASP1 gene, or from a corresponding RNA sequence, homolog, fragment or variant thereof; or
[0151] g-3. at least one 5′-UTR derived from a 5′-UTR of a NDUFA4 gene, or from a corresponding RNA sequence, homolog, fragment or variant thereof and at least one 3′-UTR derived from a 3′-UTR of a GNAS gene, or from a corresponding RNA sequence, homolog, fragment or variant thereof; or
[0152] g-4. at least one 5′-UTR derived from a 5′-UTR of a NOSIP gene, or from a corresponding RNA sequence, homolog, fragment or variant thereof and at least one 3′-UTR derived from a 3′-UTR of a CASP1 gene, or from a corresponding RNA sequence, homolog, fragment or variant thereof; or
[0153] g-5. at least one 5′-UTR derived from a 5′-UTR of a RPL31 gene, or from a corresponding RNA sequence, homolog, fragment or variant thereof and at least one 3′-UTR derived from a 3′-UTR of a CASP1 gene, or from a corresponding RNA sequence, homolog, fragment or variant thereof; or
[0154] h-1. at least one 5′-UTR derived from a 5′-UTR of a RPL31 gene, or from a corresponding RNA sequence, homolog, fragment or variant thereof and at least one 3′-UTR derived from a 3′-UTR of a COX6B1 gene, or from a corresponding RNA sequence, homolog, fragment or variant thereof; or
[0155] h-2. at least one 5′-UTR derived from a 5′-UTR of a RPL31 gene, or from a corresponding RNA sequence, homolog, fragment or variant thereof and at least one 3′-UTR derived from a 3′-UTR of a GNAS gene, or from a corresponding RNA sequence, homolog, fragment or variant thereof; or
[0156] h-3. at least one 5′-UTR derived from a 5′-UTR of a RPL31 gene, or from a corresponding RNA sequence, homolog, fragment or variant thereof and at least one 3′-UTR derived from a 3′-UTR of a NDUFA1 gene, or from a corresponding RNA sequence, homolog, fragment or variant thereof; or
[0157] h-4. at least one 5′-UTR derived from a 5′-UTR of a SLC7A3 gene, or from a corresponding RNA sequence, homolog, fragment or variant thereof and at least one 3′-UTR derived from a 3′-UTR of a CASP1 gene, or from a corresponding RNA sequence, homolog, fragment or variant thereof; or
[0158] h-5. at least one 5′-UTR derived from a 5′-UTR of a SLC7A3 gene, or from a corresponding RNA sequence, homolog, fragment or variant thereof and at least one 3′-UTR derived from a 3′-UTR of a COX6B1 gene, or from a corresponding RNA sequence, homolog, fragment or variant thereof; or
[0159] i-1. at least one 5′-UTR derived from a 5′-UTR of a SLC7A3 gene, or from a corresponding RNA sequence, homolog, fragment or variant thereof and at least one 3′-UTR derived from a 3′-UTR of a RPS9 gene, or from a corresponding RNA sequence, homolog, fragment or variant thereof.
[0160] i-2. at least one 5′-UTR derived from a 5′-UTR of a RPL32 gene, or from a corresponding RNA sequence, homolog, fragment or variant thereof and at least one 3′-UTR derived from a 3′-UTR of a ALB7 gene, or from a corresponding RNA sequence, homolog, fragment or variant thereof.
[0161] i-3. at least one 3′-UTR derived from a 3′-UTR of a alpha-globin gene gene, or from a corresponding RNA sequence, homolog, fragment or variant thereof.

[0162] Suitably, the RNA comprises at least one coding sequence encoding at least one antigenic peptide or protein derived from a LASV as specified herein operably linked to a 3′-UTR and/or a 5′-UTR selected from a-1 (HSD17B4/PSMB3), a-2 (NDUFA4/PSMB3), a-3 (SLC7A3/PSMB3), a-4 (NOSIP/PSMB3), a-5 (MP68/PSMB3), b-1 (UBQLN2/RPS9), b-2 (ASAH1/RPS9), b-3 (HSD17B4/RPS9), b-4 (HSD17B4/CASP1), b-5 (NOSIP/COX6B1), c-1 (NDUFA4/RPS9), c-2 (NOSIP/NDUFA1), c-3 (NDUFA4/COX6B1), c-4 (NDUFA4/NDUFA1), c-5 (ATP5A1/PSMB3), d-1 (RpI31/PSMB3), d-2 (ATP5A1/CASP1), d-3 (SLC7A3/GNAS), d-4 (HSD17B4/NDUFA1), d-5 (S1c7a3/Ndufa1), e-1 (TUBB4B/RPS9), e-2 (RPL31/RPS9), e-3 (MP68/RPS9), e-4 (NOSIP/RPS9), e-5 (ATP5A1/RPS9), e-6 (ATP5A1/COX6B1), f-1 (ATP5A1/GNAS), f-2 (ATP5A1/NDUFA1), f-3 (HSD17B4/COX6B1), f-4 (HSD17B4/GNAS), f-5 (MP68/COX6B1), g-1 (MP68/NDUFA1), g-2 (NDUFA4/CASP1), g-3 (NDUFA4/GNAS), g-4 (NOSIP/CASP1), g-5 (RPL31/CASP1), h-1 (RPL31/COX6B1), h-2 (RPL31/GNAS), h-3 (RPL31/NDUFA1), h-4 (S1c7a3/CASP1), h-5 (SLC7A3/COX6B1), i-1 (SLC7A3/RPS9), i-2 (RPL32/ALB7), or i-3 (α-globin gene).

[0163] In particularly preferred embodiments of the first aspect, the RNA comprise UTR elements according to a-1 (HSD17B4/PSMB3), a-2 (NDUFA4/PSMB3), b-4 (HSD17B4/ CASP1), i-2 (RPL32/ALB7), or i-3 (alpha-globin, “muag”).

[0164] The RNA comprises at least one coding sequence operably linked to said 3′-UTR and/or 5′-UTR, wherein said coding sequence encodes at least one antigenic peptide or protein derived from a LASV protein, or a fragment or variant thereof. Advantageously in the context of the invention, the RNA of the first aspect is suitable for vaccination.

[0165] As used herein, the term “Lassa virus” or “Lassa mammarenavirus” or the corresponding abbreviation “LASV” is not limited to a particular virus strain, variant, serotype, clade member, lineage, or isolate, etc., and therefore comprises any LASV of any origin (NCBI:txid11620). LASV can be grouped into several different clades or lineages (I, II, III, IV, V, VI, etc.). The term clade is preferably used synonymously with the term lineages. Suitable LASV clade members are provided in List 1-6.

[0166] LASV is a member of the arenavirus family, which includes more than 30 known pathogens that exist on all populated continents on Earth. The Old World family of arenaviruses contains LASV; lymphocytic choriomeningitis virus (LCMV), which causes febrile illness, neurological disease, and birth defects with a 2 to 5% seroprevalence in North America and Europe; and the 80% lethal hemorrhagic fever virus Lujo (LUJV), which emerged in Southern Africa in 2008. Arenaviruses in the New World category include Machupo virus (MACV) and Junin virus (JUNV), the causative agents of Bolivian and Argentinian hemorrhagic fever, respectively, as well as numerous other agents such as Sabia and Guanarito (Hastie, Kathryn M., et al. “Structural basis for antibody-mediated neutralization of Lassa virus.” Science 356.6341 (2017): 923-928). The invention is not only limited to “Lassa virus” or “Lassa mammarenavirus”, further members of the arenavirus family, known as pathogens, are also included, suitably selected from LCMV (WE-HPI), LUJV, JUNV (MN-2) and MACV (Carvallo).

[0167] List 1: LASV Clade I or LASV Lineage I Members:

[0168] In embodiments, the LASV from which the antigenic peptide or protein is derived from is a clade I member, wherein said clade I member may preferably be selected from a list comprising LP, Pinneo-NIG-1969, Acar 3080; accordingly, when reference is made to “LASV clade I” or “LASV lineage I”, said LASV clade I member may be preferably selected from said list. Preferred LASV clade I members in the context of the invention are LP, or Pinneo-NIG-1969.

[0169] List 2: LASV Clade II or LASV Lineage II Members:

[0170] In embodiments, the LASV from which the antigenic peptide or protein is derived from is a clade II member, wherein said clade II member may preferably be selected from a list comprising 803213, ISTH0009-NIG-2011, ISTH0012-NIG-2011, ISTH0047-NIG-2011, ISTH0073-NIG-2011, ISTH0230-NIG-2011, ISTH0531-NIG-2011, ISTH0595-NIG-2011, ISTH0964-NIG-2011, ISTH1003-NIG-2011, ISTH1038-NIG-2011, ISTH1048-NIG-2011, ISTH1058-NIG-2011, ISTH1064-NIG-2011, ISTH1069-NIG-2011, ISTH1096-NIG-2012, ISTH1107-NIG-2012, ISTH1111-NIG-2011, ISTH1121-NIG-2012, ISTH1129-NIG-2012, ISTH1137-NIG-2011, ISTH2010-NIG-2012, ISTH2016-NIG-2012, ISTH2020-NIG-2012, ISTH2025-NIG-2012, ISTH2031-NIG-2012, ISTH2037-NIG-2012, ISTH2042-NIG-2012, ISTH2046-NIG-2012, ISTH2050-NIG-2012, ISTH2057-NIG-2012, ISTH2061-NIG-2012, ISTH2064-NIG-2012, ISTH2065-NIG-2012, ISTH2066-NIG-2012, ISTH2069-NIG-2012, ISTH2094-NIG-2012, ISTH2129-NIG-2012, ISTH2217-NIG-2012, ISTH2271-NIG-2012, ISTH2304-NIG-2012, ISTH2312-NIG-2012, ISTH2316-NIG-2012, ISTH2334-NIG-2012, ISTH2358-NIG-2012, ISTH2376-NIG-2012, Lassa virus/H.sapiens-wt/NGA/2015/ISTH_0543, Lassa virus/H.sapiens-wt/NGA/2015/ISTH_0547, Lassa virus/H.sapiens-wt/NGA/2015/ISTH_0574, Lassa virus/H.sapiens-wt/NGA/2015/ISTH _0681, Lassa virus/H.sapiens-wt/NGA/2015/ISTH_0682, Lassa virus/H.sapiens-wt/NGA/2015/ISTH_0687, Lassa virus/H.sapiens-wt/NGA/2015/ISTH_0736, Lassa virus/H.sapiens-wt/NGA/2015/ISTH_0789, Lassa virus/H.sapiens-wt/NGA/2015/ISTH_0821, Lassa virus/H.sapiens-wt/NGA/2015/ISTH_0831, Lassa virus/H.sapiens-wt/NGA/2016/ISTH _0009, Lassa virus/H.sapiens-wt/NGA/2016/ISTH_0017, Lassa virus/H.sapiens-wt/NGA/2016/ISTH_0035, Lassa virus/H.sapiens-wt/NGA/2016/ISTH_0089, Lassa virus/H.sapiens-wt/NGA/2016/ISTH_0104, Lassa virus/H.sapiens-wt/NGA/2016/ISTH_0133, Lassa virus/H.sapiens-wt/NGA/2016/ISTH_0141, Lassa virus/H.sapiens-wt/NGA/2016/ISTH _0146, Lassa virus/H.sapiens-wt/NGA/2016/ISTH_0176, Lassa virus/H.sapiens-wt/NGA/2016/ISTH_0187, Lassa virus/H.sapiens-wt/NGA/2016/ISTH_0199, Lassa virus/H.sapiens-wt/NGA/2016/ISTH_0419, Lassa virus/H.sapiens-wt/NGA/2016/ISTH_0447, Lassa virus/H.sapiens-wt/NGA/2016/ISTH_0543, Lassa virus/H.sapiens-wt/NGA/2016/ISTH _0565, Lassa virus/H.sapiens-wt/NGA/2016/ISTH_0572, Lassa virus/H.sapiens-wt/NGA/2016/ISTH_0610, Lassa virus/H.sapiens-wt/NGA/2016/ISTH_0621, Lassa virus/H.sapiens-wt/NGA/2016/ISTH_0701, Lassa virus/H.sapiens-wt/NGA/2016/ISTH_0702, Lassa virus/H.sapiens-wt/NGA/2016/ISTH_0703, Lassa virus/H.sapiens-wt/NGA/2016/ISTH _0717, Lassa virus/H.sapiens-wt/NGA/2016/ISTH_0753, Lassa virus/H.sapiens-wt/NGA/2016/ISTH_0759, Lassa virus/H.sapiens-wt/NGA/2016/ISTH_0777, Lassa virus/H.sapiens-wt/NGA/2016/ISTH_0779, Lassa virus/H.sapiens-wt/NGA/2016/ISTH_0917, Lassa virus/H.sapiens-wt/NGA/2016/ISTH_0919, Lassa virus/H.sapiens-wt/NGA/2016/ISTH _1006, Lassa virus/H.sapiens-wt/NGA/2016/ISTH_1026, Lassa virus/H.sapiens-wt/NGA/2016/ISTH_1069, Lassa virus/H.sapiens-wt/NGA/2016/ISTH_1070, Lassa virus/H.sapiens-wt/NGA/2016/ISTH_1123, Lassa virus/H.sapiens-wt/NGA/2016/ISTH_1150, Lassa virus/H.sapiens-wt/NGA/2016/ISTH_1174, Lassa virus/H.sapiens-wt/NGA/2016/ISTH _1207, Lassa virus/H.sapiens-wt/NGA/2016/ISTH_1250, Lassa virus/H.sapiens-wt/NGA/2016/ISTH_1306, Lassa virus/H.sapiens-wt/NGA/2016/ISTH_1311, Lassa virus/H.sapiens-wt/NGA/2016/ISTH_1398, Lassa virus/H.sapiens-wt/NGA/2016/ISTH_1423, Lassa virus/H.sapiens-wt/NGA/2016/ISTH_1462, Lassa virus/H.sapiens-wt/NGA/2016/ ISTH_1472, Lassa virus/H.sapiens-wt/NGA/2016/ISTH_1474, Lassa virus/H.sapiens-wt/NGA/2016/ISTH_1496, Lassa virus/H.sapiens-wt/NGA/2016/ISTH_1541, Lassa virus/H.sapiens-wt/NGA/2016/ISTH_1546, Lassa virus/H.sapiens-wt/NGA/2016/ISTH_1568, Lassa virus/H.sapiens-wt/NGA/2016/ISTH_1591, Lassa virus/H.sapiens-wt/NGA/2016/ ISTH_1604, Lassa virus/H.sapiens-wt/NGA/2016/ISTH_1609, Lassa virus/H.sapiens-wt/NGA/2016/ISTH_1610, Lassa virus/H.sapiens-wt/NGA/2018/ISTH_0026, Lassa virus/H.sapiens-wt/NGA/2018/ISTH_0097, Lassa virus/H.sapiens-wt/NGA/2018/ISTH_0541, Lassa virus/H.sapiens-wt/NGA/2018/ISTH_0664, Lassa virus/H.sapiens-wt/NGA/2018/ ISTH_0959, Lassa virus/H.sapiens-wt/NGA/2018/ISTH_1024, Lassa virus/H.sapiens-wt/NGA/2018/ISTH_1079, Lassa virus/H.sapiens-wt/NGA/2018/ISTH_1177, Lassa virus/H.sapiens-wt/NGA/2018/ISTH_1375, Lassa virus/H.sapiens-wt/NGA/2018/ISTH_1381, Lassa virus/H.sapiens-wt/NGA/2018/ISTH1643, LASV003-NIG-2008, LASV006-NIG-2008, LASV035-NIG-2009, LASV042-NIG-2009, LASV045-NIG-2009, LASV046-NIG-2009, LASV049-NIG-2009, LASV052-NIG-2008, LASV056-NIG-2008, LASV058-NIG-2008, LASV063-NIG-2009, LASV1000-NIG-2009, LASV1008-NIG-2009, LASV1011-NIG-2009, LASV1015-NIG-2009, LASV1016-NIG-2009, LASV221-NIG-2010, LASV224-NIG-2010, LASV225-NIG-2010, LASV229-NIG-2010, LASV237-NIG-2010, LASV239-NIG-2010, LASV241-NIG-2011, LASV242-NIG-2010, LASV245-NIG-2011, LASV246-NIG-2010, LASV250-NIG-2011, LASV251-NIG-2010, LASV253-NIG-2011, LASV254-NIG-2011, LASV256-NIG-2010, LASV263-NIG-2011, LASV267-NIG-2010, LASV271-NIG-2010, LASV274-NIG-2010, LASV711-NIG-2009, LASV716-NIG-2009, LASV719-NIG-2009, LASV736-NIG-2009, LASV737-NIG-2009, LASV738-NIG-2009, LASV746-NIG-2009, LASV966-NIG-2009, LASV967-NIG-2009, LASV969-NIG-2009, LASV971-NIG-2009, LASV975-NIG-2009, LASV976-NIG-2009, LASV977-NIG-2009, LASV978-NIG-2009, LASV979-NIG-2009, LASV981-NIG-2009, LASV982-NIG-2009, LASV988-NIG-2009, LASV989-NIG-2009, LASV990-NIG-2009, LASV991-NIG-2009, LASV992-NIG-2009, LASV993-NIG-2009, Nig08-04, Nig08-A37, Nig08-A41, Nig08-A47, or NIGERIA IKEJI; accordingly, when reference is made to “LASV clade II” or “LASV lineage II”, said LASV clade II member may be preferably selected from said list. Preferred LASV clade II members in the context of the invention are 803213, ISTH0009-NIG-2011, ISTH2010-NIG-2012, Lassa virus/H.sapiens-wt/NGA/2015/ISTH_0543, Lassa virus/H.sapiens-wt/NGA/2016/ISTH_0009, Lassa virus/H.sapiens-wt/NGA/2016/ISTH_0017, Lassa virus/H.sapiens-wt/NGA/2018/ISTH_0959, LASV003-NIG-2008, LASV035-NIG-2009, LASV1000-NIG-2009, LASV221-NIG-2010, LASV237-NIG-2010, LASV253-NIG-2011, LASV254-NIG-2011, or Nig08-04.

[0171] List 3: LASV Clade III or LASV Lineage III Members:

[0172] In embodiments, the LASV from which the antigenic peptide or protein is derived from is a clade III member, wherein said clade III member may preferably be selected from a list comprising GA391, CSF, ISTH2121-NIG-2012, Nig08-A18, Nig08-A19, ONM-299, ONM-314, ONM-700, or Weller; accordingly, when reference is made to “LASV clade III” or “LASV lineage III”, said LASV clade III member may be preferably selected from said list. Preferred LASV clade III members in the context of the invention are GA391, or Nig08-A19.

[0173] List 4: LASV Clade IV or LASV Lineage IV Members:

[0174] In embodiments, the LASV from which the antigenic peptide or protein is derived from is a clade IV member, wherein said clade IV member may preferably be selected from a list comprising Josiah, BA366, G1180-SLE-2010, G1190-SLE-2010, G1200-LIB-2010, G1442-SLE-2011, G1529-SLE-2011, G1618-SLE-2011, G1646-SLE-2011, G1647-SLE-2011, G1727-SLE-2011, G1774-SLE-2011, G1792-SLE-2011, G1897-SLE-2011, G1932-SLE-2011, G1959-SLE-2011, G1960-SLE-2011, G2141-SLE-2011, G2147-SLE-2011, G2165-SLE-2011, G2184-SLE-2011, G2197-SLE-2011, G2222-SLE-2011, G2230-SLE-2012, G2259-SLE-2012, G2263-SLE-2012, G2280-SLE-2012, G2295-SLE-2012, G2315-SLE-2012, G2318-SLE-2012, G2363-SLE-2012, G2384-SLE-2012, G2392-SLE-2012, G2405-SLE-2012, G2427-SLE-2012, G2431-SLE-2012, G2511-SLE-2012, G2554-SLE-2012, G2557-SLE-2012, G2565-SLE-2012, G2587-SLE-2012, G2612-SLE-2012, G2615-SLE-2012, G2723-SLE-2012, G2789-SLE-2012, G2868-SLE-2012, G2903-SLE-2012, G2906-SLE-2012, G2934-SLE-2012, G2944-SLE-2012, G3010-SLE-2013, G3016-SLE-2013, G3034-SLE-2013, G3076-SLE-2013, G3101-SLE-2013, G3106-SLE-2013, G3110-SLE-2013, G3148-SLE-2013, G3151-SLE-2013, G3157-SLE-2013, G3170-SLE-2013, G3206-SLE-2013, G3222-SLE-2013, G3229-SLE-2013, G3234-SLE-2013, G3248-SLE-2013, G3253-SLE-2013, G3278-SLE-2013, G3283-SLE-2013, G502-SLE-2009, G503-SLE-2009, G610-SLE-2009, G636-SLE-2009, G676-SLE-2009, G692-SLE-2009, G693-SLE-2009, G733-SLE-2010, G771-SLE-2010, G806-SLE-2010, G808-SLE-2010, Guinea Faranah, GUINEA Z-185a, IGS-1, IGS-10, IGS-11, IGS-12, IGS-13, IGS-14, IGS-16, IGS-17, IGS-18, IGS-19, IGS-2, IGS-20, IGS-21, IGS-22, IGS-23, IGS-24, IGS-25, IGS-26, IGS-27, IGS-3, IGS-4, IGS-7, IGS-9, IRF0172, IRF0185, IRF0193, IRF0194, IRF0201, IRF0205, LM032-SLE-2010, LM222-SLE-2010, LM395-SLE-2009, LM765-SLE-2012, LM771-SLE-2012, LM774-SLE-2012, LM776-SLE-2012, LM778-SLE-2012, LM779-SLE-2012, Macenta, Mad39, Mad41, Mad62, Mad63, Mad69, Mad83, ML29, NL, recombinant Josiah, Z0947-SLE-2011, Z0948-SLE-2011, or Z148; accordingly, when reference is made to “LASV clade IV” or “LASV lineage IV”, said LASV clade IV member may be preferably selected from said list. Preferred LASV clade IV members in the context of the invention are Josiah, G1180-SLE-2010, G1442-SLE-2011, G3010-SLE-2013, G502-SLE-2009, G733-SLE-2010, MOPV/LASV reassortant IGS-1, LM765-SLE-2012, LM776-SLE-2012, Mad39, or Z0947-SLE-2011.

[0175] List 5: LASV Clade V or LASV Lineage V Members:

[0176] In embodiments, the LASV from which the antigenic peptide or protein is derived from is a clade V member, wherein said clade V member may preferably be selected from a list comprising AV, Bamba-R114, Komina-R16, Ouoma-R123, Soromba-R, or Soromba-R30; accordingly, when reference is made to “LASV clade V” or “LASV lineage V”, said LASV clade V member may be preferably selected from said list. A preferred LASV clade V member in the context of the invention is AV.

[0177] List 6: LASV Clade VI or LASV Lineage VI Members:

[0178] In embodiments, the LASV from which the antigenic peptide or protein is derived from is a clade VI member, wherein said clade VI member may preferably be selected from a list comprising Togo/2016/7082, Alzey, Lassa/H.sapiens-tc/TGO/2016/812939, or Lassa/H.sapiens-wt/TGO/2016/201600568; accordingly, when reference is made to “LASV clade VI” or “LASV lineage VI”, said LASV clade VI member may be preferably selected from said list. A preferred LASV clade VI member in the context of the invention is Togo/2016/7082.

[0179] Accordingly, the RNA of the first aspect comprises at least one coding sequence encoding at least one antigenic peptide or protein derived from a Lassa virus (LASV) protein or a fragment or variant thereof, wherein said coding sequence is operably linked to a 5′-UTR and/or 3′-UTR, wherein suitably
[0180] said 5′-UTR derived from a HSD17B4 gene comprises or consists of a nucleic acid sequence being identical or at least 70%, 80%, 85%, 86%, 87%, 88%, 89%, 90%, 91%, 92%, 93%, 94%, 95%, 96%, 97%, 98%, or 99% identical to SEQ ID NO: 13804 or 13805 or a fragment or a variant thereof;
[0181] said 5′-UTR derived from a ASAH1 gene comprises or consists of a nucleic acid sequence being identical or at least 70%, 80%, 85%, 86%, 87%, 88%, 89%, 90%, 91%, 92%, 93%, 94%, 95%, 96%, 97%, 98%, or 99% identical to SEQ ID NO: 13806 or 13807 or a fragment or a variant thereof;
[0182] said 5′-UTR derived from a ATP5A1 gene comprises or consists of a nucleic acid sequence being identical or at least 70%, 80%, 85%, 86%, 87%, 88%, 89%, 90%, 91%, 92%, 93%, 94%, 95%, 96%, 97%, 98%, or 99% identical to SEQ ID NO: 13808 or 13809 or a fragment or a variant thereof;
[0183] said 5′-UTR derived from a MP68 gene comprises or consists of a nucleic acid sequence being identical or at least 70%, 80%, 85%, 86%, 87%, 88%, 89%, 90%, 91%, 92%, 93%, 94%, 95%, 96%, 97%, 98%, or 99% identical to SEQ ID NO: 13810 or 13811 or a fragment or a variant thereof;
[0184] said 5′-UTR derived from a NDUFA4 gene comprises or consists of a nucleic acid sequence being identical or at least 70%, 80%, 85%, 86%, 87%, 88%, 89%, 90%, 91%, 92%, 93%, 94%, 95%, 96%, 97%, 98%, or 99% identical to SEQ ID NO: 13812 or 13813 or a fragment or a variant thereof;
[0185] said 5′-UTR derived from a NOSIP gene comprises or consists of a nucleic acid sequence being identical or at least 70%, 80%, 85%, 86%, 87%, 88%, 89%, 90%, 91%, 92%, 93%, 94%, 95%, 96%, 97%, 98%, or 99% identical to SEQ ID NO: 13814 or 13815 or a fragment or a variant thereof;
[0186] said 5′-UTR derived from a RPL31 gene comprises or consists of a nucleic acid sequence being identical or at least 70%, 80%, 85%, 86%, 87%, 88%, 89%, 90%, 91%, 92%, 93%, 94%, 95%, 96%, 97%, 98%, or 99% identical to SEQ ID NO: 13816 or 13817 or a fragment or a variant thereof;
[0187] said 5′-UTR derived from a RPL32 gene comprises or consists of a nucleic acid sequence being identical or at least 70%, 80%, 85%, 86%, 87%, 88%, 89%, 90%, 91%, 92%, 93%, 94%, 95%, 96%, 97%, 98%, or 99% identical to SEQ ID NO: 13824 or 13825 or a fragment or a variant thereof;
[0188] said 5′-UTR derived from a SLC7A3 gene comprises or consists of a nucleic acid sequence being identical or at least 70%, 80%, 85%, 86%, 87%, 88%, 89%, 90%, 91%, 92%, 93%, 94%, 95%, 96%, 97%, 98%, or 99% identical to SEQ ID NO: 13818 or 13819 or a fragment or a variant thereof;
[0189] said 5′-UTR derived from a TUBB4B gene comprises or consists of a nucleic acid sequence being identical or at least 70%, 80%, 85%, 86%, 87%, 88%, 89%, 90%, 91%, 92%, 93%, 94%, 95%, 96%, 97%, 98%, or 99% identical to SEQ ID NO: 13820 or 13821 or a fragment or a variant thereof;
[0190] said 5′-UTR derived from a UBQLN2 gene comprises or consists of a nucleic acid sequence being identical or at least 70%, 80%, 85%, 86%, 87%, 88%, 89%, 90%, 91%, 92%, 93%, 94%, 95%, 96%, 97%, 98%, or 99% identical to SEQ ID NO: 13822 or 13823 or a fragment or a variant thereof;
[0191] said 3′-UTR derived from a PSMB3 gene comprises or consists of a nucleic acid sequence being identical or at least 70%, 80%, 85%, 86%, 87%, 88%, 89%, 90%, 91%, 92%, 93%, 94%, 95%, 96%, 97%, 98%, or 99% identical to SEQ ID NO: 13826 or 13827 or a fragment or a variant thereof;
[0192] said 3′-UTR derived from a CASP1 gene comprises or consists of a nucleic acid sequence being identical or at least 70%, 80%, 85%, 86%, 87%, 88%, 89%, 90%, 91%, 92%, 93%, 94%, 95%, 96%, 97%, 98%, or 99% identical to SEQ ID NO: 13828 or 13829 or a fragment or a variant thereof;
[0193] said 3′-UTR derived from a COX6B1 gene comprises or consists of a nucleic acid sequence being identical or at least 70%, 80%, 85%, 86%, 87%, 88%, 89%, 90%, 91%, 92%, 93%, 94%, 95%, 96%, 97%, 98%, or 99% identical to SEQ ID NO: 13830 or 13831 or a fragment or a variant thereof;
[0194] said 3′-UTR derived from a GNAS gene comprises or consists of a nucleic acid sequence being identical or at least 70%, 80%, 85%, 86%, 87%, 88%, 89%, 90%, 91%, 92%, 93%, 94%, 95%, 96%, 97%, 98%, or 99% identical to SEQ ID NO: 13832 or 13833 or a fragment or a variant thereof;
[0195] said 3′-UTR derived from a NDUFA1 gene comprises or consists of a nucleic acid sequence being identical or at least 70%, 80%, 85%, 86%, 87%, 88%, 89%, 90%, 91%, 92%, 93%, 94%, 95%, 96%, 97%, 98%, or 99% identical to SEQ ID NO: 13834 or 13835 or a fragment or a variant thereof;
[0196] said 3′-UTR derived from a RPS9 gene comprises or consists of a nucleic acid sequence being identical or at least 70%, 80%, 85%, 86%, 87%, 88%, 89%, 90%, 91%, 92%, 93%, 94%, 95%, 96%, 97%, 98%, or 99% identical to SEQ ID NO: 13836 or 13837 or a fragment or a variant thereof;
[0197] said 3′-UTR derived from a ALB7 gene comprises or consists of a nucleic acid sequence being identical or at least 70%, 80%, 85%, 86%, 87%, 88%, 89%, 90%, 91%, 92%, 93%, 94%, 95%, 96%, 97%, 98%, or 99% identical to SEQ ID NO: 13838 or 13839 or a fragment or a variant thereof;
[0198] said 3′-UTR derived from a alpha-globin gene comprises or consists of a nucleic acid sequence being identical or at least 70%, 80%, 85%, 86%, 87%, 88%, 89%, 90%, 91%, 92%, 93%, 94%, 95%, 96%, 97%, 98%, or 99% identical to EQ ID NO: 13840 or 13841 or a fragment or a variant thereof.

[0199] In preferred embodiments, the at least one antigenic peptide or protein is derived from glycoprotein precursor (GPC), a prefusion-stabilized GPC, nucleoprotein (NP), zinc-binding matrix protein (Z), or a variant, fragment, or combination thereof. In preferred embodiments, GPC, prefusion-stabilized GPC, NP, and Z are full-length proteins.

[0200] The term “full-length protein” or as used herein typically refers to a protein that substantially comprises the entire amino acid sequence of the naturally occurring (wild type) protein. Accordingly, in a preferred embodiment, the at least one coding sequence of the RNA of the first aspect encodes a full-length antigenic protein derived from LASV or a variant of said protein.

[0201] As the sole antigen on the viral surface, the LASV glycoprotein complex (GPC) is the primary target of protective humoral immune responses and a focus for vaccine design efforts. The mature GPC is a trimer of heterotrimers, with each heterotrimer composed of the non-covalently associated myristoylated stable signal peptide (SSP), GP1 and GP2 subunits. SSP is required for proper processing of GPC and is retained as part of the complex. GP1 is responsible for receptor binding and determines tropism, while GP2 mediates fusion of the virion with a host cell membrane wherein GP2 undergoes an acid pH-driven, conformational change from a metastable, prefusion structure to a more stable, postfusion structure (see e.g. Hastie, Kathryn M., and Erica Ollmann Saphire. “Lassa virus glycoprotein: stopping a moving target.” Current opinion in virology 31 (2018): 52-58). In preferred embodiments, the coding RNA of the invention encodes at least one antigenic protein that is or is derived from GPC or a fragment or variant thereof.

[0202] In embodiments, the coding RNA of the invention encodes at least one antigenic protein that is or is derived from GPC wherein the GPC is a full-length GPC protein having typically an amino acid sequence comprising or consisting of amino acid 1 to amino acid 491 (for e.g. most of the LASV clade/lineages IV members) or of amino acid 1 to amino acid 490 (for e.g. most of LASV clade/lineage I, II, Ill members). In other embodiments, the coding RNA of the invention encodes at least one antigenic protein that is or is derived from GPC, wherein the GPC is a fragment of a GPC protein.

[0203] According to preferred embodiments, the RNA of the first aspect comprises
[0204] at least one coding sequence encoding at least one antigenic peptide or protein derived from LASV GPC comprising or consisting of at least one amino acid sequences being identical or at least 70%, 80%, 85%, 86%, 87%, 88%, 89%, 90%, 91%, 92%, 93%, 94%, 95%, 96%, 97%, 98%, or 99% identical to any one of SEQ ID NO: 1-254 or a fragment or variant of any of these sequences;
[0205] at least one coding sequence encoding at least one antigenic peptide or protein derived from LASV NP comprising or consisting of at least one amino acid sequences being identical or at least 70%, 80%, 85%, 86%, 87%, 88%, 89%, 90%, 91%, 92%, 93%, 94%, 95%, 96%, 97%, 98%, or 99% identical to any one of SEQ ID NO: 7547-7797 or a fragment or variant of any of these sequences; or
[0206] at least one coding sequence encoding at least one antigenic peptide or protein derived from LASV Z comprising or consisting of at least one amino acid sequences being identical or at least 70%, 80%, 85%, 86%, 87%, 88%, 89%, 90%, 91%, 92%, 93%, 94%, 95%, 96%, 97%, 98%, or 99% identical to any one of SEQ ID NO: 11166-11347 or a fragment or variant of any of these sequences.

[0207] Additional information regarding each of these suitable amino acid sequences encoding LASV proteins may also be derived from the sequence listing, e.g. the respective NCBI Accession number, strain and clade information, are provided therein under identifier <223>.

[0208] According to other embodiments, the RNA of the first aspect encodes at least one antigenic peptide or protein as defined above and additionally at least one further heterologous peptide or protein element.

[0209] Suitably, the at least one further peptide or protein element may promote/improve secretion of the antigenic peptide or protein (e.g. via secretory signal peptides), promote/improve anchoring of the antigenic peptide or protein in the plasma membrane (e.g. via transmembrane elements), promote/improve formation of antigen complexes (e.g. via multimerization domains), promote/improve virus-like particle formation (VLP forming sequence). In addition, the RNA of the first aspect may encode peptide linker elements, self-cleaving peptides, immunologic adjuvant sequences or dendritic cell targeting sequences. Suitable multimerization domains may be selected from the list of amino acid sequences according to SEQ ID NOs: 1116-1167 of WO2017/081082, or fragments or variants of these sequences. Suitable transmembrane elements may be selected from the list of amino acid sequences according to SEQ ID NOs: 1228-1343 of WO2017/081082, or fragments or variants of these sequences. Suitable VLP forming sequences may be selected from the list of amino acid sequences according to SEQ ID NOs: 1168-1227 of WO2017/081082, or fragments or variants of these sequences. Suitable peptide linkers may be selected from the list of amino acid sequences according to SEQ ID NOs: 1509-1565 of WO2017/081082, or fragments or variants of these sequences. Suitable self-cleaving peptides may be selected from the list of amino acid sequences according to SEQ ID NOs: 1434-1508 of WO2017/081082, or fragments or variants of these sequences. Suitable immunologic adjuvant sequences may be selected from the list of amino acid sequences according to SEQ ID NOs: 1360-1421 of WO2017/081082, or fragments or variants of these sequences. Suitable dendritic cell targeting sequences may be selected from the list of amino acid sequences according to SEQ ID NOs: 1344-1359 of WO2017/081082, or fragments or variants of these sequences. Suitable secretory signal peptides may be selected from the list of amino acid sequences according to SEQ ID NOs: 1-1115 and SEQ ID NO: 1728 of WO2017/081082, or fragments or variants of these sequences. Further suitable secretory signal peptides are selected from: SEQ ID NOs: 423-427 of patent application WO2017/070624A1 or a fragment or variant of any of these sequences. In this context SEQ ID NOs: 423-427, of patent application WO2017/070624A1, and the disclosure related thereto, are herewith incorporated by reference.

[0210] In embodiments, the RNA of the first aspect encodes at least one antigenic peptide or protein or a fragment thereof as defined above and additionally at least one further heterologous secretory signal peptide.

[0211] Such signal peptides are sequences, which typically exhibit a length of about 15 to 30 amino acids and are preferably located at the N-terminus of the encoded peptide, without being limited thereto. Signal peptides as defined herein preferably allow the transport of the antigenic peptide or protein as encoded by the inventive mRNA into a defined cellular compartment, preferably the cell surface, the endoplasmic reticulum (ER) or the endosomal-lysosomal compartment. Examples of secretory signal peptide sequences as defined herein include, without being limited thereto, signal sequences of classical or non-classical MHC-molecules (e.g. signal sequences of MHC I and II molecules, e.g. of the MHC class I molecule HLA-A*0201), signal sequences of cytokines or immunoglobulines, signal sequences of the invariant chain of immunoglobulines or antibodies, signal sequences of Lamp1, Tapasin, Erp57, Calretikulin, Calnexin, PLAT, EPO or albumin and further membrane associated proteins or of proteins associated with the endoplasmic reticulum (ER) or the endosomal-lysosomal compartment.

[0212] Particularly preferred signal peptides are those derived from human HLA-A2 (amino acids 1-24), human PLAT (amino acids 1-23, 1-21 or 1-22), human EPO (amino acids 1-27), human ALB (amino acids 1-18), human IgE, human CD5 (amino acids 1-24), human IL2 (amino acids 1-20), human CTRB2 (amino acids 1-18), human IgG-HC (amino acids 1-19), human Ig-HC (amino acids 1-19), human Ig-LC (amino acids 1-19), Gaussia princeps Luc (amino acids 1-17), mouse lgkappa, NrChit1 (1-26), CILp1.1(1-21), Nepenthes rafflesiana Nep1 (amino acids 1-24), human Azul (amino acids 1-19), human CD33 (amino acids 1-16), Vibrio cholera CtxB (amino acids 1-19), human CST4 (amino acids 1-20), human Ins-isol (amino acids 1-24), human SPARC (amino acids 1-17), or Influenza A SP-H1 N1 (Netherlands2009)-HA.

[0213] Such signal peptides are preferably used in order to promote secretion of the encoded antigenic peptide or protein. More preferably, a signal peptide as defined herein is fused to an encoded antigenic peptide or protein as defined herein.

[0214] Accordingly, in particularly preferred embodiments, the RNA of the first aspect encodes at least one antigenic peptide or protein or a fragment thereof as defined above and additionally at least one further heterologous secretory signal peptide. Said signal peptide is preferably fused to the at least one antigenic peptide or protein, more preferably to the N-terminus of the at least one antigenic peptide or protein as described herein, wherein the signal peptide preferably comprises or consists of an amino acid sequence as defined by SEQ ID NOs: 13880-13913, or a variant or fragment of any one of these amino acid sequences. Such variants or fragments are preferably functional, i.e. exhibit the same desired biological function as the signal peptides they are derived from, and are thus preferably capable of mediating secretion of the fused antigenic protein or peptide.

[0215] Suitably, the secretory signal peptide is or is derived from tissue plasminogen activator (TPA or HsPLAT), human serum albumin (HSA or HsALB), or immunoglobulin IgE (IgE).

[0216] In preferred embodiments, the secretory signal peptide is or is derived from HsPLAT, HsALB, or IgE, wherein the amino acid sequence of said heterologous signal peptides is identical or at least 70%, 80%, 85%, 86%, 87%, 88%, 89%, 90%, 91%, 92%, 93%, 94%, 95%, 96%, 97%, 98%, or 99% identical to any one of amino acid sequences SEQ ID NOs: 13881, 13883, or 13884, or fragment or variant of any of these.

[0217] In preferred embodiments, the RNA of the first aspect encodes at least one antigenic peptide or protein or a fragment thereof derived from NP comprising preferably of at least one amino acid sequence being identical or at least 70%, 80%, 85%, 86%, 87%, 88%, 89%, 90%, 91%, 92%, 93%, 94%, 95%, 96%, 97%, 98%, or 99% identical to any one of SEQ ID NO: 7547-7797 or a fragment or variant of any of these sequences and additionally at least one further heterologous secretory signal peptide.

[0218] In embodiments where the coding RNA of the invention additionally encodes heterologous secretory signal peptides, it is particularly preferred and suitable to generate a fusion protein comprising a heterologous N-terminal secretory signal peptide and a C-terminal peptide or protein derived from NP. The first natural methionine of NP (preferably according to SEQ ID NOs: SEQ ID NO: 7547-7797) is preferably replaced by the heterologous signal sequence. Accordingly, improved secretion of the LASV protein, preferably the NP protein, upon administration of the coding RNA of the first aspect, may be advantageous for the induction of humoral immune responses against the encoded LASV antigenic protein.

[0219] Suitable examples of LASV constructs comprising an N-terminal heterologous secretory signal peptide are SP- HsPLAT_NP, SP-HsALB_NP, SP-IgE_NP. The corresponding amino acid sequences for each of the above listed constructs can be found in Table 4.1, 4.2 and 4.3 respectively.

[0220] According to preferred embodiments, the RNA of the first aspect comprises
[0221] at least one coding sequence encoding at least one antigenic peptide or protein derived from HsPLAT_NP comprising or consisting of at least one amino acid sequences being identical or at least 70%, 80%, 85%, 86%, 87%, 88%, 89%, 90%, 91%, 92%, 93%, 94%, 95%, 96%, 97%, 98%, or 99% identical to any one of SEQ ID NO: 17968-18001 or a fragment or variant of any of these sequences; or
[0222] at least one coding sequence encoding at least one antigenic peptide or protein derived from HsALB_NP comprising or consisting of at least one amino acid sequences being identical or at least 70%, 80%, 85%, 86%, 87%, 88%, 89%, 90%, 91%, 92%, 93%, 94%, 95%, 96%, 97%, 98%, or 99% identical to any one of SEQ ID NO: 19328-19361 or a fragment or variant of any of these sequences;
[0223] at least one coding sequence encoding at least one antigenic peptide or protein derived from IgE_NP comprising or consisting of at least one amino acid sequences being identical or at least 70%, 80%, 85%, 86%, 87%, 88%, 89%, 90%, 91%, 92%, 93%, 94%, 95%, 96%, 97%, 98%, or 99% identical to any one of SEQ ID NO: 20689-20722 or a fragment or variant of any of these sequences.

[0224] Additional information regarding each of these suitable amino acid sequences encoding LASV proteins may also be derived from the sequence listing, e.g. the respective NCBI Accession Number, strain and clade information, are provided therein under identifier <223>.

[0225] On the surface of the virion GPC forms a trimer of heterotrimers, each containing the receptor binding subunit GP1 and the transmembrane fusion-mediating subunit GP2, and a stable signal peptide (SSP). GPC precursor is trafficked from the endoplasmic reticulum to the Golgi, where it is N-glycosylated and processed by cellular proteases into its mature form, which comprises non-covalently linked GP1, GP2, and SSP. A study of more than 100 antibodies from human survivors of LASV infection found that the majority of neutralizing response to LASV targeted the prefusion GPC trimer, rather than either subunit alone (Robinson, James E., et al. “Most neutralizing human monoclonal antibodies target novel epitopes requiring both Lassa virus glycoprotein subunits.” Nature communications 7 (2016): 11544). This indicates that to elicit potent neutralizing antibody response against the metastable LASV GP the stabilization in the prefusion conformation is important. Hence, vaccines designed with the intent to elicit neutralizing antibodies, should focus on stabilizing the LASV GPC in its prefusion, metastable state. Perfusion GPC trimer may therefore represent a particularly suitable antigen in the context of the invention. Hastie et al presented recently a crystal structure of the prefusion GPC trimer of LASV, in complex with the human neutralizing antibody 37.7H, which is directed against the quaternary GPC-B epitope (Hastie, Kathryn M., et al. “Structural basis for antibody-mediated neutralization of Lassa virus.” Science 356.6341 (2017): 923-928).

[0226] According to preferred embodiments, the at least one antigenic peptide or protein is derived from GPC, preferably from full-length GPC, as GPC is the sole antigen on the viral surface and the primary target of protective humoral immune responses. Moreover, the full-length GPC is required to generate a GPC trimer after translation of the RNA of the first aspect in a cell, requiring GP1, GP2 and stable signal peptide (SSP).

[0227] According to preferred embodiments, the at least one antigenic peptide or protein is derived from a prefusion- stabilized GPC.

[0228] Preferred prefusion-stabilized GPC comprise at least one of the following mutations i), ii), and iii):
[0229] i) amino acid substitutions allowing a covalent link of GP1 and GP2, preferably by introduction of two additional cysteine residues, preferably at position 207 or 206 and 360 or 359, preferably by amino acid substitutions R2070 and G360C;
[0230] ii) amino acid substitutions allowing stabilization of GP2, preferably E329P or E328P;
[0231] iii) replacing the native GP1-GP2 cleavage site with a furin cleavage site, e.g. RRLL to RRRR, preferably by amino acid substitutions L258R, L259R or L257R, L258R, wherein prefusion-stabilized GPC preferably comprises i), ii), and iii).

[0232] Prefusion-stabilized GPC comprises at least one of the following mutations A, preferably of Al, A2, A3 and B, and C:
[0233] A amino acid substitutions allowing a covalent link of different structural elements of GPC, preferably by introduction of two additional cysteine residues, wherein preferably
[0234] A1 the amino acid substitutions allowing a covalent link of GP1 and GP2, preferably by introduction of two additional cysteine residues, preferably at position 207 or 206 and 360 or 359, preferably by amino acid substitutions R2070 or R2060 and G360C or G359C, or
[0235] A2 the amino acid substitutions allowing a covalent link of GP1 to HR1 of GP2, preferably by introduction of two additional cysteine residues, preferably at position 81 or 80 and 319 or 318, preferably by amino acid substitutions T81C or T800 and N319C or N318C, or
[0236] A3 the amino acid substitutions allowing a covalent link of T-loop in GP2 to adjacent loop in GP2, preferably by introduction of two additional cysteine residues, preferably at positon 370 or 369 and 386 or 385, preferably by amino acid substitutions W370C or W369C and W386C or W385C,
[0237] B amino acid substitutions allowing stabilization of GP2, preferably by introduction of a helix-breaking point mutation in the metastable region of HR1 of GP2 subunit, more preferably by introducing E329P or E328P,
[0238] C replacing the native GP1-GP2 cleavage site (S1 P) with a furin cleavage site, e.g. RRLL to RRRR to facilitate efficient processing of the mRNA encoded antigenic protein in target cells, preferably by amino acid substitutions L258R, L259R or L257R, L258R,
[0239] wherein prefusion-stabilized GPC preferably comprises at least one mutation A selected from A1, A2 and A3.

[0240] According to preferred embodiments, the at least one antigenic peptide or protein is derived from a prefusion-stabilized GPC, wherein the stabilized GPC comprises the following mutations: A1, B, and C (herein referred to as “GPCmutl” or “GPCstabilized”), A2, B and C (herein referred to as “GPCmut2”), A3, B and C (herein referred to as “GPCmut3”), A2, A3, B and C (herein referred to as “GPCmut4”), A1 and B (herein referred to as “GPCmut5”), A2 and B (herein referred to as “GPCmut6”), A3 and B (herein referred to as “GPCmut7”), A2, A3 and B (herein referred to as “GPCmut8”), Al (herein referred to as “GPCmut9”), A2 (herein referred to as “GPCmutl 0”), A3 (herein referred to as “GPCmut11”), or A2 and A3 (herein referred to as “GPCmut12”). Table X3 summarizes the prefusion-stabilized GPC mutants.

[0241] According to preferred embodiments, the at least one antigenic peptide or protein is derived from a prefusion-stabilized GPC, wherein the stabilized GPC comprises the following mutations: A1 and/ or A2, wherein A1, B, and C (herein referred to as “GPCmut1”), A2, B and C (herein referred to as “GPCmut2”), A1 and B (herein referred to as “GPCmut5”), A2 and B (herein referred to as “GPCmut6”), A1 (herein referred to as “GPCmut9”), A2 (herein referred to as “GPCmut10”) are particularly preferred.

[0242] According to further preferred embodiments, the at least one antigenic peptide or protein is derived from a prefusion-stabilized GPC with at least mutation A1: wherein A1, B, and C (herein referred to as “GPCmut1, A1 and B (herein referred to as “GPCmut5”), A1 (herein referred to as “GPCmut9”), are particularly preferred.

[0243] According to further preferred embodiments, the at least one antigenic peptide or protein is derived from a prefusion-stabilized GPC with at least mutation A2, wherein, A2, B and C (herein referred to as “GPCmut2”), A2 and B (herein referred to as “GPCmut6”), and A2 (herein referred to as “GPCmut10”) are particularly preferred.

TABLE X3
Preferred prefusion-stabilized GPC mutants

| Construct | Comprised | | Protein |
|---|---|---|---|
| name | mutations | amino acid position of mutations | SEQ ID NOs |
| GPCmut1 | A1, B, C | R207C, L258R, L259R, E329P, G360C or | 3567-3820 |
| | | R206C, L257R, L258R, E328P, G359C | |
| GPCmut2 | A2, B, C | T81C, L258R, L259R, N319C, E329P or | 22949-22980 |
| | | T80C, L257R, L258R, N318C, E328P | |
| GPCmut3 | A3, B, C | L258R, L259R, E329P, W370C, W386C or | 24645-24676 |
| | | L257R, L258R, E328P, W369C, W385C | |
| GPCmut4 | A2, A3, B, C | T81C, L258R, L259R, N319C, E329P, | 26341-26372 |
| | | W370C, W386C or T80C, L257R, L258R, | |
| | | N318C, E328P, W369C, W385C | |
| GPCmut5 | A1, B | R207C, E329P, G360C or | 28037-28068 |
| | | R206C, E328P, G359C | |
| GPCmut6 | A2, B | T81C, N319C, E329P or | 29733-29764 |
| | | T80C, N318C, E328P | |
| GPCmut7 | A3, B | E329P, W370C, W386C or | 31429-31460 |
| | | E328P, W369C, W385C | |
| GPCmut8 | A2, A3, B | T81C, N319C, E329P, W370C, W386C or | 33125-33156 |
| | | T80C, N318C, E328P, W369C, W385C | |
| GPCmut9 | A1 | R207C, G360C or | 34821-34852 |
| | | R206C, G359C | |
| GPCmut10 | A2 | T81C, N319C or | 36517-36548 |
| | | T80C, N318C | |
| GPCmut11 | A3 | W370C, W386C or | 38213-38244 |
| | | W369C, W385C | |
| GPCmut12 | A2, A3 | T81C, N319C, W370C, W386C or | 39909-39940 |
| | | T80C, N318C, W369C, W385C | |

[0244] It has to be noted that under identifier <223> of the sequence listing, respective prefusion-stabilized GPC constructs are referred to as “GPCmut1”, “GPCmut2”, “GPCmut3”, “GPCmut4”, “GPCmut5”, “GPCmut6”, “GPCmut7”, “GPCmut8”, “GPCmut9”, “GPCmut10”, “GPCmut11”, “GPCmut12”, and “GPCstabilized”.

[0245] Preferred prefusion-stabilized GPC comprise at least one of the following mutations i), ii), and iii):
[0246] i) amino acid substitutions allowing a covalent link of GP1 and GP2, preferably by introduction of two additional cysteine residues, preferably at position 207 or 206 and 360 or 359, preferably by amino acid substitutions R2070 and G3600;
[0247] ii) amino acid substitutions allowing stabilization of GP2, preferably E329P or E328P;
[0248] iii) replacing the native GP1-GP2 cleavage site with a furin cleavage site, e.g. RRLL to RRRR, preferably by amino acid substitutions L258R, L259R or L257R, L258R, wherein prefusion-stabilized GPC preferably comprises i), ii), and iii).

[0249] The introduction of two additional cysteine residues in i) is intended to covalent link of GP1 and GP2 which may lead to a stabilization of the prefusion GPC trimer. Amino acid substitution according to ii) may lead to a stabilization of GP2. Amino acid substitution according to iii) may improve the processing/maturation of GPC.

[0250] According to preferred embodiments, the RNA of the first aspect comprises
[0251] at least one coding sequence encoding at least one antigenic peptide or protein derived from LASV prefusion-stabilized GPC (“GPCmut1” or “GPCstabilized”) comprising or consisting of at least one amino acid sequences being identical or at least 70%, 80%, 85%, 86%, 87%, 88%, 89%, 90%, 91%, 92%, 93%, 94%, 95%, 96%, 97%, 98%, or 99% identical to any one of SEQ ID NO: 3567-3820 or a fragment or variant of any of these sequences;
[0252] at least one coding sequence encoding at least one antigenic peptide or protein derived from LASV prefusion-stabilized GPC (“GPCmut2”) comprising or consisting of at least one amino acid sequences being identical or at least 70%, 80%, 85%, 86%, 87%, 88%, 89%, 90%, 91%, 92%, 93%, 94%, 95%, 96%, 97%, 98%, or 99% identical to any one of SEQ ID NO: 22949-22980 or a fragment or variant of any of these sequences;
[0253] at least one coding sequence encoding at least one antigenic peptide or protein derived from LASV prefusion-stabilized GPC (“GPCmut3”) comprising or consisting of at least one amino acid sequences being identical or at least 70%, 80%, 85%, 86%, 87%, 88%, 89%, 90%, 91%, 92%, 93%, 94%, 95%, 96%, 97%, 98%, or 99% identical to any one of SEQ ID NO: 24645-24676 or a fragment or variant of any of these sequences;
[0254] at least one coding sequence encoding at least one antigenic peptide or protein derived from LASV prefusion-stabilized GPC (“GPCmut4”) comprising or consisting of at least one amino acid sequences being identical or at least 70%, 80%, 85%, 86%, 87%, 88%, 89%, 90%, 91%, 92%, 93%, 94%, 95%, 96%, 97%, 98%, or 99% identical to any one of SEQ ID NO: 26341-26372 or a fragment or variant of any of these sequences;
[0255] at least one coding sequence encoding at least one antigenic peptide or protein derived from LASV prefusion-stabilized GPC (“GPCmut5”) comprising or consisting of at least one amino acid sequences being identical or at least 70%, 80%, 85%, 86%, 87%, 88%, 89%, 90%, 91%, 92%, 93%, 94%, 95%, 96%, 97%, 98%, or 99% identical to any one of SEQ ID NO: 28037-28068 or a fragment or variant of any of these sequences;
[0256] at least one coding sequence encoding at least one antigenic peptide or protein derived from LASV prefusion-stabilized GPC (“GPCmut6”) comprising or consisting of at least one amino acid sequences being identical or at least 70%, 80%, 85%, 86%, 87%, 88%, 89%, 90%, 91%, 92%, 93%, 94%, 95%, 96%, 97%, 98%, or 99% identical to any one of SEQ ID NO: 29733-29764 or a fragment or variant of any of these sequences;
[0257] at least one coding sequence encoding at least one antigenic peptide or protein derived from LASV prefusion-stabilized GPC (“GPCmut7”) comprising or consisting of at least one amino acid sequences being identical or at least 70%, 80%, 85%, 86%, 87%, 88%, 89%, 90%, 91%, 92%, 93%, 94%, 95%, 96%, 97%, 98%, or 99% identical to any one of SEQ ID NO: 31429-31460 or a fragment or variant of any of these sequences;
[0258] at least one coding sequence encoding at least one antigenic peptide or protein derived from LASV prefusion-stabilized GPC (“GPCmut8”) comprising or consisting of at least one amino acid sequences being identical or at least 70%, 80%, 85%, 86%, 87%, 88%, 89%, 90%, 91%, 92%, 93%, 94%, 95%, 96%, 97%, 98%, or 99% identical to any one of SEQ ID NO: 33125-33156 or a fragment or variant of any of these sequences;
[0259] at least one coding sequence encoding at least one antigenic peptide or protein derived from LASV prefusion-stabilized GPC (“GPCmut9”) comprising or consisting of at least one amino acid sequences being identical or at least 70%, 80%, 85%, 86%, 87%, 88%, 89%, 90%, 91%, 92%, 93%, 94%, 95%, 96%, 97%, 98%, or 99% identical to any one of SEQ ID NO: 34821-34852 or a fragment or variant of any of these sequences;
[0260] at least one coding sequence encoding at least one antigenic peptide or protein derived from LASV prefusion-stabilized GPC (“GPCmut10”) comprising or consisting of at least one amino acid sequences being identical or at least 70%, 80%, 85%, 86%, 87%, 88%, 89%, 90%, 91%, 92%, 93%, 94%, 95%, 96%, 97%, 98%, or 99% identical to any one of SEQ ID NO: 36517-36548 or a fragment or variant of any of these sequences;
[0261] at least one coding sequence encoding at least one antigenic peptide or protein derived from LASV prefusion-stabilized GPC (“GPCmut11”) comprising or consisting of at least one amino acid sequences being identical or at least 70%, 80%, 85%, 86%, 87%, 88%, 89%, 90%, 91%, 92%, 93%, 94%, 95%, 96%, 97%, 98%, or 99% identical to any one of SEQ ID NO: 38213-38244 or a fragment or variant of any of these sequences, or
[0262] at least one coding sequence encoding at least one antigenic peptide or protein derived from LASV prefusion-stabilized GPC (“GPCmut12”) comprising or consisting of at least one amino acid sequences being identical or at least 70%, 80%, 85%, 86%, 87%, 88%, 89%, 90%, 91%, 92%, 93%, 94%, 95%, 96%, 97%, 98%, or 99% identical to any one of SEQ ID NO: 39909-39940 or a fragment or variant of any of these sequences.

[0263] Additional information regarding each of these suitable amino acid sequences encoding LASV proteins may also be derived from the sequence listing, e.g. the respective NCBI Accession No., are provided therein under identifier <223>.

[0264] In preferred embodiments, the at least one antigenic peptide or protein is derived from glycoprotein precursor (GPC) or a prefusion-stabilized GPC, or a variant, fragment, or combination thereof. In embodiments, GPC or prefusion-stabilized GPC are truncated proteins.

[0265] A “truncated GPC” ora “truncated prefusion-stablized GPC” has to be understood as an N-terminal and/or a C-terminal truncated version of a full-length GPC or prefusion-stabilized GPC protein that typically comprises 490 amino acids (amino acid 1 to amino acid 490) or 491 amino acids (amino acid 1 to amino acid 491). In the context of the invention, the N- and/or C-terminal truncation has to be selected by the skilled person in a way that no important T-cell and/or B-cell epitopes are removed. Suitably, a “truncated protein” of a GPC or of a prefusion-stabilized GPC″ is large enough to elicit an adaptive immune response in a subject (wherein, in the context of the invention, the truncated protein is provided by the RNA comprising the at least one coding sequence encoding at least one antigenic truncated protein).

[0266] In preferred embodiments, the truncated GPC or prefusion-stabilized GPC is C-terminally truncated, preferably lacking the cytoplasmic tail.

[0267] The deletion of the cytoplasmic tail may lead to an increased surface expression which thereby promotes an increased antigen presentation to B cells with improved immune responses. According to domain prediction analysis tools, the cytoplasmic domain/cytoplasmic tail of GPC is located between amino acid 453 to amino acid 491 or between amino acid 452 to amino acid 490 (the same applies to prefusion-stabilized GPCs) (see e.g. FIG. 1A ofWatanabe, Yasunori, et al. “Structure of the Lassa virus glycan shield provides a model for immunological resistance.” Proceedings of the National Academy of Sciences 115.28 (2018): 7320-7325). Accordingly, the C-terminally truncated GPC or prefusion-stabilized GPC preferably lacks the cytoplasmic tail comprising preferably amino acids 453 to 491 or 452 to 490.

[0268] In further preferred embodiments, the truncated protein is a truncated GPC, preferably lacking the cytoplasmic tail, herein referred to as “GPCmut13”.

[0269] According to preferred embodiments, the RNA of the first aspect comprises at least one coding sequence encoding at least one antigenic peptide or protein derived from LASV GPC lacking the cytoplasmic tail (“GPCmut13”) comprising or consisting of at least one amino acid sequences being identical or at least 70%, 80%, 85%, 86%, 87%, 88%, 89%, 90%, 91%, 92%, 93%, 94%, 95%, 96%, 97%, 98%, or 99% identical to any one of SEQ ID NO: 41605-41636 or a fragment or variant of any of these sequences.

[0270] According to embodiments, the at least one antigenic peptide or protein is derived from a prefusion-stabilized GPC, wherein the stabilized GPC comprises at least one of the mutations A1, A2, A3, B, and C and is a truncated prefusion-stabilized GPC lacking the cytoplasmic tail.

[0271] According to embodiments, the at least one antigenic peptide or protein is derived from a truncated prefusion-stabilized GPC lacking the cytoplasmic tail, wherein the truncated stabilized GPC comprises the following mutations: Al, B, and C (herein referred to as “GPCmut14”), A2, B and C (herein referred to as “GPCmut15”), A3, B and C (herein referred to as “GPCmut16”), A2, A3, B and C (herein referred to as “GPCmut17”), A2 and B (herein referred to as “GPCmut18”), A2 and B (herein referred to as “GPCmut19”), A3 and B (herein referred to as “GPCmut20”), A2, A3 and B (herein referred to as “GPCmut21”), A1 (herein referred to as “GPCmut22”),

[0272] A2 (herein referred to as “GPCmut23”), A3 (herein referred to as “GPCmut24”), or A2 and A3 (herein referred to as “GPCmut25”).

[0273] In various embodiments, the amino acid sequences of the at least one antigenic peptide or protein derived from LASV, in particular from LASV GPC or prefusion-GPC, is mutated/substituted to delete at least one predicted or potential glycosylation site.

[0274] It may suitable in the context of the invention that glycosylation sites in the encoded amino acid sequence are mutated/substituted which means that encoded amino acids which may be glycosylated, e.g. after translation of the coding RNA upon in vivo administration, are exchanged to a different amino acid. Accordingly, on nucleic acid level, codons encoding e.g. asparagine which are predicted to be glycosylated (N glycosylation sites) are substituted with codons encoding glutamine.

[0275] In embodiments, the coding region encoding at least one GPC or prefusion-stabilized GPC, or a fragment, variant or derivative thereof, is mutated in a way to delete at least one predicted or potential glycosylation site. Glycosylation is an important post-translational or co-translational modification of proteins. The majority of proteins synthesized in the rough endoplasmatic reticulum (ER) undergoes glycosylation. There are mainly two types of glycosylation: a) In N-glycosylation, the addition of sugar chains takes place at the amide nitrogen on the side-chain of the asparagine or arginine. b) In O-glycosylation, the addition of sugar chains takes place on the hydroxyl oxygen on the side-chain of hydroxylysine, hydroxyproline, serine, tyrosine or threonine.

[0276] Moreover, phospho-glycans linked through the phosphate of a phospho-serine and C-linked glycans, a rare form of glycosylation where a sugar is added to a carbon on a tryptophan side-chain, are known. The often inadequate antibody immune response elicited by natural LASV infection has been, in part, attributed to the abundance of N-linked glycosylation on the GPC presented on the virions with the glycans most likely impairing antibody access to neutralizing epitopes.

[0277] Therefore, it is particularly advantageous to delete the potential glycosylation sites of the encoded LASV protein, in particular GPC or prefusion-stabilized GPC. By mutation/substitution of the relevant amino acids, the glycosylation may be prevented. In this context at least one codon coding for an asparagine, arginine, serine, threonine, tyrosine, lysine, proline or tryptophan is modified in such a way that a different amino acid is encoded thereby deleting at least one predicted or potential glycosylation site. The predicted glycosylation sites may be predicted by using artificial neural networks that examine the sequence for common glycosylation sites, e.g. N-glycosylation sites may be predicted by using the NetNGlyc 1.0 Server.

[0278] In preferred embodiments, the at least one antigenic protein from LASV, preferably of GPC or prefusion- stabilized GPC, is mutated to delete at least one predicted or potential glycosylation site, e.g. asparagine (N) is substituted by a glutamine (Q). Accordingly, on nucleic acid level, the nucleic acid sequence is modified to encode for Q instead of N at predicted N-glycosylation sites, for example at predicted N-glycosylation sites of the encoded GPC or prefusion-stabilized GPC protein, or a fragment, variant or derivative thereof. In this context the term “mutated GPC” or “mutated prefusion-GPC” means that at least one (predicted) glycosylation site is mutated.

[0279] In particularly preferred embodiments, the at least one GPC or prefusion-stabilized GPC is mutated to substitute at least one asparagine (N) by a glutamine (Q) in GP1 of GPC or prefusion-stabilized GPC, preferably at amino acid positions 99 (or 98) or 119 (or 118).

[0280] In various embodiments, the amino acid sequences of the at least one antigenic peptide or protein from LASV, in particular LASV GPC or prefusion-stabilized GPC, is mutated to delete all predicted or potential glycosylation sites.

[0281] Accordingly, it may be particularly preferred that all predicted glycosylation sites of the amino acid sequences of the at least one antigenic peptide or protein, in particular LASV GPC or prefusion-stabilized GPC are mutated to completely prevent glycosylation of the resulting protein or peptide. This aspect of the invention may apply for e.g. all N-glycosylation sites or for all 0-glycosylation sites or for all glycosylation sites irrespective of their biochemical nature.

[0282] According to preferred embodiments, the RNA comprises at least one coding sequence encoding at least one antigenic peptide or protein derived from a LASV protein as specified herein, or fragments and variants thereof. In that context, any coding sequence encoding at least one antigenic peptide or protein derived from LASV protein or fragments and variants thereof may be understood as suitable coding sequence and may therefore be comprised in the RNA of the first aspect.

[0283] In preferred embodiments, the RNA of the first aspect may comprise or consist of at least one coding sequence encoding at least one antigenic peptide or protein derived from a LASV protein as defined herein, preferably GPC, prefusion-stabilized GPC, NP, or Z, preferably encoding any one of SEQ ID NO: 1-254, 3567-3820, 7547-7797, 11166-11347, 17968-18001, 19328-19361, 20689-20722, 22949-22980, 24645-24676, 26341-26372, 28037-28068, 29733-29764, 31429-31460, 33125-33156, 34821-34852, 36517-36548, 38213-38244, 41605-41636 or fragments of variants thereof. It has to be understood that, on nucleic acid level, any nucleic acid sequence, in particular, any RNA sequence which encodes an amino acid sequences being identical to SEQ ID NO: 1-254, 3567-3820, 7547-7797, 11166-11347, 17968-18001, 19328-19361, 20689-20722, 22949-22980, 24645-24676, 26341-26372, 28037-28068, 29733-29764, 31429-31460, 33125-33156, 34821-34852, 36517-36548, 38213-38244, 41605-41636 or fragments or variants thereof, or any nucleic acid sequence (e.g. DNA sequence, RNA sequence) which encodes amino acid sequences being at least 70%, 80%, 85%, 86%, 87%, 88%, 89%, 90%, 91%, 92%, 93%, 94%, 95%, 96%, 97%, 98%, or 99% identical to any one of SEQ ID NO: 1-254, 3567-3820, 7547-7797, 11166-11347, 17968-18001, 19328-19361, 20689-20722, 22949-22980, 24645-24676, 26341-26372, 28037-28068, 29733-29764, 31429-31460, 33125-33156, 34821-34852, 36517-36548, 38213-38244, 41605-41636 or fragments or variants thereof, may be selected and may accordingly be understood as suitable coding sequence and may therefore be comprised in the RNA of the first aspect.

[0284] In particularly preferred embodiments, the RNA of the first aspect comprises at least one coding sequence, wherein, suitably,
[0285] said the at least one coding sequence comprises or consists of at least one of the nucleic acid sequences being identical or at least 70%, 80%, 85%, 86%, 87%, 88%, 89%, 90%, 91%, 92%, 93%, 94%, 95%, 96%, 97%, 98%, or 99% identical to SEQ ID NOs: 255-2286 (encoding GPC) or a fragment or a fragment or variant of any of these sequences;
[0286] said the at least one coding sequence comprises or consists of at least one of the nucleic acid sequences being identical or at least 70%, 80%, 85%, 86%, 87%, 88%, 89%, 90%, 91%, 92%, 93%, 94%, 95%, 96%, 97%, 98%, or 99% identical to SEQ ID NOs: 3821-6106 (encoding GPCmut1) or a fragment or a fragment or variant of any of these sequences;
[0287] said the at least one coding sequence comprises or consists of at least one of the nucleic acid sequences being identical or at least 70%, 80%, 85%, 86%, 87%, 88%, 89%, 90%, 91%, 92%, 93%, 94%, 95%, 96%, 97%, 98%, or 99% identical to SEQ ID NOs: 22981-23108 (encoding GPCmut2) or a fragment or a fragment or variant of any of these sequences;
[0288] said the at least one coding sequence comprises or consists of at least one of the nucleic acid sequences being identical or at least 70%, 80%, 85%, 86%, 87%, 88%, 89%, 90%, 91%, 92%, 93%, 94%, 95%, 96%, 97%, 98%, or 99% identical to SEQ ID NOs: 24677-24804 (encoding GPCmut3) or a fragment or a fragment or variant of any of these sequences;
[0289] said the at least one coding sequence comprises or consists of at least one of the nucleic acid sequences being identical or at least 70%, 80%, 85%, 86%, 87%, 88%, 89%, 90%, 91%, 92%, 93%, 94%, 95%, 96%, 97%, 98%, or 99% identical to SEQ ID NOs: 26373-26500 (encoding GPCmut4) or a fragment or a fragment or variant of any of these sequences;
[0290] said the at least one coding sequence comprises or consists of at least one of the nucleic acid sequences being identical or at least 70%, 80%, 85%, 86%, 87%, 88%, 89%, 90%, 91%, 92%, 93%, 94%, 95%, 96%, 97%, 98%, or 99% identical to SEQ ID NOs: 28069-28196 (encoding GPCmut5) or a fragment or a fragment or variant of any of these sequences;
[0291] said the at least one coding sequence comprises or consists of at least one of the nucleic acid sequences being identical or at least 70%, 80%, 85%, 86%, 87%, 88%, 89%, 90%, 91%, 92%, 93%, 94%, 95%, 96%, 97%, 98%, or 99% identical to SEQ ID NOs: 29765-29892 (encoding GPCmut6) or a fragment or a fragment or variant of any of these sequences;
[0292] said the at least one coding sequence comprises or consists of at least one of the nucleic acid sequences being identical or at least 70%, 80%, 85%, 86%, 87%, 88%, 89%, 90%, 91%, 92%, 93%, 94%, 95%, 96%, 97%, 98%, or 99% identical to SEQ ID NOs: 31461-31588 (encoding GPCmut7) or a fragment or a fragment or variant of any of these sequences;
[0293] said the at least one coding sequence comprises or consists of at least one of the nucleic acid sequences being identical or at least 70%, 80%, 85%, 86%, 87%, 88%, 89%, 90%, 91%, 92%, 93%, 94%, 95%, 96%, 97%, 98%, or 99% identical to SEQ ID NOs: 33157-33284 (encoding GPCmut8) or a fragment or a fragment or variant of any of these sequences;
[0294] said the at least one coding sequence comprises or consists of at least one of the nucleic acid sequences being identical or at least 70%, 80%, 85%, 86%, 87%, 88%, 89%, 90%, 91%, 92%, 93%, 94%, 95%, 96%, 97%, 98%, or 99% identical to SEQ ID NOs: 34853-34980 (encoding GPCmut9) or a fragment or a fragment or variant of any of these sequences;
[0295] said the at least one coding sequence comprises or consists of at least one of the nucleic acid sequences being identical or at least 70%, 80%, 85%, 86%, 87%, 88%, 89%, 90%, 91%, 92%, 93%, 94%, 95%, 96%, 97%, 98%, or 99% identical to SEQ ID NOs: 36549-36676 (encoding GPCmut10) or a fragment or a fragment or variant of any of these sequences;
[0296] said the at least one coding sequence comprises or consists of at least one of the nucleic acid sequences being identical or at least 70%, 80%, 85%, 86%, 87%, 88%, 89%, 90%, 91%, 92%, 93%, 94%, 95%, 96%, 97%, 98%, or 99% identical to SEQ ID NOs: 38245-38372 (encoding GPCmut11) or a fragment or a fragment or variant of any of these sequences;
[0297] said the at least one coding sequence comprises or consists of at least one of the nucleic acid sequences being identical or at least 70%, 80%, 85%, 86%, 87%, 88%, 89%, 90%, 91%, 92%, 93%, 94%, 95%, 96%, 97%, 98%, or 99% identical to SEQ ID NOs: 39941-40068 (encoding GPCmut12) or a fragment or a fragment or variant of any of these sequences;
[0298] said the at least one coding sequence comprises or consists of at least one of the nucleic acid sequences being identical or at least 70%, 80%, 85%, 86%, 87%, 88%, 89%, 90%, 91%, 92%, 93%, 94%, 95%, 96%, 97%, 98%, or 99% identical to SEQ ID NOs: 41637-41764 (encoding GPCmut13) or a fragment or a fragment or variant of any of these sequences;
[0299] said the at least one coding sequence comprises or consists of at least one of the nucleic acid sequences being identical or at least 70%, 80%, 85%, 86%, 87%, 88%, 89%, 90%, 91%, 92%, 93%, 94%, 95%, 96%, 97%, 98%, or 99% identical to SEQ ID NOs: 7798-9805 (encoding NP) or a fragment or a fragment or variant of any of these sequences;
[0300] said the at least one coding sequence comprises or consists of at least one of the nucleic acid sequences being identical or at least 70%, 80%, 85%, 86%, 87%, 88%, 89%, 90%, 91%, 92%, 93%, 94%, 95%, 96%, 97%, 98%, or 99% identical to SEQ ID NOs: 18002-18103 (encoding SP-HsPLAT_NP) or a fragment or a fragment or variant of any of these sequences;
[0301] said the at least one coding sequence comprises or consists of at least one of the nucleic acid sequences being identical or at least 70%, 80%, 85%, 86%, 87%, 88%, 89%, 90%, 91%, 92%, 93%, 94%, 95%, 96%, 97%, 98%, or 99% identical to SEQ ID NOs: 19362-19463 (encoding SP-HsALB_NP) or a fragment or a fragment or variant of any of these sequences;
[0302] said the at least one coding sequence comprises or consists of at least one of the nucleic acid sequences being identical or at least 70%, 80%, 85%, 86%, 87%, 88%, 89%, 90%, 91%, 92%, 93%, 94%, 95%, 96%, 97%, 98%, or 99% identical to SEQ ID NOs: 20723-20824 (encoding SP-IgE_NP) or a fragment or a fragment or variant of any of these sequences;
[0303] said the at least one coding sequence comprises or consists of at least one of the nucleic acid sequences being identical or at least 70%, 80%, 85%, 86%, 87%, 88%, 89%, 90%, 91%, 92%, 93%, 94%, 95%, 96%, 97%, 98%, or 99% identical to SEQ ID NOs: 11348-12803 (encoding Z) or a fragment or a fragment or variant of any of these sequences.

[0304] Additional information regarding each of said suitable nucleic acid sequences may also be derived from the sequence listing, in particular from the details provided therein under identifier <223>.

[0305] According to preferred embodiments, the RNA is a modified and/or stabilized RNA.

[0306] According to preferred embodiments, the RNA of the present invention may thus be provided as a “stabilized RNA” that is to say an RNA showing improved resistance to in vivo degradation and/or an RNA showing improved stability in vivo, and/or an RNA showing improved translatability in vivo. In the following, specific suitable modifications suitably to “stabilize” the RNA are described. Such stabilization may also be effected by providing a “dried RNA” and/or a “purified RNA” as specified herein.

[0307] In the following, suitable modifications are described that are capable of “stabilizing” the RNA of the invention.

[0308] In embodiments, the RNA is a modified RNA, wherein the modification refers to chemical modifications comprising backbone modifications and/or sugar modifications and/or base modifications.

[0309] A backbone modification may be a modification in which phosphates of the backbone of the nucleotides contained in a nucleic acid, e.g. the RNA, are chemically modified. A sugar modification may be a chemical modification of the sugar of the nucleotides of the RNA as defined herein. Furthermore, a base modification may be a chemical modification of the base moiety of the nucleotides of the RNA. In this context, nucleotide analogues or modifications are preferably selected from nucleotide analogues which are applicable for RNA in vitro transcription and/or in vivo translation.

[0310] In particularly preferred embodiments of the present invention, the nucleotide analogues/modifications which may be incorporated into a modified nucleic acid or particularly into a modified RNA as described herein are preferably selected from 2-amino-6-chloropurineriboside-5′-triphosphate, 2-Aminopurine-riboside-5′-triphosphate; 2-aminoadenosine-5′-triphosphate, 2′-Amino-2′-deoxycytidine-triphosphate, 2-thiocytidine-5′-triphosphate, 2-thiouridine-5′-triphosphate, 2′-Fluorothymidine-5′-triphosphate, 2′-O-Methyl-inosine-5′-triphosphate 4-thiouridine-5′-triphosphate, 5-aminoallylcytidine-5′-triphosphate, 5-aminoallyluridine-5′-triphosphate, 5-bromocytidine-5′-triphosphate, 5-bromouridine-5′-triphosphate, 5-Bromo-2′-deoxycytidine-5′-triphosphate, 5-Bromo-2′-deoxyuridine-5′-triphosphate, 5-iodocytidine-5′-triphosphate, 5-lodo-2′-deoxycytidine-5′-triphosphate, 5-iodouridine-5′-triphosphate, 5-lodo-2′-deoxyuridine-5′-triphosphate, 5-methylcytidine-5′-triphosphate, 5-methyluridine-5′-triphosphate, 5-Propynyl-2′-deoxycytidine-5′-triphosphate, 5-Propynyl-2′-deoxyuridine-5′-triphosphate, 6-azacytidine-5′-triphosphate, 6-azauridine-5′-triphosphate, 6-chloropurineriboside-5′-triphosphate, 7-deazaadenosine-5′-triphosphate, 7-deazaguanosine-5′-triphosphate, 8-azaadenosine-5′-triphosphate, 8-azidoadenosine-5′-triphosphate, benzimidazole-riboside-5′-triphosphate, N1-methyladenosine-5′-triphosphate, N1-methylguanosine-5′-triphosphate, N6-methyladenosine-5′-triphosphate, O6-methylguanosine-5′-triphosphate, pseudouridine-5′-triphosphate, or puromycin-5′-triphosphate, xanthosine-5′-triphosphate. Particular preference is given to nucleotides for base modifications selected from the group of base-modified nucleotides consisting of 5-methylcytidine-5′-triphosphate, 7-deazaguanosine-5′-triphosphate, 5-bromocytidine-5′-triphosphate, and pseudouridine-5′-triphosphate, pyridin-4-one ribonucleoside, 5-aza-uridine, 2-thio-5-aza-uridine, 2-thiouridine, 4-thio-pseudouridine, 2-thio-pseudouridine, 5-hydroxyuridine, 3-methyluridine, 5-carboxymethyl-uridine, 1-carboxymethyl-pseudouridine, 5-propynyl-uridine, 1-propynyl-pseudouridine, 5-taurinomethyluridine, 1-taurinomethyl-pseudouridine, 5-taurinomethyl-2-thio-uridine, 1-taurinomethyl-4-thio-uridine, 5-methyl-uridine, 1-methyl-pseudouridine, 4-thio-1-methyl-pseudouridine, 2-thio-1-methyl-pseudouridine, 1-methyl-1-deaza-pseudouridine, 2-thio-1-methyl-1-deaza-pseudouridine, dihydrouridine, dihydropseudouridine, 2-thio-dihydrouridine, 2-thio-dihydropseudouridine, 2-methoxyuridine, 2-methoxy-4-thio-uridine, 4-methoxy-pseudouridine, and 4-methoxy-2-thio-pseudouridine, 5-aza-cytidine, pseudoisocytidine, 3-methyl-cytidine, N4-acetylcytidine, 5-formylcytidine, N4-methylcytidine, 5-hydroxymethylcytidine, 1-methyl-pseudoisocytidine, pyrrolo-cytidine, pyrrolo-pseudoisocytidine, 2-thio-cytidine, 2-thio-5-methyl-cytidine, 4-thio-pseudoisocytidine, 4-thio-1-methyl-pseudoisocytidine, 4-thio-1-methyl-1-deaza-pseudoisocytidine, 1-methyl-1-deaza-pseudoisocytidine, zebularine, 5-aza-zebularine, 5-methyl-zebularine, 5-aza-2-thio-zebularine, 2-thio-zebularine, 2-methoxy-cytidine, 2-methoxy-5-methyl-cytidine, 4-methoxy-pseudoisocytidine, and 4-methoxy-1-methyl-pseudoisocytidine, 2-aminopurine, 2, 6-diaminopurine, 7-deaza-adenine, 7-deaza-8-aza-adenine, 7-deaza-2-aminopurine, 7-deaza-8-aza-2-aminopurine, 7-deaza-2,6-diaminopurine, 7-deaza-8-aza-2,6-diaminopurine, 1-methyladenosine, N6-methyladenosine, N6-isopentenyladenosine, N6-(cis-hydroxyisopentenyl)adenosine, 2-methylthio-N6-(cis-hydroxyisopentenyl) adenosine, N6-glycinylcarbamoyladenosine, N6-threonylcarbamoyladenosine, 2-methylthio-N6-threonyl carbamoyladenosine, N6,N6-dimethyladenosine, 7-methyladenine, 2-methylthio-adenine, and 2-methoxy-adenine, inosine, 1-methyl-inosine, wyosine, wybutosine, 7-deaza-guanosine, 7-deaza-8-aza-guanosine, 6-thio-guanosine, 6-thio-7-deaza-guanosine, 6-thio-7-deaza-8-aza-guanosine, 7-methyl-guanosine, 6-thio-7-methyl-guanosine, 7-methylinosine, 6-methoxy-guanosine, 1-methylguanosine, N2-methylguanosine, N2,N2-dimethylguanosine, 8-oxo-guanosine, 7-methyl-8-oxo-guanosine, 1-methyl-6-thio-guanosine, N2-methyl-6-thio-guanosine, and N2,N2-dimethyl-6-thio-guanosine, 5′-O-(1-thiophosphate)-adenosine, 5′-O-(1-thiophosphate)-cytidine, 5′-O-(1-thiophosphate)-guanosine, 5′-O-(1-thiophosphate)-uridine, 5′-O-(1-thiophosphate)-pseudouridine, 6-aza-cytidine, 2-thio-cytidine, alpha-thio-cytidine, Pseudo-iso-cytidine, 5-aminoallyl-uridine, 5-iodo-uridine, N1-methyl-pseudouridine, 5,6-dihydrouridine, alpha-thio-uridine, 4-thio-uridine, 6-aza-uridine, 5-hydroxy-uridine, deoxy-thymidine, 5-methyl-uridine, Pyrrolo-cytidine, inosine, alpha-thio-guanosine, 6-methyl-guanosine, 5-methyl-cytdine, 8-oxo-guanosine, 7-deaza-guanosine, N1-methyl-adenosine, 2-amino-6-Chloro-purine, N6-methyl-2-amino-purine, Pseudo-iso-cytidine, 6-Chloro-purine, N6-methyl-adenosine, alpha-thio-adenosine, 8-azido-adenosine, 7-deaza-adenosine.

[0311] Particularly preferred are pseudouridine (ψ), N1-methylpseudouridine (m1ψ), 5-methylcytosine, and 5-methoxyuridine. Accordingly, the RNA of the first aspect may comprise at least one modified nucleotide selected from pseudouridine (ψ), N1-methylpseudouridine (m1ψ), 5-methylcytosine, and 5-methoxyuridine, wherein pseudouridine (ψ), and N1-methylpseudouridine (m1ψ) are particularly preferred.

[0312] In preferred embodiments, the RNA of the invention comprises at least one coding sequence, wherein the at least one coding sequence is a codon modified coding sequence.

[0313] In preferred embodiments, the at least one coding sequence of the RNA of the first aspect is a codon modified coding sequence, wherein the amino acid sequence encoded by the at least one codon modified coding sequence is preferably not being modified compared to the amino acid sequence encoded by the corresponding wild type coding sequence.

[0314] The term “codon modified coding sequence” relates to coding sequences that differ in at least one codon (triplets of nucleotides coding for one amino acid) compared to the corresponding wild type coding sequence. Suitably, a codon modified coding sequence in the context of the invention may show improved resistance to in vivo degradation and/or improved stability in vivo and/or improved translatability in vivo. Codon modifications in the broadest sense make use of the degeneracy of the genetic code wherein multiple codons may encode the same amino acid and may be used interchangeably (cf. Table 1) to optimize/modify the coding sequence of the RNA for in vivo applications.

[0315] In particularly preferred embodiments of the first aspect, the at least one sequence is a codon modified coding sequence, wherein the codon modified coding sequence is selected from C maximized coding sequence, CAI maximized coding sequence, human codon usage adapted coding sequence, G/C content modified coding sequence, and G/C optimized coding sequence, or any combination thereof.

[0316] According to preferred embodiments, the RNA may be modified, wherein the C content of the at least one coding sequence may be increased, preferably maximized, compared to the C content of the corresponding wild type coding sequence (herein referred to as “C maximized coding sequence”). The amino acid sequence encoded by the C maximized coding sequence of the RNA is preferably not modified as compared to the amino acid sequence encoded by the respective wild type nucleic acid coding sequence. The generation of a C maximized nucleic acid sequences may suitably be carried out using a method according to WO2015/062738. In this context, the disclosure of WO2015/062738 is included herewith by reference. Throughout the disclosure of the invention, including the <223> identifier of the sequence listing, C maximized coding sequences are indicated by the abbreviation “opt2”.

[0317] According to preferred embodiments, the RNA may be modified, wherein the G/C content of the at least one coding sequence may be modified or optimized compared to the G/C content of the corresponding wild type coding sequence (herein referred to as “G/C content modified coding sequence”). The terms “G/C optimization” or “G/C content modification” relate to a nucleic acid that comprises a modified, preferably an increased number of guanosine and/or cytosine nucleotides as compared to the corresponding wild type nucleic acid sequence. In particular, in case of RNA, sequences having an increased G (guanosine)/C (cytosine) content are more stable than sequences having an increased A (adenosine)/U (uracil) content. “Optimized” in that context refers to a coding sequence wherein the G/C content is preferably increased to the essentially highest possible G/C content. The amino acid sequence encoded by the G/C content modified/optimized coding sequence of the nucleic acid sequence is preferably not modified as compared to the amino acid sequence encoded by the respective wild type nucleic acid coding sequence. In that context, the G/C content of the coding sequence of the RNA sequence of the present invention is increased by at least 10%, 20%, 30%, or 40% compared to the G/C content of the coding sequence of the corresponding wild type nucleic acid sequence (e.g. RNA sequence). The generation of a G/C content optimized nucleic RNA sequence may suitably be carried out using a G/C content optimization method according to WO2002/098443. In this context, the disclosure of WO2002/098443 is included in its full scope in the present invention. Throughout the disclosure of the invention, including the <223> identifier of the sequence listing, G/C optimized and G/C content modified coding sequences are indicated by the abbreviation “opt1, opt5, opt6, opt11”.

[0318] According to embodiments, the RNA may be modified, wherein codons in the at least one coding sequence may be adapted to human codon usage (herein referred to as “human codon usage adapted coding sequence”). Codons encoding the same amino acid occur at different frequencies in humans. Accordingly, the coding sequence of the RNA is preferably modified such that the frequency of the codons encoding the same amino acid corresponds to the naturally occurring frequency of that codon according to the human codon usage. E.g., in the case of the amino acid Ala, the wild type coding sequence is preferably adapted in a way that the codon “GCC” is used with a frequency of 0.40, the codon “GCT” is used with a frequency of 0.28, the codon “GCA” is used with a frequency of 0.22 and the codon “GCG” is used with a frequency of 0.10 etc. (see Table 1). Accordingly, such a procedure (as exemplified for Ala) is applied for each amino acid encoded by the coding sequence of the RNA to obtain sequences adapted to human codon usage. Throughout the disclosure of the invention, including the <223> identifier of the sequence listing, human codon usage adapted coding sequences are indicated by the abbreviation “opt3”.

TABLE 1
Human codon usage table with frequencies
indicated for each amino acid

| Amino acid | codon | frequency | Amino acid | codon | frequency |
|---|---|---|---|---|---|
| Ala | GCG | 0.10 | Pro | CCG | 0.11 |
| Ala | GCA | 0.22 | Pro | CCA | 0.27 |
| Ala | GCT | 0.28 | Pro | CCT | 0.29 |
| Ala | GCC* | 0.40 | Pro | CCC* | 0.33 |
| Cys | TGT | 0.42 | Gln | CAG* | 0.73 |
| Cys | TGC* | 0.58 | Gln | CAA | 0.27 |
| Asp | GAT | 0.44 | Arg | AGG | 0.22 |
| Asp | GAC* | 0.56 | Arg | AGA* | 0.21 |
| Glu | GAG* | 0.59 | Arg | CGG | 0.19 |
| Glu | GAA | 0.41 | Arg | CGA | 0.10 |
| Phe | TTT | 0.43 | Arg | CGT | 0.09 |
| Phe | TTC* | 0.57 | Arg | CGC | 0.19 |
| Gly | GGG | 0.23 | Ser | AGT | 0.14 |
| Gly | GGA | 0.26 | Ser | AGC* | 0.25 |
| Gly | GGT | 0.18 | Ser | TCG | 0.06 |
| Gly | GGC* | 0.33 | Ser | TCA | 0.15 |
| His | CAT | 0.41 | Ser | TCT | 0.18 |
| His | CAC* | 0.59 | Ser | TCC | 0.23 |
| Ile | ATA | 0.14 | Thr | ACG | 0.12 |
| Ile | ATT | 0.35 | Thr | ACA | 0.27 |
| Ile | ATC* | 0.52 | Thr | ACT | 0.23 |
| Lys | AAG* | 0.60 | Thr | ACC* | 0.38 |
| Lys | AAA | 0.40 | Val | GTG* | 0.48 |
| Leu | TTG | 0.12 | Val | GTA | 0.10 |
| Leu | TTA | 0.06 | Val | GTT | 0.17 |
| Leu | CTG* | 0.43 | Val | GTC | 0.25 |
| Leu | CTA | 0.07 | Trp | TGG* | 1 |
| Leu | CTT | 0.12 | Tyr | TAT | 0.42 |
| Leu | CTC | 0.20 | Tyr | TAC* | 0.58 |
| Met | ATG* | 1 | Stop | TGA* | 0.61 |
| Asn | AAT | 0.44 | Stop | TAG | 0.17 |
| Asn | AAC* | 0.56 | Stop | TAA | 0.22 |

*most frequent human codon

[0319] According to embodiments, the RNA of the present invention may be modified, wherein the codon adaptation index (CAI) may be increased or preferably maximised in the at least one coding sequence (herein referred to as “CAI maximized coding sequence”). Accordingly, it is preferred that most codons of the wild type nucleic acid sequence that are relatively rare in e.g. a human cell are exchanged for a respective codon that is frequent in the e.g. a human cell, wherein the frequent codon encodes the same amino acid as the relatively rare codon. Suitably, the most frequent codons are used for each encoded amino acid (see Table 1, most frequent human codons are marked with asterisks (*)). Suitably, the RNA comprises at least one coding sequence, wherein the codon adaptation index (CAI) of the at least one coding sequence is at least 0.5, 0.8, 0.9 or 0.95. Most preferably, the codon adaptation index (CAI) of the at least one coding sequence is 1. E.g., in the case of the amino acid Ala, the wild type coding sequence is adapted in a way that the most frequent human codon “GCC” is always used for said amino acid. Accordingly, such a procedure (as exemplified for Ala) is applied for each amino acid encoded by the coding sequence of the RNA to obtain CAI maximized coding sequences. Throughout the disclosure of the invention, including the <223> identifier of the sequence listing, CAI maximized coding sequences are indicated by the abbreviation “opt4”.

[0320] Accordingly, in a particularly preferred embodiment, the RNA of the first aspect comprises at least one coding sequence comprising a codon modified nucleic acid sequence which is identical or at least 70%, 80%, 85%, 86%, 87%, 88%, 89%, 90%, 91%, 92%, 93%, 94%, 95%, 96%, 97%, 98%, or 99% identical to any one SEQ ID NOs: 509-2286 (encoding GPC) or a fragment or variant of any of these sequences, or at least one coding sequence comprises a codon modified coding sequence comprising a nucleic acid sequence being identical or at least 70%, 80%, 85%, 86%, 87%, 88%, 89%, 90%, 91%, 92%, 93%, 94%, 95%, 96%, 97%, 98%, or 99% identical to any one SEQ ID NOs: 4075-6106 (encoding GPCmut1) or a fragment or variant of any of these sequences, or
[0321] at least one coding sequence comprises a codon modified coding sequence comprising a nucleic acid sequence being identical or at least 70%, 80%, 85%, 86%, 87%, 88%, 89%, 90%, 91%, 92%, 93%, 94%, 95%, 96%, 97%, 98%, or 99% identical to any one SEQ ID NOs: 22981-23108 (encoding GPCmut2) or a fragment or variant of any of these sequences, or
[0322] at least one coding sequence comprises a codon modified coding sequence comprising a nucleic acid sequence being identical or at least 70%, 80%, 85%, 86%, 87%, 88%, 89%, 90%, 91%, 92%, 93%, 94%, 95%, 96%, 97%, 98%, or 99% identical to any one SEQ ID NOs: 24677-24804 (encoding GPCmut3) or a fragment or variant of any of these sequences, or
[0323] at least one coding sequence comprises a codon modified coding sequence comprising a nucleic acid sequence being identical or at least 70%, 80%, 85%, 86%, 87%, 88%, 89%, 90%, 91%, 92%, 93%, 94%, 95%, 96%, 97%, 98%, or 99% identical to any one SEQ ID NOs: 26373-26500 (encoding GPCmut4) or a fragment or variant of any of these sequences, or
[0324] at least one coding sequence comprises a codon modified coding sequence comprising a nucleic acid sequence being identical or at least 70%, 80%, 85%, 86%, 87%, 88%, 89%, 90%, 91%, 92%, 93%, 94%, 95%, 96%, 97%, 98%, or 99% identical to any one SEQ ID NOs: 28069-28196 (encoding GPCmut5) or a fragment or variant of any of these sequences, or
[0325] at least one coding sequence comprises a codon modified coding sequence comprising a nucleic acid sequence being identical or at least 70%, 80%, 85%, 86%, 87%, 88%, 89%, 90%, 91%, 92%, 93%, 94%, 95%, 96%, 97%, 98%, or 99% identical to any one SEQ ID NOs: 29765-29892 (encoding GPCmut6) or a fragment or variant of any of these sequences, or
[0326] at least one coding sequence comprises a codon modified coding sequence comprising a nucleic acid sequence being identical or at least 70%, 80%, 85%, 86%, 87%, 88%, 89%, 90%, 91%, 92%, 93%, 94%, 95%, 96%, 97%, 98%, or 99% identical to any one SEQ ID NOs: 31 461-31 588 (encoding GPCmut7) or a fragment or variant of any of these sequences, or
[0327] at least one coding sequence comprises a codon modified coding sequence comprising a nucleic acid sequence being identical or at least 70%, 80%, 85%, 86%, 87%, 88%, 89%, 90%, 91%, 92%, 93%, 94%, 95%, 96%, 97%, 98%, or 99% identical to any one SEQ ID NOs: 33157-33284 (encoding GPCmut8) or a fragment or variant of any of these sequences, or
[0328] at least one coding sequence comprises a codon modified coding sequence comprising a nucleic acid sequence being identical or at least 70%, 80%, 85%, 86%, 87%, 88%, 89%, 90%, 91%, 92%, 93%, 94%, 95%, 96%, 97%, 98%, or 99% identical to any one SEQ ID NOs: 34853-34980 (encoding GPCmut9) or a fragment or variant of any of these sequences, or
[0329] at least one coding sequence comprises a codon modified coding sequence comprising a nucleic acid sequence being identical or at least 70%, 80%, 85%, 86%, 87%, 88%, 89%, 90%, 91%, 92%, 93%, 94%, 95%, 96%, 97%, 98%, or 99% identical to any one SEQ ID NOs: 36549-36676 (encoding GPCmut10) or a fragment or variant of any of these sequences, or
[0330] at least one coding sequence comprises a codon modified coding sequence comprising a nucleic acid sequence being identical or at least 70%, 80%, 85%, 86%, 87%, 88%, 89%, 90%, 91%, 92%, 93%, 94%, 95%, 96%, 97%, 98%, or 99% identical to any one SEQ ID NOs: 38245-38372 (encoding GPCmut11) or a fragment or variant of any of these sequences, or
[0331] at least one coding sequence comprises a codon modified coding sequence comprising a nucleic acid sequence being identical or at least 70%, 80%, 85%, 86%, 87%, 88%, 89%, 90%, 91%, 92%, 93%, 94%, 95%, 96%, 97%, 98%, or 99% identical to any one SEQ ID NOs: 39941-40068 (encoding GPCmut12) or a fragment or variant of any of these sequences, or
[0332] at least one coding sequence comprises a codon modified coding sequence comprising a nucleic acid sequence being identical or at least 70%, 80%, 85%, 86%, 87%, 88%, 89%, 90%, 91%, 92%, 93%, 94%, 95%, 96%, 97%, 98%, or 99% identical to any one SEQ ID NOs: 41637-41764 (encoding GPCmut13) or a fragment or variant of any of these sequences, or
[0333] at least one coding sequence comprises a codon modified coding sequence comprising a nucleic acid sequence being identical or at least 70%, 80%, 85%, 86%, 87%, 88%, 89%, 90%, 91%, 92%, 93%, 94%, 95%, 96%, 97%, 98%, or 99% identical to any one SEQ ID NOs: 8049-9805 (encoding NP) or a fragment or variant of any of these sequences, or
[0334] at least one coding sequence comprises a codon modified coding sequence comprising a nucleic acid sequence being identical or at least 70%, 80%, 85%, 86%, 87%, 88%, 89%, 90%, 91%, 92%, 93%, 94%, 95%, 96%, 97%, 98%, or 99% identical to any one SEQ ID NOs: 18002-18103, 19362-19463, or 20723-20824 (encoding SP-NP) or a fragment or variant of any of these sequences, or
[0335] at least one coding sequence comprises a codon modified coding sequence comprising a nucleic acid sequence being identical or at least 70%, 80%, 85%, 86%, 87%, 88%, 89%, 90%, 91%, 92%, 93%, 94%, 95%, 96%, 97%, 98%, or 99% identical to any one SEQ ID NOs: 11530-12803 (encoding Z) or a fragment or variant of any of these sequences.

[0336] Additional information regarding each of these suitable nucleic acid sequences encoding may also be derived from the sequence listing, in particular from the details provided therein under identifier <223>.

[0337] In particularly preferred embodiment, the an RNA of the first aspect comprises at least one coding sequence comprising a G/C optimized or G/C content modified coding sequence (opt1, opt5, opt6, opt11) comprising a nucleic acid sequence which is identical or at least 50%, 60%, 70%, 80%, 85%, 86%, 87%, 88%, 89%, 90%, 91%, 92%, 93%, 94%, 95%, 96%, 97%, 98%, or 99% identical to any one of the nucleic acid sequences according to the SEQ ID NOs: 509-762, 1525-2286 (encoding GPC) or a fragment or variant of any of these sequences, or
[0338] at least one coding sequence comprises a codon modified coding sequence comprising a nucleic acid sequence being identical or at least 70%, 80%, 85%, 86%, 87%, 88%, 89%, 90%, 91%, 92%, 93%, 94%, 95%, 96%, 97%, 98%, or 99% identical to any one SEQ ID NOs: 4075-4582, 5345-6106 (encoding GPCmut1) or a fragment or variant of any of these sequences, or
[0339] at least one coding sequence comprises a codon modified coding sequence comprising a nucleic acid sequence being identical or at least 70%, 80%, 85%, 86%, 87%, 88%, 89%, 90%, 91%, 92%, 93%, 94%, 95%, 96%, 97%, 98%, or 99% identical to any one SEQ ID NOs: 22981-23044, 23077-23108 (encoding GPCmut2) or a fragment or variant of any of these sequences, or
[0340] at least one coding sequence comprises a codon modified coding sequence comprising a nucleic acid sequence being identical or at least 70%, 80%, 85%, 86%, 87%, 88%, 89%, 90%, 91%, 92%, 93%, 94%, 95%, 96%, 97%, 98%, or 99% identical to any one SEQ ID NOs: 24677-24740, 24773-24804 (encoding GPCmut3) or a fragment or variant of any of these sequences, or
[0341] at least one coding sequence comprises a codon modified coding sequence comprising a nucleic acid sequence being identical or at least 70%, 80%, 85%, 86%, 87%, 88%, 89%, 90%, 91%, 92%, 93%, 94%, 95%, 96%, 97%, 98%, or 99% identical to any one SEQ ID NOs: 26373-26436, 26469-26500 (encoding GPCmut4) or a fragment or variant of any of these sequences, or
[0342] at least one coding sequence comprises a codon modified coding sequence comprising a nucleic acid sequence being identical or at least 70%, 80%, 85%, 86%, 87%, 88%, 89%, 90%, 91%, 92%, 93%, 94%, 95%, 96%, 97%, 98%, or 99% identical to any one SEQ ID NOs: 28069-28132, 28165-28196 (encoding GPCmut5) or a fragment or variant of any of these sequences, or
[0343] at least one coding sequence comprises a codon modified coding sequence comprising a nucleic acid sequence being identical or at least 70%, 80%, 85%, 86%, 87%, 88%, 89%, 90%, 91%, 92%, 93%, 94%, 95%, 96%, 97%, 98%, or 99% identical to any one SEQ ID NOs: 29765-29828, 29861-29892 (encoding GPCmut6) or a fragment or variant of any of these sequences, or
[0344] at least one coding sequence comprises a codon modified coding sequence comprising a nucleic acid sequence being identical or at least 70%, 80%, 85%, 86%, 87%, 88%, 89%, 90%, 91%, 92%, 93%, 94%, 95%, 96%, 97%, 98%, or 99% identical to any one SEQ ID NOs: 31461-31524, 31557-31588 (encoding GPCmut7) or a fragment or variant of any of these sequences, or
[0345] at least one coding sequence comprises a codon modified coding sequence comprising a nucleic acid sequence being identical or at least 70%, 80%, 85%, 86%, 87%, 88%, 89%, 90%, 91%, 92%, 93%, 94%, 95%, 96%, 97%, 98%, or 99% identical to any one SEQ ID NOs: 33157-33220, 33253-33284 (encoding GPCmut8) or a fragment or variant of any of these sequences, or
[0346] at least one coding sequence comprises a codon modified coding sequence comprising a nucleic acid sequence being identical or at least 70%, 80%, 85%, 86%, 87%, 88%, 89%, 90%, 91%, 92%, 93%, 94%, 95%, 96%, 97%, 98%, or 99% identical to any one SEQ ID NOs: 34853-34916, 34949-34980 (encoding GPCmut9) or a fragment or variant of any of these sequences, or
[0347] at least one coding sequence comprises a codon modified coding sequence comprising a nucleic acid sequence being identical or at least 70%, 80%, 85%, 86%, 87%, 88%, 89%, 90%, 91%, 92%, 93%, 94%, 95%, 96%, 97%, 98%, or 99% identical to any one SEQ ID NOs: 36549-36612, 36645-36676 (encoding GPCmut10) or a fragment or variant of any of these sequences, or
[0348] at least one coding sequence comprises a codon modified coding sequence comprising a nucleic acid sequence being identical or at least 70%, 80%, 85%, 86%, 87%, 88%, 89%, 90%, 91%, 92%, 93%, 94%, 95%, 96%, 97%, 98%, or 99% identical to any one SEQ ID NOs: 38245-38308, 38341-38372 (encoding GPCmut11) or a fragment or variant of any of these sequences, or
[0349] at least one coding sequence comprises a codon modified coding sequence comprising a nucleic acid sequence being identical or at least 70%, 80%, 85%, 86%, 87%, 88%, 89%, 90%, 91%, 92%, 93%, 94%, 95%, 96%, 97%, 98%, or 99% identical to any one SEQ ID NOs: 39941-40004, 40037-40068 (encoding GPCmut12) or a fragment or variant of any of these sequences, or
[0350] at least one coding sequence comprises a codon modified coding sequence comprising a nucleic acid sequence being identical or at least 70%, 80%, 85%, 86%, 87%, 88%, 89%, 90%, 91%, 92%, 93%, 94%, 95%, 96%, 97%, 98%, or 99% identical to any one SEQ ID NOs: 41637-41700, 41733-41764 (encoding GPCmut13) or a fragment or variant of any of these sequences, or
[0351] at least one coding sequence comprises a codon modified coding sequence comprising a nucleic acid sequence being identical or at least 70%, 80%, 85%, 86%, 87%, 88%, 89%, 90%, 91%, 92%, 93%, 94%, 95%, 96%, 97%, 98%, or 99% identical to any one SEQ ID NOs: 8049-8299, 9053-9805 (encoding NP) or a fragment or variant of any of these sequences, or
[0352] at least one coding sequence comprises a codon modified coding sequence comprising a nucleic acid sequence being identical or at least 70%, 80%, 85%, 86%, 87%, 88%, 89%, 90%, 91%, 92%, 93%, 94%, 95%, 96%, 97%, 98%, or 99% identical to any one SEQ ID NOs: 18002-18035, 18070-18103, 19362-19395, 19430- 19463, 20723-20756, 20791-20824 (encoding SP_NP) or a fragment or variant of any of these sequences, or
[0353] at least one coding sequence comprises a codon modified coding sequence comprising a nucleic acid sequence being identical or at least 70%, 80%, 85%, 86%, 87%, 88%, 89%, 90%, 91%, 92%, 93%, 94%, 95%, 96%, 97%, 98%, or 99% identical to any one SEQ ID NOs: 11530-11711, 12258-12803 (encoding Z) or a fragment or variant of any of these sequences.

[0354] Additional information regarding each of these suitable nucleic acid sequences encoding may also be derived from the sequence listing, in particular from the details provided therein under identifier <223>.

[0355] In a particularly preferred embodiment, the RNA of the first aspect comprises a ribosome binding site, also referred to as “Kozak sequence”, identical to or at least 80%, 85%, 90%, 95% identical to any one of the sequences according to SEQ ID NOs: 13844 or 13845 or fragments or variants thereof.

[0356] In embodiments, the RNA of the first aspect is monocistronic, bicistronic, or multicistronic.

[0357] In preferred embodiments, the RNA of the invention is monocistronic.

[0358] The term “monocistronic” will be recognized and understood by the person of ordinary skill in the art, and is e.g. intended to refer to an RNA that comprises only one coding sequences as defined herein. The terms “bicistronic” or “multicistronic” as used herein will be recognized and understood by the person of ordinary skill in the art, and are e.g. intended to refer to an RNA that may comprise two (bicistronic) or even more (multicistronic) coding sequences as defined herein.

[0359] In embodiments, the RNA is monocistronic and the coding sequence of said monocistronic RNA encodes at least two different antigenic peptides or proteins derived from a LASV protein as defined herein, or a fragment or variant thereof. Accordingly, the at least one coding sequence of the monocistronic RNA may encode at least two, three, four, five, six, seven, eight and more antigenic peptides or proteins derived from a LASV protein, wherein the at least two, three, four, five, six, seven, eight and more antigenic peptides or proteins may be linked with or without an amino acid linker sequence, wherein said linker sequence can comprise rigid linkers, flexible linkers, cleavable linkers (self-cleaving peptides) as defined above, or a combination thereof (herein referred to as “multi-antigen-constructs/nucleic acid”).

[0360] In embodiments, the RNA of the invention is bicistronic or multicistronic and comprises at least two coding sequences, wherein the at least two coding sequences encode two or more different antigenic peptides or proteins derived from a LASV protein, or a fragment or variant of any of these. Accordingly, the coding sequences in a bicistronic or multicistronic RNA may encode distinct antigenic proteins or peptides as defined herein or a fragment or variant thereof. Preferably, the coding sequences in said bicistronic or multicistronic RNA may be separated by at least one IRES (internal ribosomal entry site) sequence. Thus, the term “encoding two or more antigenic peptides or proteins” may mean, without being limited thereto, that the bicistronic or multicistronic RNA encodes e.g. at least two, three, four, five, six or more (preferably different) antigenic peptides or proteins of different LASV or their fragments or variants within the definitions provided herein. Alternatively, the bicistronic or multicistronic RNA may encode e.g. at least two, three, four, five, six or more (preferably different) antigenic peptides or proteins derived from the same LASV or fragments or variants within the definitions provided herein. In that context, suitable IRES sequences may be selected from the list of nucleic acid sequences according to SEQ ID NOs: 1566-1662 of WO2017/081082, or fragments or variants of these sequences. In this context, the disclosure of WO2017/081082 relating to IRES sequences is herewith incorporated by reference.

[0361] It has to be understood that in the context of the invention, certain combinations of coding sequences may be generated by any combination of monocistronic, bicistronic and multicistronic nucleic acids and/or multi- antigen-constructs/nucleic acid to obtain a nucleic acid composition encoding multiple antigenic peptides or proteins as defined herein (further explained in the context of the second aspect).

[0362] Preferably, the RNA comprising at least one coding sequence as defined herein typically comprises a length of about 50 to about 20000, or 500 to about 20000 nucleotides, or about 500 to about 20000 nucleotides, or about 500 to about 10000 nucleotides, or of about 1000 to about 10000 nucleotides, or preferably of about 1000 to about 5000 nucleotides, or even more preferably of about 1000 to about 2500 nucleotides.

[0363] According to preferred embodiments, the RNA of the first aspect is a coding RNA, preferably an mRNA, a self-replicating RNA, a circular RNA, or a replicon RNA.

[0364] In embodiments, the RNA is a circular RNA. As used herein, “circular RNA” or “circRNA” has to be understood as a circular polynucleotide that can encode at least one antigenic peptide or protein as defined herein. Accordingly, in preferred embodiments, said circular RNA comprises at least one coding sequence encoding at least one antigenic peptide or protein derived from LASV or a fragment or variant thereof. Further, said circRNA may comprise at least one 3′-UTR and/or 5′-UTR as defined herein. The production of circRNAs can be performed using various methods provided in the art. E.g., U.S. Pat. No. 6,210,931 teaches a method of synthesizing circRNAs by inserting DNA fragments into a plasmid containing sequences having the capability of spontaneous cleavage and self-circularization. U.S. Pat. No. 5,773,244 teaches producing circRNAs by making a DNA construct encoding an RNA cyclase ribozyme, expressing the DNA construct as RNA, and then allowing the RNA to self-splice, which produces a circRNA free from intron in vitro. WO1992/001813 teaches a process of making single strand circular nucleic acids by synthesizing a linear polynucleotide, combining the linear nucleotide with a complementary linking oligonucleotide under hybridization conditions, and ligating the linear polynucleotide. The person skilled in the art may also use methods provided in WO2015/034925 or WO2016/011222 to produce circular RNA. Accordingly, methods for producing circular RNA as provided in U.S. Pat. No. 6,210,931, U.S. Pat. No. 5,773,244, WO1992/001813, WO2015/034925 and WO2016/011222 may suitably be used to generate the circRNA of the invention.

[0365] In embodiments, the RNA is a replicon RNA. The term “replicon RNA” will be recognized and understood by the person of ordinary skill in the art, and is e.g. intended to be an optimized self-replicating RNA. Such constructs may include replication elements (replicase) derived from e.g. alphaviruses and the substitution of the structural virus proteins with the nucleic acid of interest. Alternatively, the replicase may be provided on an independent nucleic acid construct comprising a replicase sequence derived from e.g. Semliki forest virus (SFV), Sindbis virus (SIN), Venezuelan equine Encephalitis virus (VEE), Ross-River virus (RRV), or other viruses belonging to the alphavirus family. Downstream of the replicase may be a sub-genomic promoter that controls replication of the replicon RNA of the first aspect.

[0366] In particularly preferred embodiments the RNA of the first aspect is an mRNA.

[0367] The term “mRNA” (abbreviation of “messenger RNA”) will be recognized and understood by the person of ordinary skill in the art, and is e.g. intended to be a ribonucleic acid molecule, i.e. a polymer consisting of nucleotides. These nucleotides are usually connected to each other along a so-called backbone. The backbone is formed by phosphodiester bonds between the sugar, i.e. ribose, of a first and a phosphate moiety of a second, adjacent monomer. The specific succession of the monomers is called the RNA-sequence. The mRNA usually provides the coding sequence (cds) that is translated into an amino-acid sequence of a particular peptide or protein. Typically, an mRNA comprises a 5′-cap structure, UTR elements, and a 3′ poly(A) sequence.

[0368] The RNA of the invention may be prepared using any method known in the art, including chemical synthesis such as e.g. solid phase RNA synthesis, as well as in vitro methods, such as RNA in vitro transcription reactions.

[0369] In a preferred embodiment, the RNA, preferably the mRNA is obtained by RNA in vitro transcription.

[0370] Accordingly, the RNA of the invention is an in vitro transcribed RNA, preferably an in vitro-transcribed mRNA.

[0371] The terms “RNA in vitro transcription” or “in vitro transcription” relate to a process wherein RNA is synthesized in a cell-free in vitro system. RNA may be obtained by DNA-dependent in vitro transcription of an appropriate DNA template, e.g. a linearized plasmid DNA template or a PCR-amplified DNA template. The promoter for controlling RNA in vitro transcription can be any promoter for any DNA-dependent RNA polymerase. Suitable examples of DNA-dependent RNA polymerases are the T7, T3, SP6, or Syn5 RNA polymerases.

[0372] Reagents used in RNA in vitro transcription typically include: a DNA template (linearized plasmid DNA or PCR generated DNA) with a promoter sequence that has a high binding affinity for its respective RNA polymerase such as bacteriophage-encoded RNA polymerases (T7, T3, SP6, or Syn5); a nucleotide mixture comprising ribonucleotide triphosphates (NTPs) for the four bases (adenine, cytosine, guanine and uracil) and optionally, a cap analogue as defined herein (preferably a cap° analogue e.g., m7G(5′)ppp(5′)G (m7G) or a cap1 analogue, e.g. m7G(5′)ppp(5′)(2′OMeA)pG or m7G(5′)ppp(5′)(2′OMeG)pG); optionally, further modified nucleotides as defined herein; a DNA-dependent RNA polymerase capable of binding to the promoter sequence within the DNA template (e.g. T7, T3, SP6, or Syn5 RNA polymerase); optionally, a ribonuclease (RNase) inhibitor to inactivate any potentially contaminating RNase; optionally, a pyrophosphatase to degrade pyrophosphate, which may inhibit RNA in vitro transcription; MgCl2, which supplies Mg2+ ions as a co-factor for the polymerase; a buffer (TRIS or HEPES) to maintain a suitable pH value, which can also contain antioxidants (e.g. DTT), and/or polyamines such as spermidine at optimal concentrations, e.g. a buffer system comprising e.g. TRIS-Citrate as disclosed in WO2017/109161.

[0373] In embodiments, the nucleotide mixture used in RNA in vitro transcription may additionally comprise at least one modified nucleotides as defined herein. In that context, preferred modified nucleotides may be selected from pseudouridine N1-methylpseudouridine (m1ψ), 5-methylcytosine, and 5-methoxyuridine. In embodiments, said at least one modified nucleotide at least partially replaces at least one non-modified nucleotide. Preferably, said at least one modified nucleotide completely replaces all of the corresponding non- modified nucleotides in the RNA sequence.

[0374] In preferred embodiments, the nucleotide mixture (i.e. the fraction of each nucleotide in the mixture) used for RNA in vitro transcription reactions may be optimized for the given RNA sequence, preferably as described in WO2015/188933.

[0375] In embodiment where more than one different RNA as defined herein has to be produced, e.g. where 2, 3, 4, 5, 6, 7, 8, 9, 10 or even more different RNAs have to be produced (e.g. encoding different LASV antigens, e.g. a combination of LASV GPC and LASV NP; see second aspect), procedures as described in WO2017/109134 may be suitably used. In that context, it may be required to optimize/modify the RNA sequences of at least one of the more than one different RNA sequences for HPLC-based purification and/or analysis using procedures as described in PCT patent application PCT/EP2017/078647.

[0376] In the context of pharmaceutical RNA production, it may be required to provide GMP-grade RNA. GMP-grade RNA may be produced using a manufacturing process approved by regulatory authorities. Accordingly, in a particularly preferred embodiment, RNA production is performed under current good manufacturing practice (GMP), implementing various quality control steps on DNA and RNA level, preferably according to WO2016/180430. In preferred embodiments, the RNA of the invention is a GMP-grade RNA, particularly a GMP-grade mRNA. The obtained RNA products are preferably purified using PureMessenger® (CureVac, Tübingen, Germany; RP-HPLC according to WO2008/077592) and/or tangential flow filtration (as described in WO2016/193206) and/or oligo d(T) purification.

[0377] In further preferred embodiments, the RNA, particularly the purified RNA, is lyophilized, suitably according to WO2016/165831 or WO2011/069586 to yield a temperature stable dried RNA (powder) as defined herein. The RNA of the invention, particularly the purified RNA may also be dried using spray-drying or spray-freeze drying, suitably according to WO2016/184575 or WO2016184576 to yield a temperature stable RNA (powder). Accordingly, in the context of manufacturing and purifying RNA, the disclosures of WO2017/109161, WO2015/188933, WO2016/180430, WO2008/077592, WO2016/193206, WO2016/165831, WO2011/069586, WO2016/184575, and WO2016/184576 are incorporated herewith by reference.

[0378] Accordingly, in preferred embodiments, the RNA is a dried RNA, particularly a dried mRNA.

[0379] The term “dried RNA” as used herein has to be understood as RNA that has been lyophilized, or spray-dried, or spray-freeze dried as defined above to obtain a temperature stable RNA (e.g. in from of a powder or granules).

[0380] In preferred embodiments, the RNA of the invention is a purified RNA, particularly purified mRNA.

[0381] The term “purified RNA” or “purified mRNA” as used herein has to be understood as RNA which has a higher purity after certain purification steps (e.g. HPLC, TFF, oligo d(T) purification, precipitation steps) than the starting material (e.g. crude in vitro transcribed RNA). Typical impurities that are essentially not present in purified RNA comprise peptides or proteins (e.g. enzymes derived from DNA dependent RNA in vitro transcription, e.g. RNA polymerases, RNases, pyrophosphatase, restriction endonuclease, DNase), spermidine, BSA, abortive RNA sequences, RNA fragments (short double stranded RNA fragments, abortive sequences, elongated sequences etc.), free nucleotides (modified nucleotides, conventional NTPs, cap analogue), template DNA fragments, buffer components (HEPES, TRIS, MgCl2) etc. Other potential impurities that may be derived from e.g. fermentation procedures comprise bacterial impurities (bioburden, bacterial DNA) or impurities derived from purification procedures (organic solvents etc.). Accordingly, it is desirable in this regard for the “degree of RNA purity” to be as close as possible to 100%. It is also desirable for the degree of RNA purity that the amount of full-length RNA transcripts is as close as possible to 100%. Accordingly “purified RNA” as used herein has a degree of purity of more than 75%, 80%, 85%, 90%, 91%, 92%, 93%, 94%, 95%, 96%, 97%, 98%, 99% or more. The degree of purity may e.g. be determined by an analytical HPLC, wherein the percentages provided above correspond to the ratio between the area of the peak for the target RNA and the total area of all peaks representing the by-products. Alternatively, the degree of purity may e.g. be determined by an analytical agarose gel electrophoresis or capillary gel electrophoresis or mass spectrometry.

[0382] It has to be understood that “dried RNA” as defined herein and “purified RNA” as defined herein or “GMP-grade mRNA” as defined herein may have superior stability characteristics (in vitro, in vivo) and improved efficiency (e.g. better translatability of the mRNA in vivo) and are therefore particularly suitable in the context of the invention. Moreover, “dried RNA” as defined herein and “purified RNA” as defined herein or “GMP-grade mRNA” may be particularly suitable for medical use as defined herein.

[0383] The RNA may suitably be modified by the addition of a 5′-cap structure, which preferably stabilizes the nucleic acid as described herein.

[0384] Accordingly, in preferred embodiments, the RNA of the first aspect comprises a 5′-cap structure, preferably m7G, cap° (e.g. m7G(5′)ppp(5′)G), cap1 (e.g. m7G(5′)ppp(5′)(2′OMeG) or m7G(5′)ppp(5′)(2′OMeA)), cap2, a modified cap0, or a modified cap1 structure (generated using a cap analogue as defined below), wherein cap1 is particularly preferred.

[0385] The term “5′-cap structure” as used herein will be recognized and understood by the person of ordinary skill in the art, and is e.g. intended to refer to a modified nucleotide (cap analogue), particularly a guanine nucleotide, added to the 5′-end of an RNA molecule, e.g. an mRNA molecule. Preferably, the 5′-cap is added using a 5′-5′-triphosphate linkage (also named m7GpppN). Further examples of 5′-cap structures include glyceryl, inverted deoxy abasic residue (moiety), 4′,5′ methylene nucleotide, 1-(beta-D-erythrofuranosyl) nucleotide, 4′-thio nucleotide, carbocyclic nucleotide, 1,5-anhydrohexitol nucleotide, L-nucleotides, alpha-nucleotide, modified base nucleotide, threo-pentofuranosyl nucleotide, acyclic 3′,4′-seco nucleotide, acyclic 3,4-dihydroxybutyl nucleotide, acyclic 3,5 dihydroxypentyl nucleotide, 3′-3′-inverted nucleotide moiety, 3′-3′-inverted abasic moiety, 3′-2′-inverted nucleotide moiety, 3′-2′-inverted abasic moiety, 1,4-butanediol phosphate, 3′-phosphoramidate, hexylphosphate, aminohexyl phosphate, 3′-phosphate, 3′phosphorothioate, phosphorodithioate, or bridging or non-bridging methylphosphonate moiety.

[0386] Further 5′-cap structures which may be suitable in the context of the present invention are cap1 (additional methylation of the ribose of the adjacent nucleotide of m7GpppN), cap2 (additional methylation of the ribose of the 2nd nucleotide downstream of the m7GpppN), cap3 (additional methylation of the ribose of the 3rd nucleotide downstream of the m7GpppN), cap4 (additional methylation of the ribose of the 4th nucleotide downstream of the m7GpppN), ARCA (anti-reverse cap analogue), modified ARCA (e.g. phosphothioate modified ARCA), inosine, N1-methyl-guanosine, 2′-fluoro-guanosine, 7-deaza-guanosine, 8-oxo-guanosine, 2-amino-guanosine, LNA-guanosine, and 2-azido-guanosine.

[0387] A 5′-cap (cap0 or cap1) structure may be formed in chemical RNA synthesis or RNA in vitro transcription (co-transcriptional capping) using cap analogues.

[0388] The term “cap analogue” as used herein will be recognized and understood by the person of ordinary skill in the art, and is e.g. intended to refer to a non-polymerizable di-nucleotide that has cap functionality in that it facilitates translation or localization, and/or prevents degradation of a nucleic acid molecule, particularly of an RNA molecule, when incorporated at the 5′-end of the nucleic acid molecule. Non-polymerizable means that the cap analogue will be incorporated only at the 5′-terminus because it does not have a 5′ triphosphate and therefore cannot be extended in the 3′-direction by a template-dependent polymerase, particularly, by template-dependent RNA polymerase. Examples of cap analogues include, but are not limited to, a chemical structure selected from the group consisting of m7GpppG, m7GpppA, m7GpppC; unmethylated cap analogues (e.g. GpppG); dimethylated cap analogue (e.g. m2,7GpppG), trimethylated cap analogue (e.g. m2,2,7GpppG), dimethylated symmetrical cap analogues (e.g. m7Gpppm7G), or anti reverse cap analogues (e.g. ARCA; m7,2′OmeGpppG, m7,2′dGpppG, m7,3′OmeGpppG, m7,3′dGpppG and their tetraphosphate derivatives). Further cap analogues have been described previously (WO2008/016473, WO2008/157688, WO2009/149253, WO2011/015347, and WO2013/059475). Further suitable cap analogues in that context are described in WO2017/066793, WO2017/066781, WO2017/066791, WO2017/066789, WO2017/053297, WO2017/066782, WO2018075827 and WO2017/066797 wherein the disclosures referring to cap analogues are incorporated herewith by reference.

[0389] In embodiments, a modified cap1 structure is generated using a cap analogue as disclosed in WO2017/053297, WO2017/066793, WO2017/066781, WO2017/066791, WO2017/066789, WO2017/066782, WO2018075827 and WO2017/066797. In particular, any cap structures derivable from the structure disclosed in claim 1-5 of WO2017/053297 may be suitably used to co-transcriptionally generate a modified capl structure. Further, any cap structures derivable from the structure defined in claim 1 or claim 21 of WO2018075827 may be suitably used to co-transcriptionally generate a modified cap1 structure.

[0390] In preferred embodiments, the 5′-cap structure may suitably be added co-transcriptionally using cap-analogues as defined herein in an RNA in vitro transcription reaction as defined herein. Preferred cap-analogues in the context of the invention are m7G(5′)ppp(5′)G (m7G) or 3′-O-Me-m7G(5′)ppp(5′)G. Further preferred cap-analogues in the context of the invention are m7G(5′)ppp(5′)(2′OMeA)pG or m7G(5′)ppp(5′)(2′OMeG)pG to co-transcriptionally generate cap1 structures.

[0391] In other embodiments, the 5′-cap structure is added via enzymatic capping using capping enzymes (e.g. vaccinia virus capping enzymes and/or cap-dependent 2′-O methyltransferases) to generate cap0 or cap1 or cap2 structures. The 5′-cap structure (cap0 or cap1) may be added using immobilized capping enzymes and/or cap-dependent 2′-O methyltransferases using methods and means disclosed in WO2016/193226.

[0392] Accordingly, the RNA of the first aspect may comprise a 5′-cap structure, preferably m7G (m7G(5′)), m7G(5′)ppp(5′)(2′OMeA), or m7G(5′)ppp(5′)(2′OMeG).

[0393] In that context, it is preferred that the RNA of the invention comprises a cap1 structure as defined above, which preferably result in an increased protein expression through e.g. high capping efficiencies and increased translation efficiencies. Further suitably, the RNA of the invention comprising a cap1 structure displays a decreased stimulation of the innate immune system as compared to cap0 constructs of the same nucleic acid sequence. The person of ordinary skill knows how to determine translation efficiencies, capping degree, and immune stimulation.

[0394] In a particularly preferred embodiment, the RNA of the first aspect of the invention comprises a cap1 structure, wherein said cap1 structure may be formed enzymatically or co-transcriptionally (e.g. using m7G(5′)ppp(5′)(2′OMeA)pG or m7G(5′)ppp(5′)(2′OMeG)pG analogues).

[0395] In preferred embodiments, the artificial RNA of the first aspect comprises an m7G(5′)ppp(5′)(2′OMeA)pG cap structure. In such embodiments, the coding RNA comprises a 5′ terminal m7G cap, and an additional methylation of the ribose of the adjacent nucleotide of m7GpppN, in that case, a 2′O methylated adenosine.

[0396] In other preferred embodiments, the artificial RNA of the first aspect comprises an m7G(5′)ppp(5′)(2′OMeG)pG cap structure. In such embodiments, the coding RNA comprises a 5′ terminal m7G cap, and an additional methylation of the ribose of the adjacent nucleotide, in that case, a 2′O methylated guanosine.

[0397] Accordingly, whenever reference is made to suitable RNA or mRNA sequences in the context of the invention, the first nucleotide of said RNA or mRNA sequence, that is the nucleotide downstream of the m7G(5′)ppp structure, may be a 2′O methylated guanosine or a 2′O methylated adenosine.

[0398] Accordingly, in other embodiments, the artificial RNA of the invention may comprise a 5′-cap sequence element according to SEQ ID NOs 13846 or 13847 or a fragment or variant thereof.

[0399] In preferred embodiments, the RNA of the invention comprises at least one poly(A) sequence, preferably comprising 30 to 150 adenosine nucleotides.

[0400] In preferred embodiments, the poly(A) sequence, suitable located at the 3′ terminus (e.g. downstream of the 3′-UTR as defined herein), comprises 10 to 500 adenosine nucleotides, 10 to 200 adenosine nucleotides, 40 to 200 adenosine nucleotides or 40 to 150 adenosine nucleotides. In a particularly preferred embodiment, the poly(A) sequence comprises about 64 adenosine nucleotides. Suitably, the length of the poly(A) sequence may be at least about or even more than about 10, 50, 64, 75, 100, 200, 300, 400, or 500 adenosine nucleotides. In further particularly preferred embodiments, the poly(A) sequence comprises about 75 adenosine nucleotides.

[0401] In preferred embodiments, the coding RNA comprises at least one poly(A) sequence comprising about 30 to about 200 adenosine nucleotides. In preferred embodiments, the poly(A) sequence comprises about 64 adenosine nucleotides (A64). In particularly preferred embodiments, the poly(A) sequence comprises about 100 adenosine nucleotides (A100). In particularly preferred embodiments, the poly(A) sequence comprises about 150 adenosine nucleotides.

[0402] The terms “poly(A) sequence”, “poly(A) tail” or “3′-poly(A) tail” as used herein will be recognized and understood by the person of ordinary skill in the art, and are e.g. intended to be a sequence of adenosine nucleotides, typically located at the 3′-end of an RNA, of up to about 1000 adenosine nucleotides. Preferably, said poly(A) sequence is essentially homopolymeric, e.g. a poly(A) sequence of e.g. 100 adenosine nucleotides has essentially the length of 100 nucleotides. In other embodiments, the poly(A) sequence may be interrupted by at least one nucleotide different from an adenosine nucleotide, e.g. a poly(A) sequence of e.g. 100 adenosine nucleotides may have a length of more than 100 nucleotides (comprising 100 adenosine nucleotides and in addition said at least one nucleotide different from an adenosine nucleotide). In the context of the present invention, a poly(A) sequence may be located within an mRNA or any other nucleic acid molecule, such as in a DNA serving as template for the generation of an RNA, preferably an mRNA, e.g., by transcription said DNA template (e.g., plasmid DNA or PCR product).

[0403] The poly(A) sequence as defined herein is suitably located at the 3′ terminus of the coding RNA. Accordingly it is preferred that the 3′-terminal nucleotide of the coding RNA (that is the last 3′-terminal nucleotide in the polynucleotide chain) is the 3′-terminal A nucleotide of the at least one poly(A) sequence. The term “located at the 3′ terminus” has to be understood as being located exactly at the 3′ terminus—in other words, the 3′ terminus of the coding RNA consists of a poly(A) sequence terminating with an A nucleotide. Sequences having a 3′ terminus consisting of a poly(A) sequence are SEQ ID NOs: 14152-14247, 14440-14535, 14728-14823, 15016-15111, 15336-15463, 15720-15847, 16104-16231, 16488-16615, 16846-16947, 17152-17253, 17458-17559, 17764-17865, 22124-22198, 22349-22423, 22574-22648, 22799-22873, 18206-18307, 18512-18613, 18818-18919, 19124-19225, 19566-19667, 19872-19973, 20178-20279, 20484-20585, 20927-21028, 21233-21334, 21539-21640, 21845-21946, 23237-23364, 23621-23748, 24005-24132, 24389-24516, 24933-25060, 25317-25444, 25701-25828, 26085-26212, 26629-26756, 27013-27140, 27397-27524, 27781-27908, 28325-28452, 28709-28836, 29093-29220, 29477-29604, 30021-30148, 30405-30532, 30789-30916, 31173-31300, 31717-31844, 32101-32228, 32485-32612, 32869-32996, 33413-33540, 33797-33924, 34181-34308, 34565-34692, 35109-35236, 35493-35620, 35877-36004, 36261-36388, 36805-36932, 37189-37316, 37573-37700, 37957-38084, 38501-38628, 38885-39012, 39269-39396, 39653-39780, 41893-42020, 42277-42404, 42661-42788, 43045-43172 (hSL-A100) or 14248-14343, 14536-14631, 14824-14919, 15112-15207, 15464-15591, 15848-15975, 16232-16359, 16616-16743, 16948-17049, 17254-17355, 17560-17661, 17866-17967, 22199-22273, 22424-22498, 22649-22723, 22874-22948, 18308-18409, 18614-18715, 18920-19021, 19226-19327, 19668-19769, 19974-20075, 20280-20381, 20586-20687, 21029-21130, 21335-21436, 21641-21742, 21947-22048, 23365-23492, 23749-23876, 24133-24260, 24517-24644, 25061-25188, 25445-25572, 25829-25956, 26213-26340, 26757-26884, 27141-27268, 27525-27652, 27909-28036, 28453-28580, 28837-28964, 29221-29348, 29605-29732, 30149-30276, 30533-30660, 30917-31044, 31301-31428, 31845-31972, 32229-32356, 32613-32740, 32997-33124, 33541-33668, 33925-34052, 34309-34436, 34693-34820, 35237-35364, 35621-35748, 36005-36132, 36389-36516, 36933-37060, 37317-37444, 37701-37828, 38085-38212, 38629-38756, 39013-39140, 39397-39524, 39781-39908, 42021-42148, 42405-42532, 42789-42916, 43173-43300 (A100) indicated under <223> identifier of the respective SEQ ID NO with “hSL-A100” or “A100” in the sequence listing.

[0404] The presence of a poly(A) sequence exactly at the 3′ terminus of the coding RNA encoding a LASV antigenic peptide protein (e.g. GPC) is advantageous and of particular importance in the context of the invention as the induction of a specific immune response against LASV antigenic peptide or protein can increase).

[0405] Preferably, the poly(A) sequence of the RNA is obtained from a DNA template during RNA in vitro transcription. In other embodiments, the poly(A) sequence is obtained in vitro by common methods of chemical synthesis without being necessarily transcribed from a DNA template. In other embodiments, poly(A) sequences are generated by enzymatic polyadenylation of the RNA (after RNA in vitro transcription) using commercially available polyadenylation kits and corresponding protocols known in the art, or alternatively, by using immobilized poly(A)polymerases e.g. using a methods and means as described in WO2016/174271.

[0406] In embodiments, the RNA may comprise a poly(A) sequence derived from a template DNA and may comprise at least one additional poly(A) sequence generated by enzymatic polyadenylation, e.g. as described in WO2016/091391.

[0407] In preferred embodiments, the RNA may comprise at least one poly(C) sequence, preferably comprising 10 to 40 cytosine nucleotides.

[0408] In preferred embodiments, the poly(C) sequence, suitable located at the 3′ terminus (e.g. downstream of the 3′-UTR as defined herein), comprises 10 to 200 cytosine nucleotides, 10 to 100 cytosine nucleotides, 20 to 70 cytosine nucleotides, 20 to 60 cytosine nucleotides, or 10 to 40 cytosine nucleotides. In a particularly preferred embodiment, the poly(C) sequence comprises about 30 cytosine nucleotides.

[0409] The term “poly(C) sequence” as used herein will be recognized and understood by the person of ordinary skill in the art, and are for example intended to be a sequence of cytosine nucleotides, typically located at the 3′-end of an RNA, of up to about 200 cytosine nucleotides. In the context of the present invention, a poly(C) sequence may be located within an mRNA or any other nucleic acid molecule, such as in a DNA serving as template for the generation of an RNA, preferably an mRNA, e.g., by transcription said DNA template (e.g., plasmid DNA or PCR product).

[0410] Preferably, the poly(C) sequence in the RNA sequence of the present invention is derived from a DNA template by RNA in vitro transcription. In other embodiments, the poly(C) sequence is obtained in vitro by common methods of chemical synthesis without being necessarily transcribed from a DNA template.

[0411] In other embodiments, the RNA of the invention does not comprise a poly(C) sequence as defined herein.

[0412] In preferred embodiments, the coding RNA of the invention does comprise a poly(A) sequence as defined herein, preferably A100 located (exactly) at the 3′ terminus, and does not comprise a poly(C) sequence.

[0413] In a particularly preferred embodiment, the coding RNA of the invention comprises a cap1 structure as defined herein and at least one poly(A) sequence as defined in herein. Preferably, said cap1 structure is obtainable by co-transcriptional capping as defined herein, and said poly(A) sequence is preferably (exactly) at the 3′ terminus (e.g., A100, hSL-A100).

[0414] The presence of cap1 structure and poly(A) sequence exactly at the 3′ terminus of the coding RNA encoding a LASV peptide or protein (e.g. GPC) is advantageous as the induction of a specific immune response against LASV antigenic peptide or proteins may be dramatically increase.

[0415] In preferred embodiments, the RNA of the first aspect comprises at least one histone stem-loop.

[0416] The term “histone stem-loop” as used herein will be recognized and understood by the person of ordinary skill in the art, and is e.g. intended to refer to nucleic acid sequences that are predominantly found in histone mRNAs. Exemplary histone stem-loop sequences are described in Lopez et al. (Davila Lopez et al, (2008), RNA, 14(1)). The stem-loops in histone pre-mRNAs are typically followed by a purine-rich sequence known as the histone downstream element (HDE). These pre-mRNAs are processed in the nucleus by a single endonucleolytic cleavage approximately 5 nucleotides downstream of the stem-loop, catalysed by the U7 snRNP through base pairing of the U7 snRNA with the HDE.

[0417] Histone stem-loop sequences may suitably be selected from histone stem-loop sequences disclosed in WO2012/019780, the disclosure relating to histone stem-loop sequences/structures incorporated herewith by reference. A histone stem-loop sequence that may be used within the present invention may preferably be derived from formulae (I) or (II) of WO2012/019780. According to a further preferred embodiment the RNA as defined herein may comprise at least one histone stem-loop sequence derived from at least one of the specific formulae (Ia) or (IIa) of WO2012/019780.

[0418] In particularly preferred embodiment, the RNA of the invention comprises at least one histone stem-loop, wherein said histone stem-loop comprises a nucleic acid sequence according to SEQ ID NOs: 13842 or 13843 or a fragments or variant thereof.

[0419] In other embodiments, the RNA of the first aspect does not comprise a histone stem-loop as defined herein.

[0420] In further embodiments, the RNA of the invention comprises a 3′-terminal sequence element. Said 3′-terminal sequence element has to be understood as a sequence element comprising a poly(A) sequence and/or a histone-stem-loop sequence, wherein said sequence element is located at the 3′ terminus of the RNA of the invention.

[0421] Accordingly, the RNA of the invention may comprise a 3′-terminal sequence element according to SEQ ID NOs: 13848-13867, 13873-13879 or a fragment or variant thereof.

[0422] In preferred embodiments of the first aspect, the RNA, preferably mRNA comprises preferably in 5′- to 3′-direction the following elements:
[0423] a) 5′-cap structure, preferably as specified herein;
[0424] b) optionally, 5′-UTR as specified herein, preferably at least one selected from SEQ ID NOs: 13804-13825;
[0425] c) at least one coding sequence as specified herein;
[0426] d) 3′-UTR as specified herein, preferably at least one selected from SEQ ID NOs: 13826-13841;
[0427] e) optionally, poly(A) sequence, preferably as specified herein;
[0428] f) optionally, poly(C) sequence, preferably as specified herein;
[0429] g) optionally, histone stem-loop as specified herein, preferably according to SEQ ID NOs: 13842 or 13843;
[0430] h) optionally, 3′-terminal sequence element as specified herein, preferably according to SEQ ID NOs: 13848-13867, 13873-13879.

[0431] In further preferred embodiments of the first aspect, the RNA, preferably mRNA comprises the following elements preferably in 5′- to 3′-direction:
[0432] a) 5′-cap structure, preferably as specified herein, most preferably m7G(5′), m7G(5′)ppp(5′)(2′OMeA), or m7G(5′)ppp(5′)(2′OMeG);
[0433] b) 3′-UTR and 5′-UTR element according to a-1, a-2, a-3, a-4, a-5, b-1, b-2, b-3, b-4, b-5, c-1, c-2, c-3, c-4, c-5, d-1, d-2, d-3, d-4, d-5, e-1, e-2, e-3, e-4, e-5, e-6, f-1, f-2, f-3, f-4, f-5, g-1, g-2, g-3, g-4, g-5, h-1, h-2, h-3, h-4, h-5, i-1, i-2, or i-3, as specified herein, wherein a-1, a-2, b-4, i-2, or i-3 are preferred;
[0434] c) at least one coding sequence as specified herein, wherein said coding sequence is located between said 5′-UTR and said 3′-UTR, preferably downstream of said 5′-UTR and upstream of said 3′-UTR, wherein the coding sequence is preferably selected from any one specified in Table 2-5, columns “cds”;
[0435] d) optionally, poly(A) sequence, preferably as specified herein;
[0436] e) optionally, poly(C) sequence, preferably as specified herein;
[0437] f) optionally, histone stem-loop, preferably as specified herein;
[0438] g) optionally, 3′-terminal sequence element as specified herein, preferably according to according to SEQ ID NOs: 13848-13867, 13873-13879.

[0439] In further preferred embodiments of the first aspect, the RNA, preferably mRNA comprises the following elements in 5′- to 3′-direction:
[0440] a) 5′-cap structure, preferably as specified herein, most preferably m7G(5′), m7G(5′)ppp(5′)(2′OMeA), or m7G(5′)ppp(5′)(2′OMeG);
[0441] b) 3′-UTR and 5′-UTR element according to a-1, a-2, b-4, i-2, or i-3 as specified herein;
[0442] c) at least one coding sequence as specified herein, wherein said coding region is located between said 5′-UTR and said 3′-UTR, preferably downstream of said 5′-UTR and upstream of said 3′-UTR, wherein the coding sequence is preferably selected from any one of SEQ ID NOs: 255-2286, 3821-6106, 7798-9805, 11348-12803, 18002-18103, 19362-19463, 20723-20824, 22981-23108, 24677-24804, 26373-26500, 28069-28196, 29765-29892, 31461-31588, 33157-33284, 34853-34980, 36549-36676, 38245-38372, 41637-41764 (or fragments or variants thereof);
[0443] d) poly(A) sequence comprising about 64 adenosine;
[0444] e) poly(C) sequence comprising about 30 cysteines;
[0445] f) histone stem-loop according to SEQ ID NOs: 13842 or 13843.

[0446] In further preferred embodiments of the first aspect, the RNA, preferably mRNA comprises the following elements in 5′- to 3′-direction:
[0447] a) 5′-cap structure, preferably as specified herein, most preferably m7G(5′), m7G(5′)ppp(5′)(2′OMeA), or m7G(5′)ppp(5′)(2′OMeG);
[0448] b) 3′-UTR and 5′-UTR element according to a-1, a-2, b-4, i-2, or i-3 as specified herein;
[0449] c) at least one coding sequence as specified herein, wherein said coding region is located between said 5′-UTR and said 3′-UTR, preferably downstream of said 5′-UTR and upstream of said 3′-UTR, wherein the coding sequence is preferably selected from any one of SEQ ID NOs: 255-2286, 3821-6106, 7798-9805, 11348-12803, 18002-18103, 19362-19463, 20723-20824, 22981-23108, 24677-24804, 26373-26500, 28069-28196, 29765-29892, 31461-31588, 33157-33284, 34853-34980, 36549-36676, 38245-38372, 41637-41764 (or fragments or variants thereof);
[0450] d) 3′-terminal sequence element as specified herein, preferably according to according to SEQ ID NOs: 13848-13867, 13873-13879.

[0451] In further preferred embodiments of the first aspect, the RNA, preferably mRNA comprises the following elements in 5′- to 3′-direction:
[0452] a) 5′-cap structure, preferably as specified herein, most a cap1 structure;
[0453] b) 3′-UTR and 5′-UTR element according to a-1, a-2, b-4, i-2, or i-3 as specified herein;
[0454] c) at least one coding sequence as specified herein, wherein said coding region is located between said 5′-UTR and said 3′-UTR, preferably downstream of said 5′-UTR and upstream of said 3′-UTR, wherein the coding sequence is preferably selected from any one of SEQ ID NOs: 255-2286, 3821-6106, 7798-9805, 11348-12803, 18002-18103, 19362-19463, 20723-20824, 22981-23108, 24677-24804, 26373-26500, 28069-28196, 29765-29892, 31461-31588, 33157-33284, 34853-34980, 36549-36676, 38245-38372, 41637-41764 (or fragments or variants thereof);
[0455] d) a poly(A) sequence, preferably wherein the poly(A) sequence located (exactly) at the 3′ terminus,
[0456] e) 3′-terminal sequence element as specified herein, preferably according to according to SEQ ID NOs: 13848-13867, 13873-13879, and
[0457] wherein optionally at least one or more than one, preferably wherein all uracil nucleotides are replaced by pseudouridine (ψ) nucleotides or N1-methylpseudouridine (m1ψ) nucleotides.

[0458] Preferred amino acid sequences, nucleic acid sequences, and mRNA sequences of the invention are provided in Table 2 (GPC), Table 3.1 (GPCmut1, GPCstabilized), Table 3.2 (GPCmut2), Table 3.3 (GPCmut3), Table 3.4 (GPCmut4), Table 3.5 (GPCmut5), Table 3.6 (GPCmut6), Table 3.7 (GPCmut7), Table 3.8 (GPCmut8), Table 3.9 (GPCmut9), Table 3.10 (GPCmut10), Table 3.11 (GPCmut11), Table 3.12 (GPCmut12), Table 3.13 (GPCmut13), Table 4 (NP), Table 4.1 (SP-HsPLAT_NP), Table 4.2 (SP-HsALB_NP), Table 4.3 (SP-IgE_NP), and Table 5 (Z). Therein, each row represents a specific suitable LASV antigen of the invention, wherein the SEQ ID NOs of the amino acid sequence is provided in Column (“PRT”). The respective LASV strain where the amino acid sequence is derived from, NCBI accession number(s), and further information (e.g. clade) is provided under <223> identifier of the respective SEQ ID NO in the sequence listing.

[0459] The corresponding SEQ ID NOs of the coding sequences encoding the respective protein indicated in Column A is provided in column “CDS”. In said column, the coding sequences are provided in the following order: wild type coding sequence, opt1, opt2, opt3, opt4, opt5, opt11. Further information is provided under <223> identifier of the respective SEQ ID NO in the sequence listing.

[0460] The corresponding RNA sequences comprising preferred coding sequences are provided in column “mRNA designs and SEQ ID NOs”, wherein a-1 provides RNA sequences with advantageous UTR combination a-1 as defined herein, wherein a-2 provides mRNA sequences with advantageous UTR combination a-2 as defined herein, wherein b-4 provides mRNA sequences with advantageous UTR combination b-4 as defined herein, wherein i-2 provides mRNA sequences with advantageous UTR combination i-2 as defined herein, and wherein i-3 provides mRNA sequences with UTR combination i-3 as defined herein. Further information e.g. regarding the type of coding sequence (wild type, opt1, opt2, opt3, opt4, opt5, opt6, opt11) comprised in the RNA constructs are provided under <223> identifier of the respective SEQ ID NO in the sequence listing.

TABLE 2
Preferred LASV Glycoprotein (GPC) constructs

| | | RNA designs and SEQ ID NOs | | | | |
|---|---|---|---|---|---|---|
| PRT | CDS | a-1 | a-2 | b-4 | i-2 | i-3 |
| 1 | 255, | 2287, 2319, | 2543, 2575, | 2799, 2831, | 3055, | 3311, 3343, |
| | 509, | 2351, 2383, | 2607, 2639, | 2863, 2895, | 3087, | 3375, 3407, |
| | 763, | 2415, 2447, | 2671, 2703, | 2927, 2959, | 3119, | 3439, 3471, |
| | 1017, | 2479, 2511, | 2735, 2767, | 2991, 3023, | 3151, | 3503, 3535, |
| | 1271, | 14056, 14088, | 14344, 14376, | 14632, 14664, | 3183, | 14920, 14952, |
| | 1525, | 14120, 14152, | 14408, 14440, | 14696, 14728, | 3215, | 14984, 15016, |
| | 1779, | 14184, 14216, | 14472, 14504, | 14760, 14792, | 3247, | 15048, 15080, |
| | 2033 | 14248, 14280, | 14536, 14568, | 14824, 14856, | 3279 | 15112, 15144, |
| | | 14312 | 14600 | 14888 | | 15176 |
| 2 | 256, | 2288, 2320, | 2544, 2576, | 2800, 2832, | 3056, | 3312, 3344, |
| | 510, | 2352, 2384, | 2608, 2640, | 2864, 2896, | 3088, | 3376, 3408, |
| | 764, | 2416, 2448, | 2672, 2704, | 2928, 2960, | 3120, | 3440, 3472, |
| | 1018, | 2480, 2512, | 2736, 2768, | 2992, 3024, | 3152, | 3504, 3536, |
| | 1272, | 14057, 14089, | 14345, 14377, | 14633, 14665, | 3184, | 14921, 14953, |
| | 1526, | 14121, 14153, | 14409, 14441, | 14697, 14729, | 3216, | 14985, 15017, |
| | 1780, | 14185, 14217, | 14473, 14505, | 14761, 14793, | 3248, | 15049, 15081, |
| | 2034 | 14249, 14281, | 14537, 14569, | 14825, 14857, | 3280 | 15113, 15145, |
| | | 14313 | 14601 | 14889 | | 15177 |
| 3 | 257, | 2289, 2321, | 2545, 2577, | 2801, 2833, | 3057, | 3313, 3345, |
| | 511, | 2353, 2385, | 2609, 2641, | 2865, 2897, | 3089, | 3377, 3409, |
| | 765, | 2417, 2449, | 2673, 2705, | 2929, 2961, | 3121, | 3441, 3473, |
| | 1019, | 2481, 2513, | 2737, 2769, | 2993, 3025, | 3153, | 3505, 3537, |
| | 1273, | 14058, 14090, | 14346, 14378, | 14634, 14666, | 3185, | 14922, 14954, |
| | 1527, | 14122, 14154, | 14410, 14442, | 14698, 14730, | 3217, | 14986, 15018, |
| | 1781, | 14186, 14218, | 14474, 14506, | 14762, 14794, | 3249, | 15050, 15082, |
| | 2035 | 14250, 14282, | 14538, 14570, | 14826, 14858, | 3281 | 15114, 15146, |
| | | 14314 | 14602 | 14890 | | 15178 |
| 4 | 258, | 2290, 2322, | 2546, 2578, | 2802, 2834, | 3058, | 3314, 3346, |
| | 512, | 2354, 2386, | 2610, 2642, | 2866, 2898, | 3090, | 3378, 3410, |
| | 766, | 2418, 2450, | 2674, 2706, | 2930, 2962, | 3122, | 3442, 3474, |
| | 1020, | 2482, 2514, | 2738, 2770, | 2994, 3026, | 3154, | 3506, 3538, |
| | 1274, | 14059, 14091, | 14347, 14379, | 14635, 14667, | 3186, | 14923, 14955, |
| | 1528, | 14123, 14155, | 14411, 14443, | 14699, 14731, | 3218, | 14987, 15019, |
| | 1782, | 14187, 14219, | 14475, 14507, | 14763, 14795, | 3250, | 15051, 15083, |
| | 2036 | 14251, 14283, | 14539, 14571, | 14827, 14859, | 3282 | 15115, 15147, |
| | | 14315 | 14603 | 14891 | | 15179 |
| 5 | 259, | 2291, 2323, | 2547, 2579, | 2803, 2835, | 3059, | 3315, 3347, |
| | 513, | 2355, 2387, | 2611, 2643, | 2867, 2899, | 3091, | 3379, 3411, |
| | 767, | 2419, 2451, | 2675, 2707, | 2931, 2963, | 3123, | 3443, 3475, |
| | 1021, | 2483, 2515, | 2739, 2771, | 2995, 3027, | 3155, | 3507, 3539, |
| | 1275, | 14060, 14092, | 14348, 14380, | 14636, 14668, | 3187, | 14924, 14956, |
| | 1529, | 14124, 14156, | 14412, 14444, | 14700, 14732, | 3219, | 14988, 15020, |
| | 1783, | 14188, 14220, | 14476, 14508, | 14764, 14796, | 3251, | 15052, 15084, |
| | 2037 | 14252, 14284, | 14540, 14572, | 14828, 14860, | 3283 | 15116, 15148, |
| | | 14316 | 14604 | 14892 | | 15180 |
| 6 | 260, | 2292, 2324, | 2548, 2580, | 2804, 2836, | 3060, | 3316, 3348, |
| | 514, | 2356, 2388, | 2612, 2644, | 2868, 2900, | 3092, | 3380, 3412, |
| | 768, | 2420, 2452, | 2676, 2708, | 2932, 2964, | 3124, | 3444, 3476, |
| | 1022, | 2484, 2516, | 2740, 2772, | 2996, 3028, | 3156, | 3508, 3540, |
| | 1276, | 14061, 14093, | 14349, 14381, | 14637, 14669, | 3188, | 14925, 14957, |
| | 1530, | 14125, 14157, | 14413, 14445, | 14701, 14733, | 3220, | 14989, 15021, |
| | 1784, | 14189, 14221, | 14477, 14509, | 14765, 14797, | 3252, | 15053, 15085, |
| | 2038 | 14253, 14285, | 14541, 14573, | 14829, 14861, | 3284 | 15117, 15149, |
| | | 14317 | 14605 | 14893 | | 15181 |
| 7 | 261, | 2293, 2325, | 2549, 2581, | 2805, 2837, | 3061, | 3317, 3349, |
| | 515, | 2357, 2389, | 2613, 2645, | 2869, 2901, | 3093, | 3381, 3413, |
| | 769, | 2421, 2453, | 2677, 2709, | 2933, 2965, | 3125, | 3445, 3477, |
| | 1023, | 2485, 2517, | 2741, 2773, | 2997, 3029, | 3157, | 3509, 3541, |
| | 1277, | 14062, 14094, | 14350, 14382, | 14638, 14670, | 3189, | 14926, 14958, |
| | 1531, | 14126, 14158, | 14414, 14446, | 14702, 14734, | 3221, | 14990, 15022, |
| | 1785, | 14190, 14222, | 14478, 14510, | 14766, 14798, | 3253, | 15054, 15086, |
| | 2039 | 14254, 14286, | 14542, 14574, | 14830, 14862, | 3285 | 15118, 15150, |
| | | 14318 | 14606 | 14894 | | 15182 |
| 9 | 263, | 2294, 2326, | 2550, 2582, | 2806, 2838, | 3062, | 3318, 3350, |
| | 517, | 2358, 2390, | 2614, 2646, | 2870, 2902, | 3094, | 3382, 3414, |
| | 771, | 2422, 2454, | 2678, 2710, | 2934, 2966, | 3126, | 3446, 3478, |
| | 1025, | 2486, 2518, | 2742, 2774, | 2998, 3030, | 3158, | 3510, 3542, |
| | 1279, | 14063, 14095, | 14351, 14383, | 14639, 14671, | 3190, | 14927, 14959, |
| | 1533, | 14127, 14159, | 14415, 14447, | 14703, 14735, | 3222, | 14991, 15023, |
| | 1787, | 14191, 14223, | 14479, 14511, | 14767, 14799, | 3254, | 15055, 15087, |
| | 2041 | 14255, 14287, | 14543, 14575, | 14831, 14863, | 3286 | 15119, 15151, |
| | | 14319 | 14607 | 14895 | | 15183 |
| 10 | 264, | 2295, 2327, | 2551, 2583, | 2807, 2839, | 3063, | 3319, 3351, |
| | 518, | 2359, 2391, | 2615, 2647, | 2871, 2903, | 3095, | 3383, 3415, |
| | 772, | 2423, 2455, | 2679, 2711, | 2935, 2967, | 3127, | 3447, 3479, |
| | 1026, | 2487, 2519, | 2743, 2775, | 2999, 3031, | 3159, | 3511, 3543, |
| | 1280, | 14064, 14096, | 14352, 14384, | 14640, 14672, | 3191, | 14928, 14960, |
| | 1534, | 14128, 14160, | 14416, 14448, | 14704, 14736, | 3223, | 14992, 15024, |
| | 1788, | 14192, 14224, | 14480, 14512, | 14768, 14800, | 3255, | 15056, 15088, |
| | 2042 | 14256, 14288, | 14544, 14576, | 14832, 14864, | 3287 | 15120, 15152, |
| | | 14320 | 14608 | 14896 | | 15184 |
| 29 | 283, | 2296, 2328, | 2552, 2584, | 2808, 2840, | 3064, | 3320, 3352, |
| | 537, | 2360, 2392, | 2616, 2648, | 2872, 2904, | 3096, | 3384, 3416, |
| | 791, | 2424, 2456, | 2680, 2712, | 2936, 2968, | 3128, | 3448, 3480, |
| | 1045, | 2488, 2520, | 2744, 2776, | 3000, 3032, | 3160, | 3512, 3544, |
| | 1299, | 14065, 14097, | 14353, 14385, | 14641, 14673, | 3192, | 14929, 14961, |
| | 1553, | 14129, 14161, | 14417, 14449, | 14705, 14737, | 3224, | 14993, 15025, |
| | 1807, | 14193, 14225, | 14481, 14513, | 14769, 14801, | 3256, | 15057, 15089, |
| | 2061 | 14257, 14289, | 14545, 14577, | 14833, 14865, | 3288 | 15121, 15153, |
| | | 14321 | 14609 | 14897 | | 15185 |
| 50 | 304, | 2297, 2329, | 2553, 2585, | 2809, 2841, | 3065, | 3321, 3353, |
| | 558, | 2361, 2393, | 2617, 2649, | 2873, 2905, | 3097, | 3385, 3417, |
| | 812, | 2425, 2457, | 2681, 2713, | 2937, 2969, | 3129, | 3449, 3481, |
| | 1066, | 2489, 2521, | 2745, 2777, | 3001, 3033, | 3161, | 3513, 3545, |
| | 1320, | 14066, 14098, | 14354, 14386, | 14642, 14674, | 3193, | 14930, 14962, |
| | 1574, | 14130, 14162, | 14418, 14450, | 14706, 14738, | 3225, | 14994, 15026, |
| | 1828, | 14194, 14226, | 14482, 14514, | 14770, 14802, | 3257, | 15058, 15090, |
| | 2082 | 14258, 14290, | 14546, 14578, | 14834, 14866, | 3289 | 15122, 15154, |
| | | 14322 | 14610 | 14898 | | 15186 |
| 60 | 314, | 2298, 2330, | 2554, 2586, | 2810, 2842, | 3066, | 3322, 3354, |
| | 568, | 2362, 2394, | 2618, 2650, | 2874, 2906, | 3098, | 3386, 3418, |
| | 822, | 2426, 2458, | 2682, 2714, | 2938, 2970, | 3130, | 3450, 3482, |
| | 1076, | 2490, 2522, | 2746, 2778, | 3002, 3034, | 3162, | 3514, 3546, |
| | 1330, | 14067, 14099, | 14355, 14387, | 14643, 14675, | 3194, | 14931, 14963, |
| | 1584, | 14131, 14163, | 14419, 14451, | 14707, 14739, | 3226, | 14995, 15027, |
| | 1838, | 14195, 14227, | 14483, 14515, | 14771, 14803, | 3258, | 15059, 15091, |
| | 2092 | 14259, 14291, | 14547, 14579, | 14835, 14867, | 3290 | 15123, 15155, |
| | | 14323 | 14611 | 14899 | | 15187 |
| 61 | 315, | 2299, 2331, | 2555, 2587, | 2811, 2843, | 3067, | 3323, 3355, |
| | 569, | 2363, 2395, | 2619, 2651, | 2875, 2907, | 3099, | 3387, 3419, |
| | 823, | 2427, 2459, | 2683, 2715, | 2939, 2971, | 3131, | 3451, 3483, |
| | 1077, | 2491, 2523, | 2747, 2779, | 3003, 3035, | 3163, | 3515, 3547, |
| | 1331, | 14068, 14100, | 14356, 14388, | 14644, 14676, | 3195, | 14932, 14964, |
| | 1585, | 14132, 14164, | 14420, 14452, | 14708, 14740, | 3227, | 14996, 15028, |
| | 1839, | 14196, 14228, | 14484, 14516, | 14772, 14804, | 3259, | 15060, 15092, |
| | 2093 | 14260, 14292, | 14548, 14580, | 14836, 14868, | 3291 | 15124, 15156, |
| | | 14324 | 14612 | 14900 | | 15188 |
| 105 | 359, | 2300, 2332, | 2556, 2588, | 2812, 2844, | 3068, | 3324, 3356, |
| | 613, | 2364, 2396, | 2620, 2652, | 2876, 2908, | 3100, | 3388, 3420, |
| | 867, | 2428, 2460, | 2684, 2716, | 2940, 2972, | 3132, | 3452, 3484, |
| | 1121, | 2492, 2524, | 2748, 2780, | 3004, 3036, | 3164, | 3516, 3548, |
| | 1375, | 14069, 14101, | 14357, 14389, | 14645, 14677, | 3196, | 14933, 14965, |
| | 1629, | 14133, 14165, | 14421, 14453, | 14709, 14741, | 3228, | 14997, 15029, |
| | 1883, | 14197, 14229, | 14485, 14517, | 14773, 14805, | 3260, | 15061, 15093, |
| | 2137 | 14261, 14293, | 14549, 14581, | 14837, 14869, | 3292 | 15125, 15157, |
| | | 14325 | 14613 | 14901 | | 15189 |
| 112 | 366, | 2301, 2333, | 2557, 2589, | 2813, 2845, | 3069, | 3325, 3357, |
| | 620, | 2365, 2397, | 2621, 2653, | 2877, 2909, | 3101, | 3389, 3421, |
| | 874, | 2429, 2461, | 2685, 2717, | 2941, 2973, | 3133, | 3453, 3485, |
| | 1128, | 2493, 2525, | 2749, 2781, | 3005, 3037, | 3165, | 3517, 3549, |
| | 1382, | 14070, 14102, | 14358, 14390, | 14646, 14678, | 3197, | 14934, 14966, |
| | 1636, | 14134, 14166, | 14422, 14454, | 14710, 14742, | 3229, | 14998, 15030, |
| | 1890, | 14198, 14230, | 14486, 14518, | 14774, 14806, | 3261, | 15062, 15094, |
| | 2144 | 14262, 14294, | 14550, 14582, | 14838, 14870, | 3293 | 15126, 15158, |
| | | 14326 | 14614 | 14902 | | 15190 |
| 114 | 368, | 2302, 2334, | 2558, 2590, | 2814, 2846, | 3070, | 3326, 3358, |
| | 622, | 2366, 2398, | 2622, 2654, | 2878, 2910, | 3102, | 3390, 3422, |
| | 876, | 2430, 2462, | 2686, 2718, | 2942, 2974, | 3134, | 3454, 3486, |
| | 1130, | 2494, 2526, | 2750, 2782, | 3006, 3038, | 3166, | 3518, 3550, |
| | 1384, | 14071, 14103, | 14359, 14391, | 14647, 14679, | 3198, | 14935, 14967, |
| | 1638, | 14135, 14167, | 14423, 14455, | 14711, 14743, | 3230, | 14999, 15031, |
| | 1892, | 14199, 14231, | 14487, 14519, | 14775, 14807, | 3262, | 15063, 15095, |
| | 2146 | 14263, 14295, | 14551, 14583, | 14839, 14871, | 3294 | 15127, 15159, |
| | | 14327 | 14615 | 14903 | | 15191 |
| 123 | 377, | 2303, 2335, | 2559, 2591, | 2815, 2847, | 3071, | 3327, 3359, |
| | 631, | 2367, 2399, | 2623, 2655, | 2879, 2911, | 3103, | 3391, 3423, |
| | 885, | 2431, 2463, | 2687, 2719, | 2943, 2975, | 3135, | 3455, 3487, |
| | 1139, | 2495, 2527, | 2751, 2783, | 3007, 3039, | 3167, | 3519, 3551, |
| | 1393, | 14072, 14104, | 14360, 14392, | 14648, 14680, | 3199, | 14936, 14968, |
| | 1647, | 14136, 14168, | 14424, 14456, | 14712, 14744, | 3231, | 15000, 15032, |
| | 1901, | 14200, 14232, | 14488, 14520, | 14776, 14808, | 3263, | 15064, 15096, |
| | 2155 | 14264, 14296, | 14552, 14584, | 14840, 14872, | 3295 | 15128, 15160, |
| | | 14328 | 14616 | 14904 | | 15192 |
| 127 | 381, | 2304, 2336, | 2560, 2592, | 2816, 2848, | 3072, | 3328, 3360, |
| | 635, | 2368, 2400, | 2624, 2656, | 2880, 2912, | 3104, | 3392, 3424, |
| | 889, | 2432, 2464, | 2688, 2720, | 2944, 2976, | 3136, | 3456, 3488, |
| | 1143, | 2496, 2528, | 2752, 2784, | 3008, 3040, | 3168, | 3520, 3552, |
| | 1397, | 14073, 14105, | 14361, 14393, | 14649, 14681, | 3200, | 14937, 14969, |
| | 1651, | 14137, 14169, | 14425, 14457, | 14713, 14745, | 3232, | 15001, 15033, |
| | 1905, | 14201, 14233, | 14489, 14521, | 14777, 14809, | 3264, | 15065, 15097, |
| | 2159 | 14265, 14297, | 14553, 14585, | 14841, 14873, | 3296 | 15129, 15161, |
| | | 14329 | 14617 | 14905 | | 15193 |
| 131 | 385, | 2305, 2337, | 2561, 2593, | 2817, 2849, | 3073, | 3329, 3361, |
| | 639, | 2369, 2401, | 2625, 2657, | 2881, 2913, | 3105, | 3393, 3425, |
| | 893, | 2433, 2465, | 2689, 2721, | 2945, 2977, | 3137, | 3457, 3489, |
| | 1147, | 2497, 2529, | 2753, 2785, | 3009, 3041, | 3169, | 3521, 3553, |
| | 1401, | 14074, 14106, | 14362, 14394, | 14650, 14682, | 3201, | 14938, 14970, |
| | 1655, | 14138, 14170, | 14426, 14458, | 14714, 14746, | 3233, | 15002, 15034, |
| | 1909, | 14202, 14234, | 14490, 14522, | 14778, 14810, | 3265, | 15066, 15098, |
| | 2163 | 14266, 14298, | 14554, 14586, | 14842, 14874, | 3297 | 15130, 15162, |
| | | 14330 | 14618 | 14906 | | 15194 |
| 137 | 391, | 2306, 2338, | 2562, 2594, | 2818, 2850, | 3074, | 3330, 3362, |
| | 645, | 2370, 2402, | 2626, 2658, | 2882, 2914, | 3106, | 3394, 3426, |
| | 899, | 2434, 2466, | 2690, 2722, | 2946, 2978, | 3138, | 3458, 3490, |
| | 1153, | 2498, 2530, | 2754, 2786, | 3010, 3042, | 3170, | 3522, 3554, |
| | 1407, | 14075, 14107, | 14363, 14395, | 14651, 14683, | 3202, | 14939, 14971, |
| | 1661, | 14139, 14171, | 14427, 14459, | 14715, 14747, | 3234, | 15003, 15035, |
| | 1915, | 14203, 14235, | 14491, 14523, | 14779, 14811, | 3266, | 15067, 15099, |
| | 2169 | 14267, 14299, | 14555, 14587, | 14843, 14875, | 3298 | 15131, 15163, |
| | | 14331 | 14619 | 14907 | | 15195 |
| 138 | 392, | 2307, 2339, | 2563, 2595, | 2819, 2851, | 3075, | 3331, 3363, |
| | 646, | 2371, 2403, | 2627, 2659, | 2883, 2915, | 3107, | 3395, 3427, |
| | 900, | 2435, 2467, | 2691, 2723, | 2947, 2979, | 3139, | 3459, 3491, |
| | 1154, | 2499, 2531, | 2755, 2787, | 3011, 3043, | 3171, | 3523, 3555, |
| | 1408, | 14076, 14108, | 14364, 14396, | 14652, 14684, | 3203, | 14940, 14972, |
| | 1662, | 14140, 14172, | 14428, 14460, | 14716, 14748, | 3235, | 15004, 15036, |
| | 1916, | 14204, 14236, | 14492, 14524, | 14780, 14812, | 3267, | 15068, 15100, |
| | 2170 | 14268, 14300, | 14556, 14588, | 14844, 14876, | 3299 | 15132, 15164, |
| | | 14332 | 14620 | 14908 | | 15196 |
| 162 | 416, | 2308, 2340, | 2564, 2596, | 2820, 2852, | 3076, | 3332, 3364, |
| | 670, | 2372, 2404, | 2628, 2660, | 2884, 2916, | 3108, | 3396, 3428, |
| | 924, | 2436, 2468, | 2692, 2724, | 2948, 2980, | 3140, | 3460, 3492, |
| | 1178, | 2500, 2532, | 2756, 2788, | 3012, 3044, | 3172, | 3524, 3556, |
| | 1432, | 14077, 14109, | 14365, 14397, | 14653, 14685, | 3204, | 14941, 14973, |
| | 1686, | 14141, 14173, | 14429, 14461, | 14717, 14749, | 3236, | 15005, 15037, |
| | 1940, | 14205, 14237, | 14493, 14525, | 14781, 14813, | 3268, | 15069, 15101, |
| | 2194 | 14269, 14301, | 14557, 14589, | 14845, 14877, | 3300 | 15133, 15165, |
| | | 14333 | 14621 | 14909 | | 15197 |
| 167 | 421, | 2309, 2341, | 2565, 2597, | 2821, 2853, | 3077, | 3333, 3365, |
| | 675, | 2373, 2405, | 2629, 2661, | 2885, 2917, | 3109, | 3397, 3429, |
| | 929, | 2437, 2469, | 2693, 2725, | 2949, 2981, | 3141, | 3461, 3493, |
| | 1183, | 2501, 2533, | 2757, 2789, | 3013, 3045, | 3173, | 3525, 3557, |
| | 1437, | 14078, 14110, | 14366, 14398, | 14654, 14686, | 3205, | 14942, 14974, |
| | 1691, | 14142, 14174, | 14430, 14462, | 14718, 14750, | 3237, | 15006, 15038, |
| | 1945, | 14206, 14238, | 14494, 14526, | 14782, 14814, | 3269, | 15070, 15102, |
| | 2199 | 14270, 14302, | 14558, 14590, | 14846, 14878, | 3301 | 15134, 15166, |
| | | 14334 | 14622 | 14910 | | 15198 |
| 170 | 424, | 2310, 2342, | 2566, 2598, | 2822, 2854, | 3078, | 3334, 3366, |
| | 678, | 2374, 2406, | 2630, 2662, | 2886, 2918, | 3110, | 3398, 3430, |
| | 932, | 2438, 2470, | 2694, 2726, | 2950, 2982, | 3142, | 3462, 3494, |
| | 1186, | 2502, 2534, | 2758, 2790, | 3014, 3046, | 3174, | 3526, 3558, |
| | 1440, | 14079, 14111, | 14367, 14399, | 14655, 14687, | 3206, | 14943, 14975, |
| | 1694, | 14143, 14175, | 14431, 14463, | 14719, 14751, | 3238, | 15007, 15039, |
| | 1948, | 14207, 14239, | 14495, 14527, | 14783, 14815, | 3270, | 15071, 15103, |
| | 2202 | 14271, 14303, | 14559, 14591, | 14847, 14879, | 3302 | 15135, 15167, |
| | | 14335 | 14623 | 14911 | | 15199 |
| 209 | 463, | 2311, 2343, | 2567, 2599, | 2823, 2855, | 3079, | 3335, 3367, |
| | 717, | 2375, 2407, | 2631, 2663, | 2887, 2919, | 3111, | 3399, 3431, |
| | 971, | 2439, 2471, | 2695, 2727, | 2951, 2983, | 3143, | 3463, 3495, |
| | 1225, | 2503, 2535, | 2759, 2791, | 3015, 3047, | 3175, | 3527, 3559, |
| | 1479, | 14080, 14112, | 14368, 14400, | 14656, 14688, | 3207, | 14944, 14976, |
| | 1733, | 14144, 14176, | 14432, 14464, | 14720, 14752, | 3239, | 15008, 15040, |
| | 1987, | 14208, 14240, | 14496, 14528, | 14784, 14816, | 3271, | 15072, 15104, |
| | 2241 | 14272, 14304, | 14560, 14592, | 14848, 14880, | 3303 | 15136, 15168, |
| | | 14336 | 14624 | 14912 | | 15200 |
| 219 | 473, | 2312, 2344, | 2568, 2600, | 2824, 2856, | 3080, | 3336, 3368, |
| | 727, | 2376, 2408, | 2632, 2664, | 2888, 2920, | 3112, | 3400, 3432, |
| | 981, | 2440, 2472, | 2696, 2728, | 2952, 2984, | 3144, | 3464, 3496, |
| | 1235, | 2504, 2536, | 2760, 2792, | 3016, 3048, | 3176, | 3528, 3560, |
| | 1489, | 14081, 14113, | 14369, 14401, | 14657, 14689, | 3208, | 14945, 14977, |
| | 1743, | 14145, 14177, | 14433, 14465, | 14721, 14753, | 3240, | 15009, 15041, |
| | 1997, | 14209, 14241, | 14497, 14529, | 14785, 14817, | 3272, | 15073, 15105, |
| | 2251 | 14273, 14305, | 14561, 14593, | 14849, 14881, | 3304 | 15137, 15169, |
| | | 14337 | 14625 | 14913 | | 15201 |
| 224 | 478, | 2313, 2345, | 2569, 2601, | 2825, 2857, | 3081, | 3337, 3369, |
| | 732, | 2377, 2409, | 2633, 2665, | 2889, 2921, | 3113, | 3401, 3433, |
| | 986, | 2441, 2473, | 2697, 2729, | 2953, 2985, | 3145, | 3465, 3497, |
| | 1240, | 2505, 2537, | 2761, 2793, | 3017, 3049, | 3177, | 3529, 3561, |
| | 1494, | 14082, 14114, | 14370, 14402, | 14658, 14690, | 3209, | 14946, 14978, |
| | 1748, | 14146, 14178, | 14434, 14466, | 14722, 14754, | 3241, | 15010, 15042, |
| | 2002, | 14210, 14242, | 14498, 14530, | 14786, 14818, | 3273, | 15074, 15106, |
| | 2256 | 14274, 14306, | 14562, 14594, | 14850, 14882, | 3305 | 15138, 15170, |
| | | 14338 | 14626 | 14914 | | 15202 |
| 229 | 483, | 2314, 2346, | 2570, 2602, | 2826, 2858, | 3082, | 3338, 3370, |
| | 737, | 2378, 2410, | 2634, 2666, | 2890, 2922, | 3114, | 3402, 3434, |
| | 991, | 2442, 2474, | 2698, 2730, | 2954, 2986, | 3146, | 3466, 3498, |
| | 1245, | 2506, 2538, | 2762, 2794, | 3018, 3050, | 3178, | 3530, 3562, |
| | 1499, | 14083, 14115, | 14371, 14403, | 14659, 14691, | 3210, | 14947, 14979, |
| | 1753, | 14147, 14179, | 14435, 14467, | 14723, 14755, | 3242, | 15011, 15043, |
| | 2007, | 14211, 14243, | 14499, 14531, | 14787, 14819, | 3274, | 15075, 15107, |
| | 2261 | 14275, 14307, | 14563, 14595, | 14851, 14883, | 3306 | 15139, 15171, |
| | | 14339 | 14627 | 14915 | | 15203 |
| 235 | 489, | 2315, 2347, | 2571, 2603, | 2827, 2859, | 3083, | 3339, 3371, |
| | 743, | 2379, 2411, | 2635, 2667, | 2891, 2923, | 3115, | 3403, 3435, |
| | 997, | 2443, 2475, | 2699, 2731, | 2955, 2987, | 3147, | 3467, 3499, |
| | 1251, | 2507, 2539, | 2763, 2795, | 3019, 3051, | 3179, | 3531, 3563, |
| | 1505, | 14084, 14116, | 14372, 14404, | 14660, 14692, | 3211, | 14948, 14980, |
| | 1759, | 14148, 14180, | 14436, 14468, | 14724, 14756, | 3243, | 15012, 15044, |
| | 2013, | 14212, 14244, | 14500, 14532, | 14788, 14820, | 3275, | 15076, 15108, |
| | 2267 | 14276, 14308, | 14564, 14596, | 14852, 14884, | 3307 | 15140, 15172, |
| | | 14340 | 14628 | 14916 | | 15204 |
| 237 | 491, | 2316, 2348, | 2572, 2604, | 2828, 2860, | 3084, | 3340, 3372, |
| | 745, | 2380, 2412, | 2636, 2668, | 2892, 2924, | 3116, | 3404, 3436, |
| | 999, | 2444, 2476, | 2700, 2732, | 2956, 2988, | 3148, | 3468, 3500, |
| | 1253, | 2508, 2540, | 2764, 2796, | 3020, 3052, | 3180, | 3532, 3564, |
| | 1507, | 14085, 14117, | 14373, 14405, | 14661, 14693, | 3212, | 14949, 14981, |
| | 1761, | 14149, 14181, | 14437, 14469, | 14725, 14757, | 3244, | 15013, 15045, |
| | 2015, | 14213, 14245, | 14501, 14533, | 14789, 14821, | 3276, | 15077, 15109, |
| | 2269 | 14277, 14309, | 14565, 14597, | 14853, 14885, | 3308 | 15141, 15173, |
| | | 14341 | 14629 | 14917 | | 15205 |
| 239 | 493, | 2317, 2349, | 2573, 2605, | 2829, 2861, | 3085, | 3341, 3373, |
| | 747, | 2381, 2413, | 2637, 2669, | 2893, 2925, | 3117, | 3405, 3437, |
| | 1001, | 2445, 2477, | 2701, 2733, | 2957, 2989, | 3149, | 3469, 3501, |
| | 1255, | 2509, 2541, | 2765, 2797, | 3021, 3053, | 3181, | 3533, 3565, |
| | 1509, | 14086, 14118, | 14374, 14406, | 14662, 14694, | 3213, | 14950, 14982, |
| | 1763, | 14150, 14182, | 14438, 14470, | 14726, 14758, | 3245, | 15014, 15046, |
| | 2017, | 14214, 14246, | 14502, 14534, | 14790, 14822, | 3277, | 15078, 15110, |
| | 2271 | 14278, 14310, | 14566, 14598, | 14854, 14886, | 3309 | 15142, 15174, |
| | | 14342 | 14630 | 14918 | | 15206 |
| 245 | 499, | 2318, 2350, | 2574, 2606, | 2830, 2862, | 3086, | 3342, 3374, |
| | 753, | 2382, 2414, | 2638, 2670, | 2894, 2926, | 3118, | 3406, 3438, |
| | 1007, | 2446, 2478, | 2702, 2734, | 2958, 2990, | 3150, | 3470, 3502, |
| | 1261, | 2510, 2542, | 2766, 2798, | 3022, 3054, | 3182, | 3534, 3566, |
| | 1515, | 14087, 14119, | 14375, 14407, | 14663, 14695, | 3214, | 14951, 14983, |
| | 1769, | 14151, 14183, | 14439, 14471, | 14727, 14759, | 3246, | 15015, 15047, |
| | 2023, | 14215, 14247, | 14503, 14535, | 14791, 14823, | 3278, | 15079, 15111, |
| | 2277 | 14279, 14311, | 14567, 14599, | 14855, 14887, | 3310 | 15143, 15175, |
| | | 14343 | 14631 | 14919 | | 15207 |

TABLE 3.1
Preferred LASV prefusion-stabilized (GPCmut1) constructs

| | | RNA designs and SEQ ID NOs | | | | |
|---|---|---|---|---|---|---|
| PRT | CDS | a-1 | a-2 | b-4 | i-2 | i-3 |
| 3567 | 3821, | 6107, 6139, | 6395, 6427, | 6683, 6715, | 6971, | 7259, 7291, |
| | 4075, | 6171, 6203, | 6459, 6491, | 6747, 6779, | 7003, | 7323, 7355, |
| | 4329, | 6235, 6267, | 6523, 6555, | 6811, 6843, | 7035, | 7387, 7419, |
| | 4583, | 6299, 6331, | 6587, 6619, | 6875, 6907, | 7067, | 7451, 7483, |
| | 4837, | 6363, 15208, | 6651, 15592, | 6939, 15976, | 7099, | 7515, 16360, |
| | 5091, | 15240, 15272, | 15624, 15656, | 16008, 16040, | 7131, | 16392, 16424, |
| | 5345, | 15304, 15336, | 15688, 15720, | 16072, 16104, | 7163, | 16456, 16488, |
| | 5599, | 15368, 15400, | 15752, 15784, | 16136, 16168, | 7195, | 16520, 16552, |
| | 5853 | 15432, 15464, | 15816, 15848, | 16200, 16232, | 7227 | 16584, 16616, |
| | | 15496, 15528, | 15880, 15912, | 16264, 16296, | | 16648, 16680, |
| | | 15560 | 15944 | 16328 | | 16712 |
| 3568 | 3822, | 6108, 6140, | 6396, 6428, | 6684, 6716, | 6972, | 7260, 7292, |
| | 4076, | 6172, 6204, | 6460, 6492, | 6748, 6780, | 7004, | 7324, 7356, |
| | 4330, | 6236, 6268, | 6524, 6556, | 6812, 6844, | 7036, | 7388, 7420, |
| | 4584, | 6300, 6332, | 6588, 6620, | 6876, 6908, | 7068, | 7452, 7484, |
| | 4838, | 6364, 15209, | 6652, 15593, | 6940, 15977, | 7100, | 7516, 16361, |
| | 5092, | 15241, 15273, | 15625, 15657, | 16009, 16041, | 7132, | 16393, 16425, |
| | 5346, | 15305, 15337, | 15689, 15721, | 16073, 16105, | 7164, | 16457, 16489, |
| | 5600, | 15369, 15401, | 15753, 15785, | 16137, 16169, | 7196, | 16521, 16553, |
| | 5854 | 15433, 15465, | 15817, 15849, | 16201, 16233, | 7228 | 16585, 16617, |
| | | 15497, 15529, | 15881, 15913, | 16265, 16297, | | 16649, 16681, |
| | | 15561 | 15945 | 16329 | | 16713 |
| 3569 | 3823, | 6109, 6141, | 6397, 6429, | 6685, 6717, | 6973, | 7261, 7293, |
| | 4077, | 6173, 6205, | 6461, 6493, | 6749, 6781, | 7005, | 7325, 7357, |
| | 4331, | 6237, 6269, | 6525, 6557, | 6813, 6845, | 7037, | 7389, 7421, |
| | 4585, | 6301, 6333, | 6589, 6621, | 6877, 6909, | 7069, | 7453, 7485, |
| | 4839, | 6365, 15210, | 6653, 15594, | 6941, 15978, | 7101, | 7517, 16362, |
| | 5093, | 15242, 15274, | 15626, 15658, | 16010, 16042, | 7133, | 16394, 16426, |
| | 5347, | 15306, 15338, | 15690, 15722, | 16074, 16106, | 7165, | 16458, 16490, |
| | 5601, | 15370, 15402, | 15754, 15786, | 16138, 16170, | 7197, | 16522, 16554, |
| | 5855 | 15434, 15466, | 15818, 15850, | 16202, 16234, | 7229 | 16586, 16618, |
| | | 15498, 15530, | 15882, 15914, | 16266, 16298, | | 16650, 16682, |
| | | 15562 | 15946 | 16330 | | 16714 |
| 3570 | 3824, | 6110, 6142, | 6398, 6430, | 6686, 6718, | 6974, | 7262, 7294, |
| | 4078, | 6174, 6206, | 6462, 6494, | 6750, 6782, | 7006, | 7326, 7358, |
| | 4332, | 6238, 6270, | 6526, 6558, | 6814, 6846, | 7038, | 7390, 7422, |
| | 4586, | 6302, 6334, | 6590, 6622, | 6878, 6910, | 7070, | 7454, 7486, |
| | 4840, | 6366, 15211, | 6654, 15595, | 6942, 15979, | 7102, | 7518, 16363, |
| | 5094, | 15243, 15275, | 15627, 15659, | 16011, 16043, | 7134, | 16395, 16427, |
| | 5348, | 15307, 15339, | 15691, 15723, | 16075, 16107, | 7166, | 16459, 16491, |
| | 5602, | 15371, 15403, | 15755, 15787, | 16139, 16171, | 7198, | 16523, 16555, |
| | 5856 | 15435, 15467, | 15819, 15851, | 16203, 16235, | 7230 | 16587, 16619, |
| | | 15499, 15531, | 15883, 15915, | 16267, 16299, | | 16651, 16683, |
| | | 15563 | 15947 | 16331 | | 16715 |
| 3571 | 3825, | 6111, 6143, | 6399, 6431, | 6687, 6719, | 6975, | 7263, 7295, |
| | 4079, | 6175, 6207, | 6463, 6495, | 6751, 6783, | 7007, | 7327, 7359, |
| | 4333, | 6239, 6271, | 6527, 6559, | 6815, 6847, | 7039, | 7391, 7423, |
| | 4587, | 6303, 6335, | 6591, 6623, | 6879, 6911, | 7071, | 7455, 7487, |
| | 4841, | 6367, 15212, | 6655, 15596, | 6943, 15980, | 7103, | 7519, 16364, |
| | 5095, | 15244, 15276, | 15628, 15660, | 16012, 16044, | 7135, | 16396, 16428, |
| | 5349, | 15308, 15340, | 15692, 15724, | 16076, 16108, | 7167, | 16460, 16492, |
| | 5603, | 15372, 15404, | 15756, 15788, | 16140, 16172, | 7199, | 16524, 16556, |
| | 5857 | 15436, 15468, | 15820, 15852, | 16204, 16236, | 7231 | 16588, 16620, |
| | | 15500, 15532, | 15884, 15916, | 16268, 16300, | | 16652, 16684, |
| | | 15564 | 15948 | 16332 | | 16716 |
| 3572 | 3826, | 6112, 6144, | 6400, 6432, | 6688, 6720, | 6976, | 7264, 7296, |
| | 4080, | 6176, 6208, | 6464, 6496, | 6752, 6784, | 7008, | 7328, 7360, |
| | 4334, | 6240, 6272, | 6528, 6560, | 6816, 6848, | 7040, | 7392, 7424, |
| | 4588, | 6304, 6336, | 6592, 6624, | 6880, 6912, | 7072, | 7456, 7488, |
| | 4842, | 6368, 15213, | 6656, 15597, | 6944, 15981, | 7104, | 7520, 16365, |
| | 5096, | 15245, 15277, | 15629, 15661, | 16013, 16045, | 7136, | 16397, 16429, |
| | 5350, | 15309, 15341, | 15693, 15725, | 16077, 16109, | 7168, | 16461, 16493, |
| | 5604, | 15373, 15405, | 15757, 15789, | 16141, 16173, | 7200, | 16525, 16557, |
| | 5858 | 15437, 15469, | 15821, 15853, | 16205, 16237, | 7232 | 16589, 16621, |
| | | 15501, 15533, | 15885, 15917, | 16269, 16301, | | 16653, 16685, |
| | | 15565 | 15949 | 16333 | | 16717 |
| 3573 | 3827, | 6113, 6145, | 6401, 6433, | 6689, 6721, | 6977, | 7265, 7297, |
| | 4081, | 6177, 6209, | 6465, 6497, | 6753, 6785, | 7009, | 7329, 7361, |
| | 4335, | 6241, 6273, | 6529, 6561, | 6817, 6849, | 7041, | 7393, 7425, |
| | 4589, | 6305, 6337, | 6593, 6625, | 6881, 6913, | 7073, | 7457, 7489, |
| | 4843, | 6369, 15214, | 6657, 15598, | 6945, 15982, | 7105, | 7521, 16366, |
| | 5097, | 15246, 15278, | 15630, 15662, | 16014, 16046, | 7137, | 16398, 16430, |
| | 5351, | 15310, 15342, | 15694, 15726, | 16078, 16110, | 7169, | 16462, 16494, |
| | 5605, | 15374, 15406, | 15758, 15790, | 16142, 16174, | 7201, | 16526, 16558, |
| | 5859 | 15438, 15470, | 15822, 15854, | 16206, 16238, | 7233 | 16590, 16622, |
| | | 15502, 15534, | 15886, 15918, | 16270, 16302, | | 16654, 16686, |
| | | 15566 | 15950 | 16334 | | 16718 |
| 3575 | 3829, | 6114, 6146, | 6402, 6434, | 6690, 6722, | 6978, | 7266, 7298, |
| | 4083, | 6178, 6210, | 6466, 6498, | 6754, 6786, | 7010, | 7330, 7362, |
| | 4337, | 6242, 6274, | 6530, 6562, | 6818, 6850, | 7042, | 7394, 7426, |
| | 4591, | 6306, 6338, | 6594, 6626, | 6882, 6914, | 7074, | 7458, 7490, |
| | 4845, | 6370, 15215, | 6658, 15599, | 6946, 15983, | 7106, | 7522, 16367, |
| | 5099, | 15247, 15279, | 15631, 15663, | 16015, 16047, | 7138, | 16399, 16431, |
| | 5353, | 15311, 15343, | 15695, 15727, | 16079, 16111, | 7170, | 16463, 16495, |
| | 5607, | 15375, 15407, | 15759, 15791, | 16143, 16175, | 7202, | 16527, 16559, |
| | 5861 | 15439, 15471, | 15823, 15855, | 16207, 16239, | 7234 | 16591, 16623, |
| | | 15503, 15535, | 15887, 15919, | 16271, 16303, | | 16655, 16687, |
| | | 15567 | 15951 | 16335 | | 16719 |
| 3576 | 3830, | 6115, 6147, | 6403, 6435, | 6691, 6723, | 6979, | 7267, 7299, |
| | 4084, | 6179, 6211, | 6467, 6499, | 6755, 6787, | 7011, | 7331, 7363, |
| | 4338, | 6243, 6275, | 6531, 6563, | 6819, 6851, | 7043, | 7395, 7427, |
| | 4592, | 6307, 6339, | 6595, 6627, | 6883, 6915, | 7075, | 7459, 7491, |
| | 4846, | 6371, 15216, | 6659, 15600, | 6947, 15984, | 7107, | 7523, 16368, |
| | 5100, | 15248, 15280, | 15632, 15664, | 16016, 16048, | 7139, | 16400, 16432, |
| | 5354, | 15312, 15344, | 15696, 15728, | 16080, 16112, | 7171, | 16464, 16496, |
| | 5608, | 15376, 15408, | 15760, 15792, | 16144, 16176, | 7203, | 16528, 16560, |
| | 5862 | 15440, 15472, | 15824, 15856, | 16208, 16240, | 7235 | 16592, 16624, |
| | | 15504, 15536, | 15888, 15920, | 16272, 16304, | | 16656, 16688, |
| | | 15568 | 15952 | 16336 | | 16720 |
| 3595 | 3849, | 6116, 6148, | 6404, 6436, | 6692, 6724, | 6980, | 7268, 7300, |
| | 4103, | 6180, 6212, | 6468, 6500, | 6756, 6788, | 7012, | 7332, 7364, |
| | 4357, | 6244, 6276, | 6532, 6564, | 6820, 6852, | 7044, | 7396, 7428, |
| | 4611, | 6308, 6340, | 6596, 6628, | 6884, 6916, | 7076, | 7460, 7492, |
| | 4865, | 6372, 15217, | 6660, 15601, | 6948, 15985, | 7108, | 7524, 16369, |
| | 5119, | 15249, 15281, | 15633, 15665, | 16017, 16049, | 7140, | 16401, 16433, |
| | 5373, | 15313, 15345, | 15697, 15729, | 16081, 16113, | 7172, | 16465, 16497, |
| | 5627, | 15377, 15409, | 15761, 15793, | 16145, 16177, | 7204, | 16529, 16561, |
| | 5881 | 15441, 15473, | 15825, 15857, | 16209, 16241, | 7236 | 16593, 16625, |
| | | 15505, 15537, | 15889, 15921, | 16273, 16305, | | 16657, 16689, |
| | | 15569 | 15953 | 16337 | | 16721 |
| 3616 | 3870, | 6117, 6149, | 6405, 6437, | 6693, 6725, | 6981, | 7269, 7301, |
| | 4124, | 6181, 6213, | 6469, 6501, | 6757, 6789, | 7013, | 7333, 7365, |
| | 4378, | 6245, 6277, | 6533, 6565, | 6821, 6853, | 7045, | 7397, 7429, |
| | 4632, | 6309, 6341, | 6597, 6629, | 6885, 6917, | 7077, | 7461, 7493, |
| | 4886, | 6373, 15218, | 6661, 15602, | 6949, 15986, | 7109, | 7525, 16370, |
| | 5140, | 15250, 15282, | 15634, 15666, | 16018, 16050, | 7141, | 16402, 16434, |
| | 5394, | 15314, 15346, | 15698, 15730, | 16082, 16114, | 7173, | 16466, 16498, |
| | 5648, | 15378, 15410, | 15762, 15794, | 16146, 16178, | 7205, | 16530, 16562, |
| | 5902 | 15442, 15474, | 15826, 15858, | 16210, 16242, | 7237 | 16594, 16626, |
| | | 15506, 15538, | 15890, 15922, | 16274, 16306, | | 16658, 16690, |
| | | 15570 | 15954 | 16338 | | 16722 |
| 3626 | 3880, | 6118, 6150, | 6406, 6438, | 6694, 6726, | 6982, | 7270, 7302, |
| | 4134, | 6182, 6214, | 6470, 6502, | 6758, 6790, | 7014, | 7334, 7366, |
| | 4388, | 6246, 6278, | 6534, 6566, | 6822, 6854, | 7046, | 7398, 7430, |
| | 4642, | 6310, 6342, | 6598, 6630, | 6886, 6918, | 7078, | 7462, 7494, |
| | 4896, | 6374, 15219, | 6662, 15603, | 6950, 15987, | 7110, | 7526, 16371, |
| | 5150, | 15251, 15283, | 15635, 15667, | 16019, 16051, | 7142, | 16403, 16435, |
| | 5404, | 15315, 15347, | 15699, 15731, | 16083, 16115, | 7174, | 16467, 16499, |
| | 5658, | 15379, 15411, | 15763, 15795, | 16147, 16179, | 7206, | 16531, 16563, |
| | 5912 | 15443, 15475, | 15827, 15859, | 16211, 16243, | 7238 | 16595, 16627, |
| | | 15507, 15539, | 15891, 15923, | 16275, 16307, | | 16659, 16691, |
| | | 15571 | 15955 | 16339 | | 16723 |
| 3627 | 3881, | 6119, 6151, | 6407, 6439, | 6695, 6727, | 6983, | 7271, 7303, |
| | 4135, | 6183, 6215, | 6471, 6503, | 6759, 6791, | 7015, | 7335, 7367, |
| | 4389, | 6247, 6279, | 6535, 6567, | 6823, 6855, | 7047, | 7399, 7431, |
| | 4643, | 6311, 6343, | 6599, 6631, | 6887, 6919, | 7079, | 7463, 7495, |
| | 4897, | 6375, 15220, | 6663, 15604, | 6951, 15988, | 7111, | 7527, 16372, |
| | 5151, | 15252, 15284, | 15636, 15668, | 16020, 16052, | 7143, | 16404, 16436, |
| | 5405, | 15316, 15348, | 15700, 15732, | 16084, 16116, | 7175, | 16468, 16500, |
| | 5659, | 15380, 15412, | 15764, 15796, | 16148, 16180, | 7207, | 16532, 16564, |
| | 5913 | 15444, 15476, | 15828, 15860, | 16212, 16244, | 7239 | 16596, 16628, |
| | | 15508, 15540, | 15892, 15924, | 16276, 16308, | | 16660, 16692, |
| | | 15572 | 15956 | 16340 | | 16724 |
| 3671 | 3925, | 6120, 6152, | 6408, 6440, | 6696, 6728, | 6984, | 7272, 7304, |
| | 4179, | 6184, 6216, | 6472, 6504, | 6760, 6792, | 7016, | 7336, 7368, |
| | 4433, | 6248, 6280, | 6536, 6568, | 6824, 6856, | 7048, | 7400, 7432, |
| | 4687, | 6312, 6344, | 6600, 6632, | 6888, 6920, | 7080, | 7464, 7496, |
| | 4941, | 6376, 15221, | 6664, 15605, | 6952, 15989, | 7112, | 7528, 16373, |
| | 5195, | 15253, 15285, | 15637, 15669, | 16021, 16053, | 7144, | 16405, 16437, |
| | 5449, | 15317, 15349, | 15701, 15733, | 16085, 16117, | 7176, | 16469, 16501, |
| | 5703, | 15381, 15413, | 15765, 15797, | 16149, 16181, | 7208, | 16533, 16565, |
| | 5957 | 15445, 15477, | 15829, 15861, | 16213, 16245, | 7240 | 16597, 16629, |
| | | 15509, 15541, | 15893, 15925, | 16277, 16309, | | 16661, 16693, |
| | | 15573 | 15957 | 16341 | | 16725 |
| 3678 | 3932, | 6121, 6153, | 6409, 6441, | 6697, 6729, | 6985, | 7273, 7305, |
| | 4186, | 6185, 6217, | 6473, 6505, | 6761, 6793, | 7017, | 7337, 7369, |
| | 4440, | 6249, 6281, | 6537, 6569, | 6825, 6857, | 7049, | 7401, 7433, |
| | 4694, | 6313, 6345, | 6601, 6633, | 6889, 6921, | 7081, | 7465, 7497, |
| | 4948, | 6377, 15222, | 6665, 15606, | 6953, 15990, | 7113, | 7529, 16374, |
| | 5202, | 15254, 15286, | 15638, 15670, | 16022, 16054, | 7145, | 16406, 16438, |
| | 5456, | 15318, 15350, | 15702, 15734, | 16086, 16118, | 7177, | 16470, 16502, |
| | 5710, | 15382, 15414, | 15766, 15798, | 16150, 16182, | 7209, | 16534, 16566, |
| | 5964 | 15446, 15478, | 15830, 15862, | 16214, 16246, | 7241 | 16598, 16630, |
| | | 15510, 15542, | 15894, 15926, | 16278, 16310, | | 16662, 16694, |
| | | 15574 | 15958 | 16342 | | 16726 |
| 3680 | 3934, | 6122, 6154, | 6410, 6442, | 6698, 6730, | 6986, | 7274, 7306, |
| | 4188, | 6186, 6218, | 6474, 6506, | 6762, 6794, | 7018, | 7338, 7370, |
| | 4442, | 6250, 6282, | 6538, 6570, | 6826, 6858, | 7050, | 7402, 7434, |
| | 4696, | 6314, 6346, | 6602, 6634, | 6890, 6922, | 7082, | 7466, 7498, |
| | 4950, | 6378, 15223, | 6666, 15607, | 6954, 15991, | 7114, | 7530, 16375, |
| | 5204, | 15255, 15287, | 15639, 15671, | 16023, 16055, | 7146, | 16407, 16439, |
| | 5458, | 15319, 15351, | 15703, 15735, | 16087, 16119, | 7178, | 16471, 16503, |
| | 5712, | 15383, 15415, | 15767, 15799, | 16151, 16183, | 7210, | 16535, 16567, |
| | 5966 | 15447, 15479, | 15831, 15863, | 16215, 16247, | 7242 | 16599, 16631, |
| | | 15511, 15543, | 15895, 15927, | 16279, 16311, | | 16663, 16695, |
| | | 15575 | 15959 | 16343 | | 16727 |
| 3689 | 3943, | 6123, 6155, | 6411, 6443, | 6699, 6731, | 6987, | 7275, 7307, |
| | 4197, | 6187, 6219, | 6475, 6507, | 6763, 6795, | 7019, | 7339, 7371, |
| | 4451, | 6251, 6283, | 6539, 6571, | 6827, 6859, | 7051, | 7403, 7435, |
| | 4705, | 6315, 6347, | 6603, 6635, | 6891, 6923, | 7083, | 7467, 7499, |
| | 4959, | 6379, 15224, | 6667, 15608, | 6955, 15992, | 7115, | 7531, 16376, |
| | 5213, | 15256, 15288, | 15640, 15672, | 16024, 16056, | 7147, | 16408, 16440, |
| | 5467, | 15320, 15352, | 15704, 15736, | 16088, 16120, | 7179, | 16472, 16504, |
| | 5721, | 15384, 15416, | 15768, 15800, | 16152, 16184, | 7211, | 16536, 16568, |
| | 5975 | 15448, 15480, | 15832, 15864, | 16216, 16248, | 7243 | 16600, 16632, |
| | | 15512, 15544, | 15896, 15928, | 16280, 16312, | | 16664, 16696, |
| | | 15576 | 15960 | 16344 | | 16728 |
| 3693 | 3947, | 6124, 6156, | 6412, 6444, | 6700, 6732, | 6988, | 7276, 7308, |
| | 4201, | 6188, 6220, | 6476, 6508, | 6764, 6796, | 7020, | 7340, 7372, |
| | 4455, | 6252, 6284, | 6540, 6572, | 6828, 6860, | 7052, | 7404, 7436, |
| | 4709, | 6316, 6348, | 6604, 6636, | 6892, 6924, | 7084, | 7468, 7500, |
| | 4963, | 6380, 15225, | 6668, 15609, | 6956, 15993, | 7116, | 7532, 16377, |
| | 5217, | 15257, 15289, | 15641, 15673, | 16025, 16057, | 7148, | 16409, 16441, |
| | 5471, | 15321, 15353, | 15705, 15737, | 16089, 16121, | 7180, | 16473, 16505, |
| | 5725, | 15385, 15417, | 15769, 15801, | 16153, 16185, | 7212, | 16537, 16569, |
| | 5979 | 15449, 15481, | 15833, 15865, | 16217, 16249, | 7244 | 16601, 16633, |
| | | 15513, 15545, | 15897, 15929, | 16281, 16313, | | 16665, 16697, |
| | | 15577 | 15961 | 16345 | | 16729 |
| 3697 | 3951, | 6125, 6157, | 6413, 6445, | 6701, 6733, | 6989, | 7277, 7309, |
| | 4205, | 6189, 6221, | 6477, 6509, | 6765, 6797, | 7021, | 7341, 7373, |
| | 4459, | 6253, 6285, | 6541, 6573, | 6829, 6861, | 7053, | 7405, 7437, |
| | 4713, | 6317, 6349, | 6605, 6637, | 6893, 6925, | 7085, | 7469, 7501, |
| | 4967, | 6381, 15226, | 6669, 15610, | 6957, 15994, | 7117, | 7533, 16378, |
| | 5221, | 15258, 15290, | 15642, 15674, | 16026, 16058, | 7149, | 16410, 16442, |
| | 5475, | 15322, 15354, | 15706, 15738, | 16090, 16122, | 7181, | 16474, 16506, |
| | 5729, | 15386, 15418, | 15770, 15802, | 16154, 16186, | 7213, | 16538, 16570, |
| | 5983 | 15450, 15482, | 15834, 15866, | 16218, 16250, | 7245 | 16602, 16634, |
| | | 15514, 15546, | 15898, 15930, | 16282, 16314, | | 16666, 16698, |
| | | 15578 | 15962 | 16346 | | 16730 |
| 3703 | 3957, | 6126, 6158, | 6414, 6446, | 6702, 6734, | 6990, | 7278, 7310, |
| | 4211, | 6190, 6222, | 6478, 6510, | 6766, 6798, | 7022, | 7342, 7374, |
| | 4465, | 6254, 6286, | 6542, 6574, | 6830, 6862, | 7054, | 7406, 7438, |
| | 4719, | 6318, 6350, | 6606, 6638, | 6894, 6926, | 7086, | 7470, 7502, |
| | 4973, | 6382, 15227, | 6670, 15611, | 6958, 15995, | 7118, | 7534, 16379, |
| | 5227, | 15259, 15291, | 15643, 15675, | 16027, 16059, | 7150, | 16411, 16443, |
| | 5481, | 15323, 15355, | 15707, 15739, | 16091, 16123, | 7182, | 16475, 16507, |
| | 5735, | 15387, 15419, | 15771, 15803, | 16155, 16187, | 7214, | 16539, 16571, |
| | 5989 | 15451, 15483, | 15835, 15867, | 16219, 16251, | 7246 | 16603, 16635, |
| | | 15515, 15547, | 15899, 15931, | 16283, 16315, | | 16667, 16699, |
| | | 15579 | 15963 | 16347 | | 16731 |
| 3704 | 3958, | 6127, 6159, | 6415, 6447, | 6703, 6735, | 6991, | 7279, 7311, |
| | 4212, | 6191, 6223, | 6479, 6511, | 6767, 6799, | 7023, | 7343, 7375, |
| | 4466, | 6255, 6287, | 6543, 6575, | 6831, 6863, | 7055, | 7407, 7439, |
| | 4720, | 6319, 6351, | 6607, 6639, | 6895, 6927, | 7087, | 7471, 7503, |
| | 4974, | 6383, 15228, | 6671, 15612, | 6959, 15996, | 7119, | 7535, 16380, |
| | 5228, | 15260, 15292, | 15644, 15676, | 16028, 16060, | 7151, | 16412, 16444, |
| | 5482, | 15324, 15356, | 15708, 15740, | 16092, 16124, | 7183, | 16476, 16508, |
| | 5736, | 15388, 15420, | 15772, 15804, | 16156, 16188, | 7215, | 16540, 16572, |
| | 5990 | 15452, 15484, | 15836, 15868, | 16220, 16252, | 7247 | 16604, 16636, |
| | | 15516, 15548, | 15900, 15932, | 16284, 16316, | | 16668, 16700, |
| | | 15580 | 15964 | 16348 | | 16732 |
| 3728 | 3982, | 6128, 6160, | 6416, 6448, | 6704, 6736, | 6992, | 7280, 7312, |
| | 4236, | 6192, 6224, | 6480, 6512, | 6768, 6800, | 7024, | 7344, 7376, |
| | 4490, | 6256, 6288, | 6544, 6576, | 6832, 6864, | 7056, | 7408, 7440, |
| | 4744, | 6320, 6352, | 6608, 6640, | 6896, 6928, | 7088, | 7472, 7504, |
| | 4998, | 6384, 15229, | 6672, 15613, | 6960, 15997, | 7120, | 7536, 16381, |
| | 5252, | 15261, 15293, | 15645, 15677, | 16029, 16061, | 7152, | 16413, 16445, |
| | 5506, | 15325, 15357, | 15709, 15741, | 16093, 16125, | 7184, | 16477, 16509, |
| | 5760, | 15389, 15421, | 15773, 15805, | 16157, 16189, | 7216, | 16541, 16573, |
| | 6014 | 15453, 15485, | 15837, 15869, | 16221, 16253, | 7248 | 16605, 16637, |
| | | 15517, 15549, | 15901, 15933, | 16285, 16317, | | 16669, 16701, |
| | | 15581 | 15965 | 16349 | | 16733 |
| 3733 | 3987, | 6129, 6161, | 6417, 6449, | 6705, 6737, | 6993, | 7281, 7313, |
| | 4241, | 6193, 6225, | 6481, 6513, | 6769, 6801, | 7025, | 7345, 7377, |
| | 4495, | 6257, 6289, | 6545, 6577, | 6833, 6865, | 7057, | 7409, 7441, |
| | 4749, | 6321, 6353, | 6609, 6641, | 6897, 6929, | 7089, | 7473, 7505, |
| | 5003, | 6385, 15230, | 6673, 15614, | 6961, 15998, | 7121, | 7537, 16382, |
| | 5257, | 15262, 15294, | 15646, 15678, | 16030, 16062, | 7153, | 16414, 16446, |
| | 5511, | 15326, 15358, | 15710, 15742, | 16094, 16126, | 7185, | 16478, 16510, |
| | 5765, | 15390, 15422, | 15774, 15806, | 16158, 16190, | 7217, | 16542, 16574, |
| | 6019 | 15454, 15486, | 15838, 15870, | 16222, 16254, | 7249 | 16606, 16638, |
| | | 15518, 15550, | 15902, 15934, | 16286, 16318, | | 16670, 16702, |
| | | 15582 | 15966 | 16350 | | 16734 |
| 3736 | 3990, | 6130, 6162, | 6418, 6450, | 6706, 6738, | 6994, | 7282, 7314, |
| | 4244, | 6194, 6226, | 6482, 6514, | 6770, 6802, | 7026, | 7346, 7378, |
| | 4498, | 6258, 6290, | 6546, 6578, | 6834, 6866, | 7058, | 7410, 7442, |
| | 4752, | 6322, 6354, | 6610, 6642, | 6898, 6930, | 7090, | 7474, 7506, |
| | 5006, | 6386, 15231, | 6674, 15615, | 6962, 15999, | 7122, | 7538, 16383, |
| | 5260, | 15263, 15295, | 15647, 15679, | 16031, 16063, | 7154, | 16415, 16447, |
| | 5514, | 15327, 15359, | 15711, 15743, | 16095, 16127, | 7186, | 16479, 16511, |
| | 5768, | 15391, 15423, | 15775, 15807, | 16159, 16191, | 7218, | 16543, 16575, |
| | 6022 | 15455, 15487, | 15839, 15871, | 16223, 16255, | 7250 | 16607, 16639, |
| | | 15519, 15551, | 15903, 15935, | 16287, 16319, | | 16671, 16703, |
| | | 15583 | 15967 | 16351 | | 16735 |
| 3775 | 4029, | 6131, 6163, | 6419, 6451, | 6707, 6739, | 6995, | 7283, 7315, |
| | 4283, | 6195, 6227, | 6483, 6515, | 6771, 6803, | 7027, | 7347, 7379, |
| | 4537, | 6259, 6291, | 6547, 6579, | 6835, 6867, | 7059, | 7411, 7443, |
| | 4791, | 6323, 6355, | 6611, 6643, | 6899, 6931, | 7091, | 7475, 7507, |
| | 5045, | 6387, 15232, | 6675, 15616, | 6963, 16000, | 7123, | 7539, 16384, |
| | 5299, | 15264, 15296, | 15648, 15680, | 16032, 16064, | 7155, | 16416, 16448, |
| | 5553, | 15328, 15360, | 15712, 15744, | 16096, 16128, | 7187, | 16480, 16512, |
| | 5807, | 15392, 15424, | 15776, 15808, | 16160, 16192, | 7219, | 16544, 16576, |
| | 6061 | 15456, 15488, | 15840, 15872, | 16224, 16256, | 7251 | 16608, 16640, |
| | | 15520, 15552, | 15904, 15936, | 16288, 16320, | | 16672, 16704, |
| | | 15584 | 15968 | 16352 | | 16736 |
| 3785 | 4039, | 6132, 6164, | 6420, 6452, | 6708, 6740, | 6996, | 7284, 7316, |
| | 4293, | 6196, 6228, | 6484, 6516, | 6772, 6804, | 7028, | 7348, 7380, |
| | 4547, | 6260, 6292, | 6548, 6580, | 6836, 6868, | 7060, | 7412, 7444, |
| | 4801, | 6324, 6356, | 6612, 6644, | 6900, 6932, | 7092, | 7476, 7508, |
| | 5055, | 6388, 15233, | 6676, 15617, | 6964, 16001, | 7124, | 7540, 16385, |
| | 5309, | 15265, 15297, | 15649, 15681, | 16033, 16065, | 7156, | 16417, 16449, |
| | 5563, | 15329, 15361, | 15713, 15745, | 16097, 16129, | 7188, | 16481, 16513, |
| | 5817, | 15393, 15425, | 15777, 15809, | 16161, 16193, | 7220, | 16545, 16577, |
| | 6071 | 15457, 15489, | 15841, 15873, | 16225, 16257, | 7252 | 16609, 16641, |
| | | 15521, 15553, | 15905, 15937, | 16289, 16321, | | 16673, 16705, |
| | | 15585 | 15969 | 16353 | | 16737 |
| 3790 | 4044, | 6133, 6165, | 6421, 6453, | 6709, 6741, | 6997, | 7285, 7317, |
| | 4298, | 6197, 6229, | 6485, 6517, | 6773, 6805, | 7029, | 7349, 7381, |
| | 4552, | 6261, 6293, | 6549, 6581, | 6837, 6869, | 7061, | 7413, 7445, |
| | 4806, | 6325, 6357, | 6613, 6645, | 6901, 6933, | 7093, | 7477, 7509, |
| | 5060, | 6389, 15234, | 6677, 15618, | 6965, 16002, | 7125, | 7541, 16386, |
| | 5314, | 15266, 15298, | 15650, 15682, | 16034, 16066, | 7157, | 16418, 16450, |
| | 5568, | 15330, 15362, | 15714, 15746, | 16098, 16130, | 7189, | 16482, 16514, |
| | 5822, | 15394, 15426, | 15778, 15810, | 16162, 16194, | 7221, | 16546, 16578, |
| | 6076 | 15458, 15490, | 15842, 15874, | 16226, 16258, | 7253 | 16610, 16642, |
| | | 15522, 15554, | 15906, 15938, | 16290, 16322, | | 16674, 16706, |
| | | 15586 | 15970 | 16354 | | 16738 |
| 3795 | 4049, | 6134, 6166, | 6422, 6454, | 6710, 6742, | 6998, | 7286, 7318, |
| | 4303, | 6198, 6230, | 6486, 6518, | 6774, 6806, | 7030, | 7350, 7382, |
| | 4557, | 6262, 6294, | 6550, 6582, | 6838, 6870, | 7062, | 7414, 7446, |
| | 4811, | 6326, 6358, | 6614, 6646, | 6902, 6934, | 7094, | 7478, 7510, |
| | 5065, | 6390, 15235, | 6678, 15619, | 6966, 16003, | 7126, | 7542, 16387, |
| | 5319, | 15267, 15299, | 15651, 15683, | 16035, 16067, | 7158, | 16419, 16451, |
| | 5573, | 15331, 15363, | 15715, 15747, | 16099, 16131, | 7190, | 16483, 16515, |
| | 5827, | 15395, 15427, | 15779, 15811, | 16163, 16195, | 7222, | 16547, 16579, |
| | 6081 | 15459, 15491, | 15843, 15875, | 16227, 16259, | 7254 | 16611, 16643, |
| | | 15523, 15555, | 15907, 15939, | 16291, 16323, | | 16675, 16707, |
| | | 15587 | 15971 | 16355 | | 16739 |
| 3801 | 4055, | 6135, 6167, | 6423, 6455, | 6711, 6743, | 6999, | 7287, 7319, |
| | 4309, | 6199, 6231, | 6487, 6519, | 6775, 6807, | 7031, | 7351, 7383, |
| | 4563, | 6263, 6295, | 6551, 6583, | 6839, 6871, | 7063, | 7415, 7447, |
| | 4817, | 6327, 6359, | 6615, 6647, | 6903, 6935, | 7095, | 7479, 7511, |
| | 5071, | 6391, 15236, | 6679, 15620, | 6967, 16004, | 7127, | 7543, 16388, |
| | 5325, | 15268, 15300, | 15652, 15684, | 16036, 16068, | 7159, | 16420, 16452, |
| | 5579, | 15332, 15364, | 15716, 15748, | 16100, 16132, | 7191, | 16484, 16516, |
| | 5833, | 15396, 15428, | 15780, 15812, | 16164, 16196, | 7223, | 16548, 16580, |
| | 6087 | 15460, 15492, | 15844, 15876, | 16228, 16260, | 7255 | 16612, 16644, |
| | | 15524, 15556, | 15908, 15940, | 16292, 16324, | | 16676, 16708, |
| | | 15588 | 15972 | 16356 | | 16740 |
| 3803 | 4057, | 6136, 6168, | 6424, 6456, | 6712, 6744, | 7000, | 7288, 7320, |
| | 4311, | 6200, 6232, | 6488, 6520, | 6776, 6808, | 7032, | 7352, 7384, |
| | 4565, | 6264, 6296, | 6552, 6584, | 6840, 6872, | 7064, | 7416, 7448, |
| | 4819, | 6328, 6360, | 6616, 6648, | 6904, 6936, | 7096, | 7480, 7512, |
| | 5073, | 6392, 15237, | 6680, 15621, | 6968, 16005, | 7128, | 7544, 16389, |
| | 5327, | 15269, 15301, | 15653, 15685, | 16037, 16069, | 7160, | 16421, 16453, |
| | 5581, | 15333, 15365, | 15717, 15749, | 16101, 16133, | 7192, | 16485, 16517, |
| | 5835, | 15397, 15429, | 15781, 15813, | 16165, 16197, | 7224, | 16549, 16581, |
| | 6089 | 15461, 15493, | 15845, 15877, | 16229, 16261, | 7256 | 16613, 16645, |
| | | 15525, 15557, | 15909, 15941, | 16293, 16325, | | 16677, 16709, |
| | | 15589 | 15973 | 16357 | | 16741 |
| 3805 | 4059, | 6137, 6169, | 6425, 6457, | 6713, 6745, | 7001, | 7289, 7321, |
| | 4313, | 6201, 6233, | 6489, 6521, | 6777, 6809, | 7033, | 7353, 7385, |
| | 4567, | 6265, 6297, | 6553, 6585, | 6841, 6873, | 7065, | 7417, 7449, |
| | 4821, | 6329, 6361, | 6617, 6649, | 6905, 6937, | 7097, | 7481, 7513, |
| | 5075, | 6393, 15238, | 6681, 15622, | 6969, 16006, | 7129, | 7545, 16390, |
| | 5329, | 15270, 15302, | 15654, 15686, | 16038, 16070, | 7161, | 16422, 16454, |
| | 5583, | 15334, 15366, | 15718, 15750, | 16102, 16134, | 7193, | 16486, 16518, |
| | 5837, | 15398, 15430, | 15782, 15814, | 16166, 16198, | 7225, | 16550, 16582, |
| | 6091 | 15462, 15494, | 15846, 15878, | 16230, 16262, | 7257 | 16614, 16646, |
| | | 15526, 15558, | 15910, 15942, | 16294, 16326, | | 16678, 16710, |
| | | 15590 | 15974 | 16358 | | 16742 |
| 3811 | 4065, | 6138, 6170, | 6426, 6458, | 6714, 6746, | 7002, | 7290, 7322, |
| | 4319, | 6202, 6234, | 6490, 6522, | 6778, 6810, | 7034, | 7354, 7386, |
| | 4573, | 6266, 6298, | 6554, 6586, | 6842, 6874, | 7066, | 7418, 7450, |
| | 4827, | 6330, 6362, | 6618, 6650, | 6906, 6938, | 7098, | 7482, 7514, |
| | 5081, | 6394, 15239, | 6682, 15623, | 6970, 16007, | 7130, | 7546, 16391, |
| | 5335, | 15271, 15303, | 15655, 15687, | 16039, 16071, | 7162, | 16423, 16455, |
| | 5589, | 15335, 15367, | 15719, 15751, | 16103, 16135, | 7194, | 16487, 16519, |
| | 5843, | 15399, 15431, | 15783, 15815, | 16167, 16199, | 7226, | 16551, 16583, |
| | 6097 | 15463, 15495, | 15847, 15879, | 16231, 16263, | 7258 | 16615, 16647, |
| | | 15527, 15559, | 15911, 15943, | 16295, 16327, | | 16679, 16711, |
| | | 15591 | 15975 | 16359 | | 16743 |

TABLE 3.2
Preferred LASV prefusion-stabilized (GPCmut2) constructs

| | | RNA designs and SEQ ID NOs | | | | |
|---|---|---|---|---|---|---|
| PRT | CDS | a-1 | a-2 | b-4 | i-2 | i-3 |

| | | | | | |
|---|---|---|---|---|---|
| 22949 | 22981, | 23109, 23141, | 23493, 23525, | 23877, 23909, | 24261, 24293, |
| | 23013, | 23173, 23205, | 23557, 23589, | 23941, 23973, | 24325, 24357, |
| | 23045, | 23237, 23269, | 23621, 23653, | 24005, 24037, | 24389, 24421, |
| | 23077 | 23301, 23333, | 23685, 23717, | 24069, 24101, | 24453, 24485, |
| | | 23365, 23397, | 23749, 23781, | 24133, 24165, | 24517, 24549, |
| | | 23429, 23461 | 23813, 23845 | 24197, 24229 | 24581, 24613 |
| 22950 | 22982, | 23110, 23142, | 23494, 23526, | 23878, 23910, | 24262, 24294, |
| | 23014, | 23174, 23206, | 23558, 23590, | 23942, 23974, | 24326, 24358, |
| | 23046, | 23238, 23270, | 23622, 23654, | 24006, 24038, | 24390, 24422, |
| | 23078 | 23302, 23334, | 23686, 23718, | 24070, 24102, | 24454, 24486, |
| | | 23366, 23398, | 23750, 23782, | 24134, 24166, | 24518, 24550, |
| | | 23430, 23462 | 23814, 23846 | 24198, 24230 | 24582, 24614 |
| 22951 | 22983, | 23111, 23143, | 23495, 23527, | 23879, 23911, | 24263, 24295, |
| | 23015, | 23175, 23207, | 23559, 23591, | 23943, 23975, | 24327, 24359, |
| | 23047, | 23239, 23271, | 23623, 23655, | 24007, 24039, | 24391, 24423, |
| | 23079 | 23303, 23335, | 23687, 23719, | 24071, 24103, | 24455, 24487, |
| | | 23367, 23399, | 23751, 23783, | 24135, 24167, | 24519, 24551, |
| | | 23431, 23463 | 23815, 23847 | 24199, 24231 | 24583, 24615 |
| 22952 | 22984, | 23112, 23144, | 23496, 23528, | 23880, 23912, | 24264, 24296, |
| | 23016, | 23176, 23208, | 23560, 23592, | 23944, 23976, | 24328, 24360, |
| | 23048, | 23240, 23272, | 23624, 23656, | 24008, 24040, | 24392, 24424, |
| | 23080 | 23304, 23336, | 23688, 23720, | 24072, 24104, | 24456, 24488, |
| | | 23368, 23400, | 23752, 23784, | 24136, 24168, | 24520, 24552, |
| | | 23432, 23464 | 23816, 23848 | 24200, 24232 | 24584, 24616 |
| 22953 | 22985, | 23113, 23145, | 23497, 23529, | 23881, 23913, | 24265, 24297, |
| | 23017, | 23177, 23209, | 23561, 23593, | 23945, 23977, | 24329, 24361, |
| | 23049, | 23241, 23273, | 23625, 23657, | 24009, 24041, | 24393, 24425, |
| | 23081 | 23305, 23337, | 23689, 23721, | 24073, 24105, | 24457, 24489, |
| | | 23369, 23401, | 23753, 23785, | 24137, 24169, | 24521, 24553, |
| | | 23433, 23465 | 23817, 23849 | 24201, 24233 | 24585, 24617 |
| 22954 | 22986, | 23114, 23146, | 23498, 23530, | 23882, 23914, | 24266, 24298, |
| | 23018, | 23178, 23210, | 23562, 23594, | 23946, 23978, | 24330, 24362, |
| | 23050, | 23242, 23274, | 23626, 23658, | 24010, 24042, | 24394, 24426, |
| | 23082 | 23306, 23338, | 23690, 23722, | 24074, 24106, | 24458, 24490, |
| | | 23370, 23402, | 23754, 23786, | 24138, 24170, | 24522, 24554, |
| | | 23434, 23466 | 23818, 23850 | 24202, 24234 | 24586, 24618 |
| 22955 | 22987, | 23115, 23147, | 23499, 23531, | 23883, 23915, | 24267, 24299, |
| | 23019, | 23179, 23211, | 23563, 23595, | 23947, 23979, | 24331, 24363, |
| | 23051, | 23243, 23275, | 23627, 23659, | 24011, 24043, | 24395, 24427, |
| | 23083 | 23307, 23339, | 23691, 23723, | 24075, 24107, | 24459, 24491, |
| | | 23371, 23403, | 23755, 23787, | 24139, 24171, | 24523, 24555, |
| | | 23435, 23467 | 23819, 23851 | 24203, 24235 | 24587, 24619 |
| 22956 | 22988, | 23116, 23148, | 23500, 23532, | 23884, 23916, | 24268, 24300, |
| | 23020, | 23180, 23212, | 23564, 23596, | 23948, 23980, | 24332, 24364, |
| | 23052, | 23244, 23276, | 23628, 23660, | 24012, 24044, | 24396, 24428, |
| | 23084 | 23308, 23340, | 23692, 23724, | 24076, 24108, | 24460, 24492, |
| | | 23372, 23404, | 23756, 23788, | 24140, 24172, | 24524, 24556, |
| | | 23436, 23468 | 23820, 23852 | 24204, 24236 | 24588, 24620 |
| 22957 | 22989, | 23117, 23149, | 23501, 23533, | 23885, 23917, | 24269, 24301, |
| | 23021, | 23181, 23213, | 23565, 23597, | 23949, 23981, | 24333, 24365, |
| | 23053, | 23245, 23277, | 23629, 23661, | 24013, 24045, | 24397, 24429, |
| | 23085 | 23309, 23341, | 23693, 23725, | 24077, 24109, | 24461, 24493, |
| | | 23373, 23405, | 23757, 23789, | 24141, 24173, | 24525, 24557, |
| | | 23437, 23469 | 23821, 23853 | 24205, 24237 | 24589, 24621 |
| 22958 | 22990, | 23118, 23150, | 23502, 23534, | 23886, 23918, | 24270, 24302, |
| | 23022, | 23182, 23214, | 23566, 23598, | 23950, 23982, | 24334, 24366, |
| | 23054, | 23246, 23278, | 23630, 23662, | 24014, 24046, | 24398, 24430, |
| | 23086 | 23310, 23342, | 23694, 23726, | 24078, 24110, | 24462, 24494, |
| | | 23374, 23406, | 23758, 23790, | 24142, 24174, | 24526, 24558, |
| | | 23438, 23470 | 23822, 23854 | 24206, 24238 | 24590, 24622 |
| 22959 | 22991, | 23119, 23151, | 23503, 23535, | 23887, 23919, | 24271, 24303, |
| | 23023, | 23183, 23215, | 23567, 23599, | 23951, 23983, | 24335, 24367, |
| | 23055, | 23247, 23279, | 23631, 23663, | 24015, 24047, | 24399, 24431, |
| | 23087 | 23311, 23343, | 23695, 23727, | 24079, 24111, | 24463, 24495, |
| | | 23375, 23407, | 23759, 23791, | 24143, 24175, | 24527, 24559, |
| | | 23439, 23471 | 23823, 23855 | 24207, 24239 | 24591, 24623 |
| 22960 | 22992, | 23120, 23152, | 23504, 23536, | 23888, 23920, | 24272, 24304, |
| | 23024, | 23184, 23216, | 23568, 23600, | 23952, 23984, | 24336, 24368, |
| | 23056, | 23248, 23280, | 23632, 23664, | 24016, 24048, | 24400, 24432, |
| | 23088 | 23312, 23344, | 23696, 23728, | 24080, 24112, | 24464, 24496, |
| | | 23376, 23408, | 23760, 23792, | 24144, 24176, | 24528, 24560, |
| | | 23440, 23472 | 23824, 23856 | 24208, 24240 | 24592, 24624 |
| 22961 | 22993, | 23121, 23153, | 23505, 23537, | 23889, 23921, | 24273, 24305, |
| | 23025, | 23185, 23217, | 23569, 23601, | 23953, 23985, | 24337, 24369, |
| | 23057, | 23249, 23281, | 23633, 23665, | 24017, 24049, | 24401, 24433, |
| | 23089 | 23313, 23345, | 23697, 23729, | 24081, 24113, | 24465, 24497, |
| | | 23377, 23409, | 23761, 23793, | 24145, 24177, | 24529, 24561, |
| | | 23441, 23473 | 23825, 23857 | 24209, 24241 | 24593, 24625 |
| 22962 | 22994, | 23122, 23154, | 23506, 23538, | 23890, 23922, | 24274, 24306, |
| | 23026, | 23186, 23218, | 23570, 23602, | 23954, 23986, | 24338, 24370, |
| | 23058, | 23250, 23282, | 23634, 23666, | 24018, 24050, | 24402, 24434, |
| | 23090 | 23314, 23346, | 23698, 23730, | 24082, 24114, | 24466, 24498, |
| | | 23378, 23410, | 23762, 23794, | 24146, 24178, | 24530, 24562, |
| | | 23442, 23474 | 23826, 23858 | 24210, 24242 | 24594, 24626 |
| 22963 | 22995, | 23123, 23155, | 23507, 23539, | 23891, 23923, | 24275, 24307, |
| | 23027, | 23187, 23219, | 23571, 23603, | 23955, 23987, | 24339, 24371, |
| | 23059, | 23251, 23283, | 23635, 23667, | 24019, 24051, | 24403, 24435, |
| | 23091 | 23315, 23347, | 23699, 23731, | 24083, 24115, | 24467, 24499, |
| | | 23379, 23411, | 23763, 23795, | 24147, 24179, | 24531, 24563, |
| | | 23443, 23475 | 23827, 23859 | 24211, 24243 | 24595, 24627 |
| 22964 | 22996, | 23124, 23156, | 23508, 23540, | 23892, 23924, | 24276, 24308, |
| | 23028, | 23188, 23220, | 23572, 23604, | 23956, 23988, | 24340, 24372, |
| | 23060, | 23252, 23284, | 23636, 23668, | 24020, 24052, | 24404, 24436, |
| | 23092 | 23316, 23348, | 23700, 23732, | 24084, 24116, | 24468, 24500, |
| | | 23380, 23412, | 23764, 23796, | 24148, 24180, | 24532, 24564, |
| | | 23444, 23476 | 23828, 23860 | 24212, 24244 | 24596, 24628 |
| 22965 | 22997, | 23125, 23157, | 23509, 23541, | 23893, 23925, | 24277, 24309, |
| | 23029, | 23189, 23221, | 23573, 23605, | 23957, 23989, | 24341, 24373, |
| | 23061, | 23253, 23285, | 23637, 23669, | 24021, 24053, | 24405, 24437, |
| | 23093 | 23317, 23349, | 23701, 23733, | 24085, 24117, | 24469, 24501, |
| | | 23381, 23413, | 23765, 23797, | 24149, 24181, | 24533, 24565, |
| | | 23445, 23477 | 23829, 23861 | 24213, 24245 | 24597, 24629 |
| 22966 | 22998, | 23126, 23158, | 23510, 23542, | 23894, 23926, | 24278, 24310, |
| | 23030, | 23190, 23222, | 23574, 23606, | 23958, 23990, | 24342, 24374, |
| | 23062, | 23254, 23286, | 23638, 23670, | 24022, 24054, | 24406, 24438, |
| | 23094 | 23318, 23350, | 23702, 23734, | 24086, 24118, | 24470, 24502, |
| | | 23382, 23414, | 23766, 23798, | 24150, 24182, | 24534, 24566, |
| | | 23446, 23478 | 23830, 23862 | 24214, 24246 | 24598, 24630 |
| 22967 | 22999, | 23127, 23159, | 23511, 23543, | 23895, 23927, | 24279, 24311, |
| | 23031, | 23191, 23223, | 23575, 23607, | 23959, 23991, | 24343, 24375, |
| | 23063, | 23255, 23287, | 23639, 23671, | 24023, 24055, | 24407, 24439, |
| | 23095 | 23319, 23351, | 23703, 23735, | 24087, 24119, | 24471, 24503, |
| | | 23383, 23415, | 23767, 23799, | 24151, 24183, | 24535, 24567, |
| | | 23447, 23479 | 23831, 23863 | 24215, 24247 | 24599, 24631 |
| 22968 | 23000, | 23128, 23160, | 23512, 23544, | 23896, 23928, | 24280, 24312, |
| | 23032, | 23192, 23224, | 23576, 23608, | 23960, 23992, | 24344, 24376, |
| | 23064, | 23256, 23288, | 23640, 23672, | 24024, 24056, | 24408, 24440, |
| | 23096 | 23320, 23352, | 23704, 23736, | 24088, 24120, | 24472, 24504, |
| | | 23384, 23416, | 23768, 23800, | 24152, 24184, | 24536, 24568, |
| | | 23448, 23480 | 23832, 23864 | 24216, 24248 | 24600, 24632 |
| 22969 | 23001, | 23129, 23161, | 23513, 23545, | 23897, 23929, | 24281, 24313, |
| | 23033, | 23193, 23225, | 23577, 23609, | 23961, 23993, | 24345, 24377, |
| | 23065, | 23257, 23289, | 23641, 23673, | 24025, 24057, | 24409, 24441, |
| | 23097 | 23321, 23353, | 23705, 23737, | 24089, 24121, | 24473, 24505, |
| | | 23385, 23417, | 23769, 23801, | 24153, 24185, | 24537, 24569, |
| | | 23449, 23481 | 23833, 23865 | 24217, 24249 | 24601, 24633 |
| 22970 | 23002, | 23130, 23162, | 23514, 23546, | 23898, 23930, | 24282, 24314, |
| | 23034, | 23194, 23226, | 23578, 23610, | 23962, 23994, | 24346, 24378, |
| | 23066, | 23258, 23290, | 23642, 23674, | 24026, 24058, | 24410, 24442, |
| | 23098 | 23322, 23354, | 23706, 23738, | 24090, 24122, | 24474, 24506, |
| | | 23386, 23418, | 23770, 23802, | 24154, 24186, | 24538, 24570, |
| | | 23450, 23482 | 23834, 23866 | 24218, 24250 | 24602, 24634 |
| 22971 | 23003, | 23131, 23163, | 23515, 23547, | 23899, 23931, | 24283, 24315, |
| | 23035, | 23195, 23227, | 23579, 23611, | 23963, 23995, | 24347, 24379, |
| | 23067, | 23259, 23291, | 23643, 23675, | 24027, 24059, | 24411, 24443, |
| | 23099 | 23323, 23355, | 23707, 23739, | 24091, 24123, | 24475, 24507, |
| | | 23387, 23419, | 23771, 23803, | 24155, 24187, | 24539, 24571, |
| | | 23451, 23483 | 23835, 23867 | 24219, 24251 | 24603, 24635 |
| 22972 | 23004, | 23132, 23164, | 23516, 23548, | 23900, 23932, | 24284, 24316, |
| | 23036, | 23196, 23228, | 23580, 23612, | 23964, 23996, | 24348, 24380, |
| | 23068, | 23260, 23292, | 23644, 23676, | 24028, 24060, | 24412, 24444, |
| | 23100 | 23324, 23356, | 23708, 23740, | 24092, 24124, | 24476, 24508, |
| | | 23388, 23420, | 23772, 23804, | 24156, 24188, | 24540, 24572, |
| | | 23452, 23484 | 23836, 23868 | 24220, 24252 | 24604, 24636 |
| 22973 | 23005, | 23133, 23165, | 23517, 23549, | 23901, 23933, | 24285, 24317, |
| | 23037, | 23197, 23229, | 23581, 23613, | 23965, 23997, | 24349, 24381, |
| | 23069, | 23261, 23293, | 23645, 23677, | 24029, 24061, | 24413, 24445, |
| | 23101 | 23325, 23357, | 23709, 23741, | 24093, 24125, | 24477, 24509, |
| | | 23389, 23421, | 23773, 23805, | 24157, 24189, | 24541, 24573, |
| | | 23453, 23485 | 23837, 23869 | 24221, 24253 | 24605, 24637 |
| 22974 | 23006, | 23134, 23166, | 23518, 23550, | 23902, 23934, | 24286, 24318, |
| | 23038, | 23198, 23230, | 23582, 23614, | 23966, 23998, | 24350, 24382, |
| | 23070, | 23262, 23294, | 23646, 23678, | 24030, 24062, | 24414, 24446, |
| | 23102 | 23326, 23358, | 23710, 23742, | 24094, 24126, | 24478, 24510, |
| | | 23390, 23422, | 23774, 23806, | 24158, 24190, | 24542, 24574, |
| | | 23454, 23486 | 23838, 23870 | 24222, 24254 | 24606, 24638 |
| 22975 | 23007, | 23135, 23167, | 23519, 23551, | 23903, 23935, | 24287, 24319, |
| | 23039, | 23199, 23231, | 23583, 23615, | 23967, 23999, | 24351, 24383, |
| | 23071, | 23263, 23295, | 23647, 23679, | 24031, 24063, | 24415, 24447, |
| | 23103 | 23327, 23359, | 23711, 23743, | 24095, 24127, | 24479, 24511, |
| | | 23391, 23423, | 23775, 23807, | 24159, 24191, | 24543, 24575, |
| | | 23455, 23487 | 23839, 23871 | 24223, 24255 | 24607, 24639 |
| 22976 | 23008, | 23136, 23168, | 23520, 23552, | 23904, 23936, | 24288, 24320, |
| | 23040, | 23200, 23232, | 23584, 23616, | 23968, 24000, | 24352, 24384, |
| | 23072, | 23264, 23296, | 23648, 23680, | 24032, 24064, | 24416, 24448, |
| | 23104 | 23328, 23360, | 23712, 23744, | 24096, 24128, | 24480, 24512, |
| | | 23392, 23424, | 23776, 23808, | 24160, 24192, | 24544, 24576, |
| | | 23456, 23488 | 23840, 23872 | 24224, 24256 | 24608, 24640 |
| 22977 | 23009, | 23137, 23169, | 23521, 23553, | 23905, 23937, | 24289, 24321, |
| | 23041, | 23201, 23233, | 23585, 23617, | 23969, 24001, | 24353, 24385, |
| | 23073, | 23265, 23297, | 23649, 23681, | 24033, 24065, | 24417, 24449, |
| | 23105 | 23329, 23361, | 23713, 23745, | 24097, 24129, | 24481, 24513, |
| | | 23393, 23425, | 23777, 23809, | 24161, 24193, | 24545, 24577, |
| | | 23457, 23489 | 23841, 23873 | 24225, 24257 | 24609, 24641 |
| 22978 | 23010, | 23138, 23170, | 23522, 23554, | 23906, 23938, | 24290, 24322, |
| | 23042, | 23202, 23234, | 23586, 23618, | 23970, 24002, | 24354, 24386, |
| | 23074, | 23266, 23298, | 23650, 23682, | 24034, 24066, | 24418, 24450, |
| | 23106 | 23330, 23362, | 23714, 23746, | 24098, 24130, | 24482, 24514, |
| | | 23394, 23426, | 23778, 23810, | 24162, 24194, | 24546, 24578, |
| | | 23458, 23490 | 23842, 23874 | 24226, 24258 | 24610, 24642 |
| 22979 | 23011, | 23139, 23171, | 23523, 23555, | 23907, 23939, | 24291, 24323, |
| | 23043, | 23203, 23235, | 23587, 23619, | 23971, 24003, | 24355, 24387, |
| | 23075, | 23267, 23299, | 23651, 23683, | 24035, 24067, | 24419, 24451, |
| | 23107 | 23331, 23363, | 23715, 23747, | 24099, 24131, | 24483, 24515, |
| | | 23395, 23427, | 23779, 23811, | 24163, 24195, | 24547, 24579, |
| | | 23459, 23491 | 23843, 23875 | 24227, 24259 | 24611, 24643 |
| 22980 | 23012, | 23140, 23172, | 23524, 23556, | 23908, 23940, | 24292, 24324, |
| | 23044, | 23204, 23236, | 23588, 23620, | 23972, 24004, | 24356, 24388, |
| | 23076, | 23268, 23300, | 23652, 23684, | 24036, 24068, | 24420, 24452, |
| | 23108 | 23332, 23364, | 23716, 23748, | 24100, 24132, | 24484, 24516, |
| | | 23396, 23428, | 23780, 23812, | 24164, 24196, | 24548, 24580, |
| | | 23460, 23492 | 23844, 23876 | 24228, 24260 | 24612, 24644 |

TABLE 3.3
Preferred LASV prefusion-stabilized (GPCmut3) constructs

| | | RNA designs and SEQ ID NOs | | | | |
|---|---|---|---|---|---|---|
| PRT | CDS | a-1 | a-2 | b-4 | i-2 | i-3 |

| | | | | | |
|---|---|---|---|---|---|
| 24645 | 24677, | 24805, 24837, | 25189, 25221, | 25573, 25605, | 25957, 25989, |
| | 24709, | 24869, 24901, | 25253, 25285, | 25637, 25669, | 26021, 26053, |
| | 24741, | 24933, 24965, | 25317, 25349, | 25701, 25733, | 26085, 26117, |
| | 24773 | 24997, 25029, | 25381, 25413, | 25765, 25797, | 26149, 26181, |
| | | 25061, 25093, | 25445, 25477, | 25829, 25861, | 26213, 26245, |
| | | 25125, 25157 | 25509, 25541 | 25893, 25925 | 26277, 26309 |
| 24646 | 24678, | 24806, 24838, | 25190, 25222, | 25574, 25606, | 25958, 25990, |
| | 24710, | 24870, 24902, | 25254, 25286, | 25638, 25670, | 26022, 26054, |
| | 24742, | 24934, 24966, | 25318, 25350, | 25702, 25734, | 26086, 26118, |
| | 24774 | 24998, 25030, | 25382, 25414, | 25766, 25798, | 26150, 26182, |
| | | 25062, 25094, | 25446, 25478, | 25830, 25862, | 26214, 26246, |
| | | 25126, 25158 | 25510, 25542 | 25894, 25926 | 26278, 26310 |
| 24647 | 24679, | 24807, 24839, | 25191, 25223, | 25575, 25607, | 25959, 25991, |
| | 24711, | 24871, 24903, | 25255, 25287, | 25639, 25671, | 26023, 26055, |
| | 24743, | 24935, 24967, | 25319, 25351, | 25703, 25735, | 26087, 26119, |
| | 24775 | 24999, 25031, | 25383, 25415, | 25767, 25799, | 26151, 26183, |
| | | 25063, 25095, | 25447, 25479, | 25831, 25863, | 26215, 26247, |
| | | 25127, 25159 | 25511, 25543 | 25895, 25927 | 26279, 26311 |
| 24648 | 24680, | 24808, 24840, | 25192, 25224, | 25576, 25608, | 25960, 25992, |
| | 24712, | 24872, 24904, | 25256, 25288, | 25640, 25672, | 26024, 26056, |
| | 24744, | 24936, 24968, | 25320, 25352, | 25704, 25736, | 26088, 26120, |
| | 24776 | 25000, 25032, | 25384, 25416, | 25768, 25800, | 26152, 26184, |
| | | 25064, 25096, | 25448, 25480, | 25832, 25864, | 26216, 26248, |
| | | 25128, 25160 | 25512, 25544 | 25896, 25928 | 26280, 26312 |
| 24649 | 24681, | 24809, 24841, | 25193, 25225, | 25577, 25609, | 25961, 25993, |
| | 24713, | 24873, 24905, | 25257, 25289, | 25641, 25673, | 26025, 26057, |
| | 24745, | 24937, 24969, | 25321, 25353, | 25705, 25737, | 26089, 26121, |
| | 24777 | 25001, 25033, | 25385, 25417, | 25769, 25801, | 26153, 26185, |
| | | 25065, 25097, | 25449, 25481, | 25833, 25865, | 26217, 26249, |
| | | 25129, 25161 | 25513, 25545 | 25897, 25929 | 26281, 26313 |
| 24650 | 24682, | 24810, 24842, | 25194, 25226, | 25578, 25610, | 25962, 25994, |
| | 24714, | 24874, 24906, | 25258, 25290, | 25642, 25674, | 26026, 26058, |
| | 24746, | 24938, 24970, | 25322, 25354, | 25706, 25738, | 26090, 26122, |
| | 24778 | 25002, 25034, | 25386, 25418, | 25770, 25802, | 26154, 26186, |
| | | 25066, 25098, | 25450, 25482, | 25834, 25866, | 26218, 26250, |
| | | 25130, 25162 | 25514, 25546 | 25898, 25930 | 26282, 26314 |
| 24651 | 24683, | 24811, 24843, | 25195, 25227, | 25579, 25611, | 25963, 25995, |
| | 24715, | 24875, 24907, | 25259, 25291, | 25643, 25675, | 26027, 26059, |
| | 24747, | 24939, 24971, | 25323, 25355, | 25707, 25739, | 26091, 26123, |
| | 24779 | 25003, 25035, | 25387, 25419, | 25771, 25803, | 26155, 26187, |
| | | 25067, 25099, | 25451, 25483, | 25835, 25867, | 26219, 26251, |
| | | 25131, 25163 | 25515, 25547 | 25899, 25931 | 26283, 26315 |
| 24652 | 24684, | 24812, 24844, | 25196, 25228, | 25580, 25612, | 25964, 25996, |
| | 24716, | 24876, 24908, | 25260, 25292, | 25644, 25676, | 26028, 26060, |
| | 24748, | 24940, 24972, | 25324, 25356, | 25708, 25740, | 26092, 26124, |
| | 24780 | 25004, 25036, | 25388, 25420, | 25772, 25804, | 26156, 26188, |
| | | 25068, 25100, | 25452, 25484, | 25836, 25868, | 26220, 26252, |
| | | 25132, 25164 | 25516, 25548 | 25900, 25932 | 26284, 26316 |
| 24653 | 24685, | 24813, 24845, | 25197, 25229, | 25581, 25613, | 25965, 25997, |
| | 24717, | 24877, 24909, | 25261, 25293, | 25645, 25677, | 26029, 26061, |
| | 24749, | 24941, 24973, | 25325, 25357, | 25709, 25741, | 26093, 26125, |
| | 24781 | 25005, 25037, | 25389, 25421, | 25773, 25805, | 26157, 26189, |
| | | 25069, 25101, | 25453, 25485, | 25837, 25869, | 26221, 26253, |
| | | 25133, 25165 | 25517, 25549 | 25901, 25933 | 26285, 26317 |
| 24654 | 24686, | 24814, 24846, | 25198, 25230, | 25582, 25614, | 25966, 25998, |
| | 24718, | 24878, 24910, | 25262, 25294, | 25646, 25678, | 26030, 26062, |
| | 24750, | 24942, 24974, | 25326, 25358, | 25710, 25742, | 26094, 26126, |
| | 24782 | 25006, 25038, | 25390, 25422, | 25774, 25806, | 26158, 26190, |
| | | 25070, 25102, | 25454, 25486, | 25838, 25870, | 26222, 26254, |
| | | 25134, 25166 | 25518, 25550 | 25902, 25934 | 26286, 26318 |
| 24655 | 24687, | 24815, 24847, | 25199, 25231, | 25583, 25615, | 25967, 25999, |
| | 24719, | 24879, 24911, | 25263, 25295, | 25647, 25679, | 26031, 26063, |
| | 24751, | 24943, 24975, | 25327, 25359, | 25711, 25743, | 26095, 26127, |
| | 24783 | 25007, 25039, | 25391, 25423, | 25775, 25807, | 26159, 26191, |
| | | 25071, 25103, | 25455, 25487, | 25839, 25871, | 26223, 26255, |
| | | 25135, 25167 | 25519, 25551 | 25903, 25935 | 26287, 26319 |
| 24656 | 24688, | 24816, 24848, | 25200, 25232, | 25584, 25616, | 25968, 26000, |
| | 24720, | 24880, 24912, | 25264, 25296, | 25648, 25680, | 26032, 26064, |
| | 24752, | 24944, 24976, | 25328, 25360, | 25712, 25744, | 26096, 26128, |
| | 24784 | 25008, 25040, | 25392, 25424, | 25776, 25808, | 26160, 26192, |
| | | 25072, 25104, | 25456, 25488, | 25840, 25872, | 26224, 26256, |
| | | 25136, 25168 | 25520, 25552 | 25904, 25936 | 26288, 26320 |
| 24657 | 24689, | 24817, 24849, | 25201, 25233, | 25585, 25617, | 25969, 26001, |
| | 24721, | 24881, 24913, | 25265, 25297, | 25649, 25681, | 26033, 26065, |
| | 24753, | 24945, 24977, | 25329, 25361, | 25713, 25745, | 26097, 26129, |
| | 24785 | 25009, 25041, | 25393, 25425, | 25777, 25809, | 26161, 26193, |
| | | 25073, 25105, | 25457, 25489, | 25841, 25873, | 26225, 26257, |
| | | 25137, 25169 | 25521, 25553 | 25905, 25937 | 26289, 26321 |
| 24658 | 24690, | 24818, 24850, | 25202, 25234, | 25586, 25618, | 25970, 26002, |
| | 24722, | 24882, 24914, | 25266, 25298, | 25650, 25682, | 26034, 26066, |
| | 24754, | 24946, 24978, | 25330, 25362, | 25714, 25746, | 26098, 26130, |
| | 24786 | 25010, 25042, | 25394, 25426, | 25778, 25810, | 26162, 26194, |
| | | 25074, 25106, | 25458, 25490, | 25842, 25874, | 26226, 26258, |
| | | 25138, 25170 | 25522, 25554 | 25906, 25938 | 26290, 26322 |
| 24659 | 24691, | 24819, 24851, | 25203, 25235, | 25587, 25619, | 25971, 26003, |
| | 24723, | 24883, 24915, | 25267, 25299, | 25651, 25683, | 26035, 26067, |
| | 24755, | 24947, 24979, | 25331, 25363, | 25715, 25747, | 26099, 26131, |
| | 24787 | 25011, 25043, | 25395, 25427, | 25779, 25811, | 26163, 26195, |
| | | 25075, 25107, | 25459, 25491, | 25843, 25875, | 26227, 26259, |
| | | 25139, 25171 | 25523, 25555 | 25907, 25939 | 26291, 26323 |
| 24660 | 24692, | 24820, 24852, | 25204, 25236, | 25588, 25620, | 25972, 26004, |
| | 24724, | 24884, 24916, | 25268, 25300, | 25652, 25684, | 26036, 26068, |
| | 24756, | 24948, 24980, | 25332, 25364, | 25716, 25748, | 26100, 26132, |
| | 24788 | 25012, 25044, | 25396, 25428, | 25780, 25812, | 26164, 26196, |
| | | 25076, 25108, | 25460, 25492, | 25844, 25876, | 26228, 26260, |
| | | 25140, 25172 | 25524, 25556 | 25908, 25940 | 26292, 26324 |
| 24661 | 24693, | 24821, 24853, | 25205, 25237, | 25589, 25621, | 25973, 26005, |
| | 24725, | 24885, 24917, | 25269, 25301, | 25653, 25685, | 26037, 26069, |
| | 24757, | 24949, 24981, | 25333, 25365, | 25717, 25749, | 26101, 26133, |
| | 24789 | 25013, 25045, | 25397, 25429, | 25781, 25813, | 26165, 26197, |
| | | 25077, 25109, | 25461, 25493, | 25845, 25877, | 26229, 26261, |
| | | 25141, 25173 | 25525, 25557 | 25909, 25941 | 26293, 26325 |
| 24662 | 24694, | 24822, 24854, | 25206, 25238, | 25590, 25622, | 25974, 26006, |
| | 24726, | 24886, 24918, | 25270, 25302, | 25654, 25686, | 26038, 26070, |
| | 24758, | 24950, 24982, | 25334, 25366, | 25718, 25750, | 26102, 26134, |
| | 24790 | 25014, 25046, | 25398, 25430, | 25782, 25814, | 26166, 26198, |
| | | 25078, 25110, | 25462, 25494, | 25846, 25878, | 26230, 26262, |
| | | 25142, 25174 | 25526, 25558 | 25910, 25942 | 26294, 26326 |
| 24663 | 24695, | 24823, 24855, | 25207, 25239, | 25591, 25623, | 25975, 26007, |
| | 24727, | 24887, 24919, | 25271, 25303, | 25655, 25687, | 26039, 26071, |
| | 24759, | 24951, 24983, | 25335, 25367, | 25719, 25751, | 26103, 26135, |
| | 24791 | 25015, 25047, | 25399, 25431, | 25783, 25815, | 26167, 26199, |
| | | 25079, 25111, | 25463, 25495, | 25847, 25879, | 26231, 26263, |
| | | 25143, 25175 | 25527, 25559 | 25911, 25943 | 26295, 26327 |
| 24664 | 24696, | 24824, 24856, | 25208, 25240, | 25592, 25624, | 25976, 26008, |
| | 24728, | 24888, 24920, | 25272, 25304, | 25656, 25688, | 26040, 26072, |
| | 24760, | 24952, 24984, | 25336, 25368, | 25720, 25752, | 26104, 26136, |
| | 24792 | 25016, 25048, | 25400, 25432, | 25784, 25816, | 26168, 26200, |
| | | 25080, 25112, | 25464, 25496, | 25848, 25880, | 26232, 26264, |
| | | 25144, 25176 | 25528, 25560 | 25912, 25944 | 26296, 26328 |
| 24665 | 24697, | 24825, 24857, | 25209, 25241, | 25593, 25625, | 25977, 26009, |
| | 24729, | 24889, 24921, | 25273, 25305, | 25657, 25689, | 26041, 26073, |
| | 24761, | 24953, 24985, | 25337, 25369, | 25721, 25753, | 26105, 26137, |
| | 24793 | 25017, 25049, | 25401, 25433, | 25785, 25817, | 26169, 26201, |
| | | 25081, 25113, | 25465, 25497, | 25849, 25881, | 26233, 26265, |
| | | 25145, 25177 | 25529, 25561 | 25913, 25945 | 26297, 26329 |
| 24666 | 24698, | 24826, 24858, | 25210, 25242, | 25594, 25626, | 25978, 26010, |
| | 24730, | 24890, 24922, | 25274, 25306, | 25658, 25690, | 26042, 26074, |
| | 24762, | 24954, 24986, | 25338, 25370, | 25722, 25754, | 26106, 26138, |
| | 24794 | 25018, 25050, | 25402, 25434, | 25786, 25818, | 26170, 26202, |
| | | 25082, 25114, | 25466, 25498, | 25850, 25882, | 26234, 26266, |
| | | 25146, 25178 | 25530, 25562 | 25914, 25946 | 26298, 26330 |
| 24667 | 24699, | 24827, 24859, | 25211, 25243, | 25595, 25627, | 25979, 26011, |
| | 24731, | 24891, 24923, | 25275, 25307, | 25659, 25691, | 26043, 26075, |
| | 24763, | 24955, 24987, | 25339, 25371, | 25723, 25755, | 26107, 26139, |
| | 24795 | 25019, 25051, | 25403, 25435, | 25787, 25819, | 26171, 26203, |
| | | 25083, 25115, | 25467, 25499, | 25851, 25883, | 26235, 26267, |
| | | 25147, 25179 | 25531, 25563 | 25915, 25947 | 26299, 26331 |
| 24668 | 24700, | 24828, 24860, | 25212, 25244, | 25596, 25628, | 25980, 26012, |
| | 24732, | 24892, 24924, | 25276, 25308, | 25660, 25692, | 26044, 26076, |
| | 24764, | 24956, 24988, | 25340, 25372, | 25724, 25756, | 26108, 26140, |
| | 24796 | 25020, 25052, | 25404, 25436, | 25788, 25820, | 26172, 26204, |
| | | 25084, 25116, | 25468, 25500, | 25852, 25884, | 26236, 26268, |
| | | 25148, 25180 | 25532, 25564 | 25916, 25948 | 26300, 26332 |
| 24669 | 24701, | 24829, 24861, | 25213, 25245, | 25597, 25629, | 25981, 26013, |
| | 24733, | 24893, 24925, | 25277, 25309, | 25661, 25693, | 26045, 26077, |
| | 24765, | 24957, 24989, | 25341, 25373, | 25725, 25757, | 26109, 26141, |
| | 24797 | 25021, 25053, | 25405, 25437, | 25789, 25821, | 26173, 26205, |
| | | 25085, 25117, | 25469, 25501, | 25853, 25885, | 26237, 26269, |
| | | 25149, 25181 | 25533, 25565 | 25917, 25949 | 26301, 26333 |
| 24670 | 24702, | 24830, 24862, | 25214, 25246, | 25598, 25630, | 25982, 26014, |
| | 24734, | 24894, 24926, | 25278, 25310, | 25662, 25694, | 26046, 26078, |
| | 24766, | 24958, 24990, | 25342, 25374, | 25726, 25758, | 26110, 26142, |
| | 24798 | 25022, 25054, | 25406, 25438, | 25790, 25822, | 26174, 26206, |
| | | 25086, 25118, | 25470, 25502, | 25854, 25886, | 26238, 26270, |
| | | 25150, 25182 | 25534, 25566 | 25918, 25950 | 26302, 26334 |
| 24671 | 24703, | 24831, 24863, | 25215, 25247, | 25599, 25631, | 25983, 26015, |
| | 24735, | 24895, 24927, | 25279, 25311, | 25663, 25695, | 26047, 26079, |
| | 24767, | 24959, 24991, | 25343, 25375, | 25727, 25759, | 26111, 26143, |
| | 24799 | 25023, 25055, | 25407, 25439, | 25791, 25823, | 26175, 26207, |
| | | 25087, 25119, | 25471, 25503, | 25855, 25887, | 26239, 26271, |
| | | 25151, 25183 | 25535, 25567 | 25919, 25951 | 26303, 26335 |
| 24672 | 24704, | 24832, 24864, | 25216, 25248, | 25600, 25632, | 25984, 26016, |
| | 24736, | 24896, 24928, | 25280, 25312, | 25664, 25696, | 26048, 26080, |
| | 24768, | 24960, 24992, | 25344, 25376, | 25728, 25760, | 26112, 26144, |
| | 24800 | 25024, 25056, | 25408, 25440, | 25792, 25824, | 26176, 26208, |
| | | 25088, 25120, | 25472, 25504, | 25856, 25888, | 26240, 26272, |
| | | 25152, 25184 | 25536, 25568 | 25920, 25952 | 26304, 26336 |
| 24673 | 24705, | 24833, 24865, | 25217, 25249, | 25601, 25633, | 25985, 26017, |
| | 24737, | 24897, 24929, | 25281, 25313, | 25665, 25697, | 26049, 26081, |
| | 24769, | 24961, 24993, | 25345, 25377, | 25729, 25761, | 26113, 26145, |
| | 24801 | 25025, 25057, | 25409, 25441, | 25793, 25825, | 26177, 26209, |
| | | 25089, 25121, | 25473, 25505, | 25857, 25889, | 26241, 26273, |
| | | 25153, 25185 | 25537, 25569 | 25921, 25953 | 26305, 26337 |
| 24674 | 24706, | 24834, 24866, | 25218, 25250, | 25602, 25634, | 25986, 26018, |
| | 24738, | 24898, 24930, | 25282, 25314, | 25666, 25698, | 26050, 26082, |
| | 24770, | 24962, 24994, | 25346, 25378, | 25730, 25762, | 26114, 26146, |
| | 24802 | 25026, 25058, | 25410, 25442, | 25794, 25826, | 26178, 26210, |
| | | 25090, 25122, | 25474, 25506, | 25858, 25890, | 26242, 26274, |
| | | 25154, 25186 | 25538, 25570 | 25922, 25954 | 26306, 26338 |
| 24675 | 24707, | 24835, 24867, | 25219, 25251, | 25603, 25635, | 25987, 26019, |
| | 24739, | 24899, 24931, | 25283, 25315, | 25667, 25699, | 26051, 26083, |
| | 24771, | 24963, 24995, | 25347, 25379, | 25731, 25763, | 26115, 26147, |
| | 24803 | 25027, 25059, | 25411, 25443, | 25795, 25827, | 26179, 26211, |
| | | 25091, 25123, | 25475, 25507, | 25859, 25891, | 26243, 26275, |
| | | 25155, 25187 | 25539, 25571 | 25923, 25955 | 26307, 26339 |
| 24676 | 24708, | 24836, 24868, | 25220, 25252, | 25604, 25636, | 25988, 26020, |
| | 24740, | 24900, 24932, | 25284, 25316, | 25668, 25700, | 26052, 26084, |
| | 24772, | 24964, 24996, | 25348, 25380, | 25732, 25764, | 26116, 26148, |
| | 24804 | 25028, 25060, | 25412, 25444, | 25796, 25828, | 26180, 26212, |
| | | 25092, 25124, | 25476, 25508, | 25860, 25892, | 26244, 26276, |
| | | 25156, 25188 | 25540, 25572 | 25924, 25956 | 26308, 26340 |

TABLE 3.4
Preferred LASV prefusion-stabilized (GPCmut4) constructs

| | | RNA designs and SEQ ID NOs | | | | |
|---|---|---|---|---|---|---|
| PRT | CDS | a-1 | a-2 | b-4 | i-2 | i-3 |

| | | | | | |
|---|---|---|---|---|---|
| 26341 | 26373, | 26501, 26533, | 26885, 26917, | 27269, 27301, | 27653, 27685, |
| | 26405, | 26565, 26597, | 26949, 26981, | 27333, 27365, | 27717, 27749, |
| | 26437, | 26629, 26661, | 27013, 27045, | 27397, 27429, | 27781, 27813, |
| | 26469 | 26693, 26725, | 27077, 27109, | 27461, 27493, | 27845, 27877, |
| | | 26757, 26789, | 27141, 27173, | 27525, 27557, | 27909, 27941, |
| | | 26821, 26853 | 27205, 27237 | 27589, 27621 | 27973, 28005 |
| 26342 | 26374, | 26502, 26534, | 26886, 26918, | 27270, 27302, | 27654, 27686, |
| | 26406, | 26566, 26598, | 26950, 26982, | 27334, 27366, | 27718, 27750, |
| | 26438, | 26630, 26662, | 27014, 27046, | 27398, 27430, | 27782, 27814, |
| | 26470 | 26694, 26726, | 27078, 27110, | 27462, 27494, | 27846, 27878, |
| | | 26758, 26790, | 27142, 27174, | 27526, 27558, | 27910, 27942, |
| | | 26822, 26854 | 27206, 27238 | 27590, 27622 | 27974, 28006 |
| 26343 | 26375, | 26503, 26535, | 26887, 26919, | 27271, 27303, | 27655, 27687, |
| | 26407, | 26567, 26599, | 26951, 26983, | 27335, 27367, | 27719, 27751, |
| | 26439, | 26631, 26663, | 27015, 27047, | 27399, 27431, | 27783, 27815, |
| | 26471 | 26695, 26727, | 27079, 27111, | 27463, 27495, | 27847, 27879, |
| | | 26759, 26791, | 27143, 27175, | 27527, 27559, | 27911, 27943, |
| | | 26823, 26855 | 27207, 27239 | 27591, 27623 | 27975, 28007 |
| 26344 | 26376, | 26504, 26536, | 26888, 26920, | 27272, 27304, | 27656, 27688, |
| | 26408, | 26568, 26600, | 26952, 26984, | 27336, 27368, | 27720, 27752, |
| | 26440, | 26632, 26664, | 27016, 27048, | 27400, 27432, | 27784, 27816, |
| | 26472 | 26696, 26728, | 27080, 27112, | 27464, 27496, | 27848, 27880, |
| | | 26760, 26792, | 27144, 27176, | 27528, 27560, | 27912, 27944, |
| | | 26824, 26856 | 27208, 27240 | 27592, 27624 | 27976, 28008 |
| 26345 | 26377, | 26505, 26537, | 26889, 26921, | 27273, 27305, | 27657, 27689, |
| | 26409, | 26569, 26601, | 26953, 26985, | 27337, 27369, | 27721, 27753, |
| | 26441, | 26633, 26665, | 27017, 27049, | 27401, 27433, | 27785, 27817, |
| | 26473 | 26697, 26729, | 27081, 27113, | 27465, 27497, | 27849, 27881, |
| | | 26761, 26793, | 27145, 27177, | 27529, 27561, | 27913, 27945, |
| | | 26825, 26857 | 27209, 27241 | 27593, 27625 | 27977, 28009 |
| 26346 | 26378, | 26506, 26538, | 26890, 26922, | 27274, 27306, | 27658, 27690, |
| | 26410, | 26570, 26602, | 26954, 26986, | 27338, 27370, | 27722, 27754, |
| | 26442, | 26634, 26666, | 27018, 27050, | 27402, 27434, | 27786, 27818, |
| | 26474 | 26698, 26730, | 27082, 27114, | 27466, 27498, | 27850, 27882, |
| | | 26762, 26794, | 27146, 27178, | 27530, 27562, | 27914, 27946, |
| | | 26826, 26858 | 27210, 27242 | 27594, 27626 | 27978, 28010 |
| 26347 | 26379, | 26507, 26539, | 26891, 26923, | 27275, 27307, | 27659, 27691, |
| | 26411, | 26571, 26603, | 26955, 26987, | 27339, 27371, | 27723, 27755, |
| | 26443, | 26635, 26667, | 27019, 27051, | 27403, 27435, | 27787, 27819, |
| | 26475 | 26699, 26731, | 27083, 27115, | 27467, 27499, | 27851, 27883, |
| | | 26763, 26795, | 27147, 27179, | 27531, 27563, | 27915, 27947, |
| | | 26827, 26859 | 27211, 27243 | 27595, 27627 | 27979, 28011 |
| 26348 | 26380, | 26508, 26540, | 26892, 26924, | 27276, 27308, | 27660, 27692, |
| | 26412, | 26572, 26604, | 26956, 26988, | 27340, 27372, | 27724, 27756, |
| | 26444, | 26636, 26668, | 27020, 27052, | 27404, 27436, | 27788, 27820, |
| | 26476 | 26700, 26732, | 27084, 27116, | 27468, 27500, | 27852, 27884, |
| | | 26764, 26796, | 27148, 27180, | 27532, 27564, | 27916, 27948, |
| | | 26828, 26860 | 27212, 27244 | 27596, 27628 | 27980, 28012 |
| 26349 | 26381, | 26509, 26541, | 26893, 26925, | 27277, 27309, | 27661, 27693, |
| | 26413, | 26573, 26605, | 26957, 26989, | 27341, 27373, | 27725, 27757, |
| | 26445, | 26637, 26669, | 27021, 27053, | 27405, 27437, | 27789, 27821, |
| | 26477 | 26701, 26733, | 27085, 27117, | 27469, 27501, | 27853, 27885, |
| | | 26765, 26797, | 27149, 27181, | 27533, 27565, | 27917, 27949, |
| | | 26829, 26861 | 27213, 27245 | 27597, 27629 | 27981, 28013 |
| 26350 | 26382, | 26510, 26542, | 26894, 26926, | 27278, 27310, | 27662, 27694, |
| | 26414, | 26574, 26606, | 26958, 26990, | 27342, 27374, | 27726, 27758, |
| | 26446, | 26638, 26670, | 27022, 27054, | 27406, 27438, | 27790, 27822, |
| | 26478 | 26702, 26734, | 27086, 27118, | 27470, 27502, | 27854, 27886, |
| | | 26766, 26798, | 27150, 27182, | 27534, 27566, | 27918, 27950, |
| | | 26830, 26862 | 27214, 27246 | 27598, 27630 | 27982, 28014 |
| 26351 | 26383, | 26511, 26543, | 26895, 26927, | 27279, 27311, | 27663, 27695, |
| | 26415, | 26575, 26607, | 26959, 26991, | 27343, 27375, | 27727, 27759, |
| | 26447, | 26639, 26671, | 27023, 27055, | 27407, 27439, | 27791, 27823, |
| | 26479 | 26703, 26735, | 27087, 27119, | 27471, 27503, | 27855, 27887, |
| | | 26767, 26799, | 27151, 27183, | 27535, 27567, | 27919, 27951, |
| | | 26831, 26863 | 27215, 27247 | 27599, 27631 | 27983, 28015 |
| 26352 | 26384, | 26512, 26544, | 26896, 26928, | 27280, 27312, | 27664, 27696, |
| | 26416, | 26576, 26608, | 26960, 26992, | 27344, 27376, | 27728, 27760, |
| | 26448, | 26640, 26672, | 27024, 27056, | 27408, 27440, | 27792, 27824, |
| | 26480 | 26704, 26736, | 27088, 27120, | 27472, 27504, | 27856, 27888, |
| | | 26768, 26800, | 27152, 27184, | 27536, 27568, | 27920, 27952, |
| | | 26832, 26864 | 27216, 27248 | 27600, 27632 | 27984, 28016 |
| 26353 | 26385, | 26513, 26545, | 26897, 26929, | 27281, 27313, | 27665, 27697, |
| | 26417, | 26577, 26609, | 26961, 26993, | 27345, 27377, | 27729, 27761, |
| | 26449, | 26641, 26673, | 27025, 27057, | 27409, 27441, | 27793, 27825, |
| | 26481 | 26705, 26737, | 27089, 27121, | 27473, 27505, | 27857, 27889, |
| | | 26769, 26801, | 27153, 27185, | 27537, 27569, | 27921, 27953, |
| | | 26833, 26865 | 27217, 27249 | 27601, 27633 | 27985, 28017 |
| 26354 | 26386, | 26514, 26546, | 26898, 26930, | 27282, 27314, | 27666, 27698, |
| | 26418, | 26578, 26610, | 26962, 26994, | 27346, 27378, | 27730, 27762, |
| | 26450, | 26642, 26674, | 27026, 27058, | 27410, 27442, | 27794, 27826, |
| | 26482 | 26706, 26738, | 27090, 27122, | 27474, 27506, | 27858, 27890, |
| | | 26770, 26802, | 27154, 27186, | 27538, 27570, | 27922, 27954, |
| | | 26834, 26866 | 27218, 27250 | 27602, 27634 | 27986, 28018 |
| 26355 | 26387, | 26515, 26547, | 26899, 26931, | 27283, 27315, | 27667, 27699, |
| | 26419, | 26579, 26611, | 26963, 26995, | 27347, 27379, | 27731, 27763, |
| | 26451, | 26643, 26675, | 27027, 27059, | 27411, 27443, | 27795, 27827, |
| | 26483 | 26707, 26739, | 27091, 27123, | 27475, 27507, | 27859, 27891, |
| | | 26771, 26803, | 27155, 27187, | 27539, 27571, | 27923, 27955, |
| | | 26835, 26867 | 27219, 27251 | 27603, 27635 | 27987, 28019 |
| 26356 | 26388, | 26516, 26548, | 26900, 26932, | 27284, 27316, | 27668, 27700, |
| | 26420, | 26580, 26612, | 26964, 26996, | 27348, 27380, | 27732, 27764, |
| | 26452, | 26644, 26676, | 27028, 27060, | 27412, 27444, | 27796, 27828, |
| | 26484 | 26708, 26740, | 27092, 27124, | 27476, 27508, | 27860, 27892, |
| | | 26772, 26804, | 27156, 27188, | 27540, 27572, | 27924, 27956, |
| | | 26836, 26868 | 27220, 27252 | 27604, 27636 | 27988, 28020 |
| 26357 | 26389, | 26517, 26549, | 26901, 26933, | 27285, 27317, | 27669, 27701, |
| | 26421, | 26581, 26613, | 26965, 26997, | 27349, 27381, | 27733, 27765, |
| | 26453, | 26645, 26677, | 27029, 27061, | 27413, 27445, | 27797, 27829, |
| | 26485 | 26709, 26741, | 27093, 27125, | 27477, 27509, | 27861, 27893, |
| | | 26773, 26805, | 27157, 27189, | 27541, 27573, | 27925, 27957, |
| | | 26837, 26869 | 27221, 27253 | 27605, 27637 | 27989, 28021 |
| 26358 | 26390, | 26518, 26550, | 26902, 26934, | 27286, 27318, | 27670, 27702, |
| | 26422, | 26582, 26614, | 26966, 26998, | 27350, 27382, | 27734, 27766, |
| | 26454, | 26646, 26678, | 27030, 27062, | 27414, 27446, | 27798, 27830, |
| | 26486 | 26710, 26742, | 27094, 27126, | 27478, 27510, | 27862, 27894, |
| | | 26774, 26806, | 27158, 27190, | 27542, 27574, | 27926, 27958, |
| | | 26838, 26870 | 27222, 27254 | 27606, 27638 | 27990, 28022 |
| 26359 | 26391, | 26519, 26551, | 26903, 26935, | 27287, 27319, | 27671, 27703, |
| | 26423, | 26583, 26615, | 26967, 26999, | 27351, 27383, | 27735, 27767, |
| | 26455, | 26647, 26679, | 27031, 27063, | 27415, 27447, | 27799, 27831, |
| | 26487 | 26711, 26743, | 27095, 27127, | 27479, 27511, | 27863, 27895, |
| | | 26775, 26807, | 27159, 27191, | 27543, 27575, | 27927, 27959, |
| | | 26839, 26871 | 27223, 27255 | 27607, 27639 | 27991, 28023 |
| 26360 | 26392, | 26520, 26552, | 26904, 26936, | 27288, 27320, | 27672, 27704, |
| | 26424, | 26584, 26616, | 26968, 27000, | 27352, 27384, | 27736, 27768, |
| | 26456, | 26648, 26680, | 27032, 27064, | 27416, 27448, | 27800, 27832, |
| | 26488 | 26712, 26744, | 27096, 27128, | 27480, 27512, | 27864, 27896, |
| | | 26776, 26808, | 27160, 27192, | 27544, 27576, | 27928, 27960, |
| | | 26840, 26872 | 27224, 27256 | 27608, 27640 | 27992, 28024 |
| 26361 | 26393, | 26521, 26553, | 26905, 26937, | 27289, 27321, | 27673, 27705, |
| | 26425, | 26585, 26617, | 26969, 27001, | 27353, 27385, | 27737, 27769, |
| | 26457, | 26649, 26681, | 27033, 27065, | 27417, 27449, | 27801, 27833, |
| | 26489 | 26713, 26745, | 27097, 27129, | 27481, 27513, | 27865, 27897, |
| | | 26777, 26809, | 27161, 27193, | 27545, 27577, | 27929, 27961, |
| | | 26841, 26873 | 27225, 27257 | 27609, 27641 | 27993, 28025 |
| 26362 | 26394, | 26522, 26554, | 26906, 26938, | 27290, 27322, | 27674, 27706, |
| | 26426, | 26586, 26618, | 26970, 27002, | 27354, 27386, | 27738, 27770, |
| | 26458, | 26650, 26682, | 27034, 27066, | 27418, 27450, | 27802, 27834, |
| | 26490 | 26714, 26746, | 27098, 27130, | 27482, 27514, | 27866, 27898, |
| | | 26778, 26810, | 27162, 27194, | 27546, 27578, | 27930, 27962, |
| | | 26842, 26874 | 27226, 27258 | 27610, 27642 | 27994, 28026 |
| 26363 | 26395, | 26523, 26555, | 26907, 26939, | 27291, 27323, | 27675, 27707, |
| | 26427, | 26587, 26619, | 26971, 27003, | 27355, 27387, | 27739, 27771, |
| | 26459, | 26651, 26683, | 27035, 27067, | 27419, 27451, | 27803, 27835, |
| | 26491 | 26715, 26747, | 27099, 27131, | 27483, 27515, | 27867, 27899, |
| | | 26779, 26811, | 27163, 27195, | 27547, 27579, | 27931, 27963, |
| | | 26843, 26875 | 27227, 27259 | 27611, 27643 | 27995, 28027 |
| 26364 | 26396, | 26524, 26556, | 26908, 26940, | 27292, 27324, | 27676, 27708, |
| | 26428, | 26588, 26620, | 26972, 27004, | 27356, 27388, | 27740, 27772, |
| | 26460, | 26652, 26684, | 27036, 27068, | 27420, 27452, | 27804, 27836, |
| | 26492 | 26716, 26748, | 27100, 27132, | 27484, 27516, | 27868, 27900, |
| | | 26780, 26812, | 27164, 27196, | 27548, 27580, | 27932, 27964, |
| | | 26844, 26876 | 27228, 27260 | 27612, 27644 | 27996, 28028 |
| 26365 | 26397, | 26525, 26557, | 26909, 26941, | 27293, 27325, | 27677, 27709, |
| | 26429, | 26589, 26621, | 26973, 27005, | 27357, 27389, | 27741, 27773, |
| | 26461, | 26653, 26685, | 27037, 27069, | 27421, 27453, | 27805, 27837, |
| | 26493 | 26717, 26749, | 27101, 27133, | 27485, 27517, | 27869, 27901, |
| | | 26781, 26813, | 27165, 27197, | 27549, 27581, | 27933, 27965, |
| | | 26845, 26877 | 27229, 27261 | 27613, 27645 | 27997, 28029 |
| 26366 | 26398, | 26526, 26558, | 26910, 26942, | 27294, 27326, | 27678, 27710, |
| | 26430, | 26590, 26622, | 26974, 27006, | 27358, 27390, | 27742, 27774, |
| | 26462, | 26654, 26686, | 27038, 27070, | 27422, 27454, | 27806, 27838, |
| | 26494 | 26718, 26750, | 27102, 27134, | 27486, 27518, | 27870, 27902, |
| | | 26782, 26814, | 27166, 27198, | 27550, 27582, | 27934, 27966, |
| | | 26846, 26878 | 27230, 27262 | 27614, 27646 | 27998, 28030 |
| 26367 | 26399, | 26527, 26559, | 26911, 26943, | 27295, 27327, | 27679, 27711, |
| | 26431, | 26591, 26623, | 26975, 27007, | 27359, 27391, | 27743, 27775, |
| | 26463, | 26655, 26687, | 27039, 27071, | 27423, 27455, | 27807, 27839, |
| | 26495 | 26719, 26751, | 27103, 27135, | 27487, 27519, | 27871, 27903, |
| | | 26783, 26815, | 27167, 27199, | 27551, 27583, | 27935, 27967, |
| | | 26847, 26879 | 27231, 27263 | 27615, 27647 | 27999, 28031 |
| 26368 | 26400, | 26528, 26560, | 26912, 26944, | 27296, 27328, | 27680, 27712, |
| | 26432, | 26592, 26624, | 26976, 27008, | 27360, 27392, | 27744, 27776, |
| | 26464, | 26656, 26688, | 27040, 27072, | 27424, 27456, | 27808, 27840, |
| | 26496 | 26720, 26752, | 27104, 27136, | 27488, 27520, | 27872, 27904, |
| | | 26784, 26816, | 27168, 27200, | 27552, 27584, | 27936, 27968, |
| | | 26848, 26880 | 27232, 27264 | 27616, 27648 | 28000, 28032 |
| 26369 | 26401, | 26529, 26561, | 26913, 26945, | 27297, 27329, | 27681, 27713, |
| | 26433, | 26593, 26625, | 26977, 27009, | 27361, 27393, | 27745, 27777, |
| | 26465, | 26657, 26689, | 27041, 27073, | 27425, 27457, | 27809, 27841, |
| | 26497 | 26721, 26753, | 27105, 27137, | 27489, 27521, | 27873, 27905, |
| | | 26785, 26817, | 27169, 27201, | 27553, 27585, | 27937, 27969, |
| | | 26849, 26881 | 27233, 27265 | 27617, 27649 | 28001, 28033 |
| 26370 | 26402, | 26530, 26562, | 26914, 26946, | 27298, 27330, | 27682, 27714, |
| | 26434, | 26594, 26626, | 26978, 27010, | 27362, 27394, | 27746, 27778, |
| | 26466, | 26658, 26690, | 27042, 27074, | 27426, 27458, | 27810, 27842, |
| | 26498 | 26722, 26754, | 27106, 27138, | 27490, 27522, | 27874, 27906, |
| | | 26786, 26818, | 27170, 27202, | 27554, 27586, | 27938, 27970, |
| | | 26850, 26882 | 27234, 27266 | 27618, 27650 | 28002, 28034 |
| 26371 | 26403, | 26531, 26563, | 26915, 26947, | 27299, 27331, | 27683, 27715, |
| | 26435, | 26595, 26627, | 26979, 27011, | 27363, 27395, | 27747, 27779, |
| | 26467, | 26659, 26691, | 27043, 27075, | 27427, 27459, | 27811, 27843, |
| | 26499 | 26723, 26755, | 27107, 27139, | 27491, 27523, | 27875, 27907, |
| | | 26787, 26819, | 27171, 27203, | 27555, 27587, | 27939, 27971, |
| | | 26851, 26883 | 27235, 27267 | 27619, 27651 | 28003, 28035 |
| 26372 | 26404, | 26532, 26564, | 26916, 26948, | 27300, 27332, | 27684, 27716, |
| | 26436, | 26596, 26628, | 26980, 27012, | 27364, 27396, | 27748, 27780, |
| | 26468, | 26660, 26692, | 27044, 27076, | 27428, 27460, | 27812, 27844, |
| | 26500 | 26724, 26756, | 27108, 27140, | 27492, 27524, | 27876, 27908, |
| | | 26788, 26820, | 27172, 27204, | 27556, 27588, | 27940, 27972, |
| | | 26852, 26884 | 27236, 27268 | 27620, 27652 | 28004, 28036 |

TABLE 3.5
Preferred LASV prefusion-stabilized (GPCmut5) constructs

| | | RNA designs and SEQ ID NOs | | | | |
|---|---|---|---|---|---|---|
| PRT | CDS | a-1 | a-2 | b-4 | i-2 | i-3 |

| | | | | | |
|---|---|---|---|---|---|
| 28037 | 28069, | 28197, 28229, | 28581, 28613, | 28965, 28997, | 29349, 29381, |
| | 28101, | 28261, 28293, | 28645, 28677, | 29029, 29061, | 29413, 29445, |
| | 28133, | 28325, 28357, | 28709, 28741, | 29093, 29125, | 29477, 29509, |
| | 28165 | 28389, 28421, | 28773, 28805, | 29157, 29189, | 29541, 29573, |
| | | 28453, 28485, | 28837, 28869, | 29221, 29253, | 29605, 29637, |
| | | 28517, 28549 | 28901, 28933 | 29285, 29317 | 29669, 29701 |
| 28038 | 28070, | 28198, 28230, | 28582, 28614, | 28966, 28998, | 29350, 29382, |
| | 28102, | 28262, 28294, | 28646, 28678, | 29030, 29062, | 29414, 29446, |
| | 28134, | 28326, 28358, | 28710, 28742, | 29094, 29126, | 29478, 29510, |
| | 28166 | 28390, 28422, | 28774, 28806, | 29158, 29190, | 29542, 29574, |
| | | 28454, 28486, | 28838, 28870, | 29222, 29254, | 29606, 29638, |
| | | 28518, 28550 | 28902, 28934 | 29286, 29318 | 29670, 29702 |
| 28039 | 28071, | 28199, 28231, | 28583, 28615, | 28967, 28999, | 29351, 29383, |
| | 28103, | 28263, 28295, | 28647, 28679, | 29031, 29063, | 29415, 29447, |
| | 28135, | 28327, 28359, | 28711, 28743, | 29095, 29127, | 29479, 29511, |
| | 28167 | 28391, 28423, | 28775, 28807, | 29159, 29191, | 29543, 29575, |
| | | 28455, 28487, | 28839, 28871, | 29223, 29255, | 29607, 29639, |
| | | 28519, 28551 | 28903, 28935 | 29287, 29319 | 29671, 29703 |
| 28040 | 28072, | 28200, 28232, | 28584, 28616, | 28968, 29000, | 29352, 29384, |
| | 28104, | 28264, 28296, | 28648, 28680, | 29032, 29064, | 29416, 29448, |
| | 28136, | 28328, 28360, | 28712, 28744, | 29096, 29128, | 29480, 29512, |
| | 28168 | 28392, 28424, | 28776, 28808, | 29160, 29192, | 29544, 29576, |
| | | 28456, 28488, | 28840, 28872, | 29224, 29256, | 29608, 29640, |
| | | 28520, 28552 | 28904, 28936 | 29288, 29320 | 29672, 29704 |
| 28041 | 28073, | 28201, 28233, | 28585, 28617, | 28969, 29001, | 29353, 29385, |
| | 28105, | 28265, 28297, | 28649, 28681, | 29033, 29065, | 29417, 29449, |
| | 28137, | 28329, 28361, | 28713, 28745, | 29097, 29129, | 29481, 29513, |
| | 28169 | 28393, 28425, | 28777, 28809, | 29161, 29193, | 29545, 29577, |
| | | 28457, 28489, | 28841, 28873, | 29225, 29257, | 29609, 29641, |
| | | 28521, 28553 | 28905, 28937 | 29289, 29321 | 29673, 29705 |
| 28042 | 28074, | 28202, 28234, | 28586, 28618, | 28970, 29002, | 29354, 29386, |
| | 28106, | 28266, 28298, | 28650, 28682, | 29034, 29066, | 29418, 29450, |
| | 28138, | 28330, 28362, | 28714, 28746, | 29098, 29130, | 29482, 29514, |
| | 28170 | 28394, 28426, | 28778, 28810, | 29162, 29194, | 29546, 29578, |
| | | 28458, 28490, | 28842, 28874, | 29226, 29258, | 29610, 29642, |
| | | 28522, 28554 | 28906, 28938 | 29290, 29322 | 29674, 29706 |
| 28043 | 28075, | 28203, 28235, | 28587, 28619, | 28971, 29003, | 29355, 29387, |
| | 28107, | 28267, 28299, | 28651, 28683, | 29035, 29067, | 29419, 29451, |
| | 28139, | 28331, 28363, | 28715, 28747, | 29099, 29131, | 29483, 29515, |
| | 28171 | 28395, 28427, | 28779, 28811, | 29163, 29195, | 29547, 29579, |
| | | 28459, 28491, | 28843, 28875, | 29227, 29259, | 29611, 29643, |
| | | 28523, 28555 | 28907, 28939 | 29291, 29323 | 29675, 29707 |
| 28044 | 28076, | 28204, 28236, | 28588, 28620, | 28972, 29004, | 29356, 29388, |
| | 28108, | 28268, 28300, | 28652, 28684, | 29036, 29068, | 29420, 29452, |
| | 28140, | 28332, 28364, | 28716, 28748, | 29100, 29132, | 29484, 29516, |
| | 28172 | 28396, 28428, | 28780, 28812, | 29164, 29196, | 29548, 29580, |
| | | 28460, 28492, | 28844, 28876, | 29228, 29260, | 29612, 29644, |
| | | 28524, 28556 | 28908, 28940 | 29292, 29324 | 29676, 29708 |
| 28045 | 28077, | 28205, 28237, | 28589, 28621, | 28973, 29005, | 29357, 29389, |
| | 28109, | 28269, 28301, | 28653, 28685, | 29037, 29069, | 29421, 29453, |
| | 28141, | 28333, 28365, | 28717, 28749, | 29101, 29133, | 29485, 29517, |
| | 28173 | 28397, 28429, | 28781, 28813, | 29165, 29197, | 29549, 29581, |
| | | 28461, 28493, | 28845, 28877, | 29229, 29261, | 29613, 29645, |
| | | 28525, 28557 | 28909, 28941 | 29293, 29325 | 29677, 29709 |
| 28046 | 28078, | 28206, 28238, | 28590, 28622, | 28974, 29006, | 29358, 29390, |
| | 28110, | 28270, 28302, | 28654, 28686, | 29038, 29070, | 29422, 29454, |
| | 28142, | 28334, 28366, | 28718, 28750, | 29102, 29134, | 29486, 29518, |
| | 28174 | 28398, 28430, | 28782, 28814, | 29166, 29198, | 29550, 29582, |
| | | 28462, 28494, | 28846, 28878, | 29230, 29262, | 29614, 29646, |
| | | 28526, 28558 | 28910, 28942 | 29294, 29326 | 29678, 29710 |
| 28047 | 28079, | 28207, 28239, | 28591, 28623, | 28975, 29007, | 29359, 29391, |
| | 28111, | 28271, 28303, | 28655, 28687, | 29039, 29071, | 29423, 29455, |
| | 28143, | 28335, 28367, | 28719, 28751, | 29103, 29135, | 29487, 29519, |
| | 28175 | 28399, 28431, | 28783, 28815, | 29167, 29199, | 29551, 29583, |
| | | 28463, 28495, | 28847, 28879, | 29231, 29263, | 29615, 29647, |
| | | 28527, 28559 | 28911, 28943 | 29295, 29327 | 29679, 29711 |
| 28048 | 28080, | 28208, 28240, | 28592, 28624, | 28976, 29008, | 29360, 29392, |
| | 28112, | 28272, 28304, | 28656, 28688, | 29040, 29072, | 29424, 29456, |
| | 28144, | 28336, 28368, | 28720, 28752, | 29104, 29136, | 29488, 29520, |
| | 28176 | 28400, 28432, | 28784, 28816, | 29168, 29200, | 29552, 29584, |
| | | 28464, 28496, | 28848, 28880, | 29232, 29264, | 29616, 29648, |
| | | 28528, 28560 | 28912, 28944 | 29296, 29328 | 29680, 29712 |
| 28049 | 28081, | 28209, 28241, | 28593, 28625, | 28977, 29009, | 29361, 29393, |
| | 28113, | 28273, 28305, | 28657, 28689, | 29041, 29073, | 29425, 29457, |
| | 28145, | 28337, 28369, | 28721, 28753, | 29105, 29137, | 29489, 29521, |
| | 28177 | 28401, 28433, | 28785, 28817, | 29169, 29201, | 29553, 29585, |
| | | 28465, 28497, | 28849, 28881, | 29233, 29265, | 29617, 29649, |
| | | 28529, 28561 | 28913, 28945 | 29297, 29329 | 29681, 29713 |
| 28050 | 28082, | 28210, 28242, | 28594, 28626, | 28978, 29010, | 29362, 29394, |
| | 28114, | 28274, 28306, | 28658, 28690, | 29042, 29074, | 29426, 29458, |
| | 28146, | 28338, 28370, | 28722, 28754, | 29106, 29138, | 29490, 29522, |
| | 28178 | 28402, 28434, | 28786, 28818, | 29170, 29202, | 29554, 29586, |
| | | 28466, 28498, | 28850, 28882, | 29234, 29266, | 29618, 29650, |
| | | 28530, 28562 | 28914, 28946 | 29298, 29330 | 29682, 29714 |
| 28051 | 28083, | 28211, 28243, | 28595, 28627, | 28979, 29011, | 29363, 29395, |
| | 28115, | 28275, 28307, | 28659, 28691, | 29043, 29075, | 29427, 29459, |
| | 28147, | 28339, 28371, | 28723, 28755, | 29107, 29139, | 29491, 29523, |
| | 28179 | 28403, 28435, | 28787, 28819, | 29171, 29203, | 29555, 29587, |
| | | 28467, 28499, | 28851, 28883, | 29235, 29267, | 29619, 29651, |
| | | 28531, 28563 | 28915, 28947 | 29299, 29331 | 29683, 29715 |
| 28052 | 28084, | 28212, 28244, | 28596, 28628, | 28980, 29012, | 29364, 29396, |
| | 28116, | 28276, 28308, | 28660, 28692, | 29044, 29076, | 29428, 29460, |
| | 28148, | 28340, 28372, | 28724, 28756, | 29108, 29140, | 29492, 29524, |
| | 28180 | 28404, 28436, | 28788, 28820, | 29172, 29204, | 29556, 29588, |
| | | 28468, 28500, | 28852, 28884, | 29236, 29268, | 29620, 29652, |
| | | 28532, 28564 | 28916, 28948 | 29300, 29332 | 29684, 29716 |
| 28053 | 28085, | 28213, 28245, | 28597, 28629, | 28981, 29013, | 29365, 29397, |
| | 28117, | 28277, 28309, | 28661, 28693, | 29045, 29077, | 29429, 29461, |
| | 28149, | 28341, 28373, | 28725, 28757, | 29109, 29141, | 29493, 29525, |
| | 28181 | 28405, 28437, | 28789, 28821, | 29173, 29205, | 29557, 29589, |
| | | 28469, 28501, | 28853, 28885, | 29237, 29269, | 29621, 29653, |
| | | 28533, 28565 | 28917, 28949 | 29301, 29333 | 29685, 29717 |
| 28054 | 28086, | 28214, 28246, | 28598, 28630, | 28982, 29014, | 29366, 29398, |
| | 28118, | 28278, 28310, | 28662, 28694, | 29046, 29078, | 29430, 29462, |
| | 28150, | 28342, 28374, | 28726, 28758, | 29110, 29142, | 29494, 29526, |
| | 28182 | 28406, 28438, | 28790, 28822, | 29174, 29206, | 29558, 29590, |
| | | 28470, 28502, | 28854, 28886, | 29238, 29270, | 29622, 29654, |
| | | 28534, 28566 | 28918, 28950 | 29302, 29334 | 29686, 29718 |
| 28055 | 28087, | 28215, 28247, | 28599, 28631, | 28983, 29015, | 29367, 29399, |
| | 28119, | 28279, 28311, | 28663, 28695, | 29047, 29079, | 29431, 29463, |
| | 28151, | 28343, 28375, | 28727, 28759, | 29111, 29143, | 29495, 29527, |
| | 28183 | 28407, 28439, | 28791, 28823, | 29175, 29207, | 29559, 29591, |
| | | 28471, 28503, | 28855, 28887, | 29239, 29271, | 29623, 29655, |
| | | 28535, 28567 | 28919, 28951 | 29303, 29335 | 29687, 29719 |
| 28056 | 28088, | 28216, 28248, | 28600, 28632, | 28984, 29016, | 29368, 29400, |
| | 28120, | 28280, 28312, | 28664, 28696, | 29048, 29080, | 29432, 29464, |
| | 28152, | 28344, 28376, | 28728, 28760, | 29112, 29144, | 29496, 29528, |
| | 28184 | 28408, 28440, | 28792, 28824, | 29176, 29208, | 29560, 29592, |
| | | 28472, 28504, | 28856, 28888, | 29240, 29272, | 29624, 29656, |
| | | 28536, 28568 | 28920, 28952 | 29304, 29336 | 29688, 29720 |
| 28057 | 28089, | 28217, 28249, | 28601, 28633, | 28985, 29017, | 29369, 29401, |
| | 28121, | 28281, 28313, | 28665, 28697, | 29049, 29081, | 29433, 29465, |
| | 28153, | 28345, 28377, | 28729, 28761, | 29113, 29145, | 29497, 29529, |
| | 28185 | 28409, 28441, | 28793, 28825, | 29177, 29209, | 29561, 29593, |
| | | 28473, 28505, | 28857, 28889, | 29241, 29273, | 29625, 29657, |
| | | 28537, 28569 | 28921, 28953 | 29305, 29337 | 29689, 29721 |
| 28058 | 28090, | 28218, 28250, | 28602, 28634, | 28986, 29018, | 29370, 29402, |
| | 28122, | 28282, 28314, | 28666, 28698, | 29050, 29082, | 29434, 29466, |
| | 28154, | 28346, 28378, | 28730, 28762, | 29114, 29146, | 29498, 29530, |
| | 28186 | 28410, 28442, | 28794, 28826, | 29178, 29210, | 29562, 29594, |
| | | 28474, 28506, | 28858, 28890, | 29242, 29274, | 29626, 29658, |
| | | 28538, 28570 | 28922, 28954 | 29306, 29338 | 29690, 29722 |
| 28059 | 28091, | 28219, 28251, | 28603, 28635, | 28987, 29019, | 29371, 29403, |
| | 28123, | 28283, 28315, | 28667, 28699, | 29051, 29083, | 29435, 29467, |
| | 28155, | 28347, 28379, | 28731, 28763, | 29115, 29147, | 29499, 29531, |
| | 28187 | 28411, 28443, | 28795, 28827, | 29179, 29211, | 29563, 29595, |
| | | 28475, 28507, | 28859, 28891, | 29243, 29275, | 29627, 29659, |
| | | 28539, 28571 | 28923, 28955 | 29307, 29339 | 29691, 29723 |
| 28060 | 28092, | 28220, 28252, | 28604, 28636, | 28988, 29020, | 29372, 29404, |
| | 28124, | 28284, 28316, | 28668, 28700, | 29052, 29084, | 29436, 29468, |
| | 28156, | 28348, 28380, | 28732, 28764, | 29116, 29148, | 29500, 29532, |
| | 28188 | 28412, 28444, | 28796, 28828, | 29180, 29212, | 29564, 29596, |
| | | 28476, 28508, | 28860, 28892, | 29244, 29276, | 29628, 29660, |
| | | 28540, 28572 | 28924, 28956 | 29308, 29340 | 29692, 29724 |
| 28061 | 28093, | 28221, 28253, | 28605, 28637, | 28989, 29021, | 29373, 29405, |
| | 28125, | 28285, 28317, | 28669, 28701, | 29053, 29085, | 29437, 29469, |
| | 28157, | 28349, 28381, | 28733, 28765, | 29117, 29149, | 29501, 29533, |
| | 28189 | 28413, 28445, | 28797, 28829, | 29181, 29213, | 29565, 29597, |
| | | 28477, 28509, | 28861, 28893, | 29245, 29277, | 29629, 29661, |
| | | 28541, 28573 | 28925, 28957 | 29309, 29341 | 29693, 29725 |
| 28062 | 28094, | 28222, 28254, | 28606, 28638, | 28990, 29022, | 29374, 29406, |
| | 28126, | 28286, 28318, | 28670, 28702, | 29054, 29086, | 29438, 29470, |
| | 28158, | 28350, 28382, | 28734, 28766, | 29118, 29150, | 29502, 29534, |
| | 28190 | 28414, 28446, | 28798, 28830, | 29182, 29214, | 29566, 29598, |
| | | 28478, 28510, | 28862, 28894, | 29246, 29278, | 29630, 29662, |
| | | 28542, 28574 | 28926, 28958 | 29310, 29342 | 29694, 29726 |
| 28063 | 28095, | 28223, 28255, | 28607, 28639, | 28991, 29023, | 29375, 29407, |
| | 28127, | 28287, 28319, | 28671, 28703, | 29055, 29087, | 29439, 29471, |
| | 28159, | 28351, 28383, | 28735, 28767, | 29119, 29151, | 29503, 29535, |
| | 28191 | 28415, 28447, | 28799, 28831, | 29183, 29215, | 29567, 29599, |
| | | 28479, 28511, | 28863, 28895, | 29247, 29279, | 29631, 29663, |
| | | 28543, 28575 | 28927, 28959 | 29311, 29343 | 29695, 29727 |
| 28064 | 28096, | 28224, 28256, | 28608, 28640, | 28992, 29024, | 29376, 29408, |
| | 28128, | 28288, 28320, | 28672, 28704, | 29056, 29088, | 29440, 29472, |
| | 28160, | 28352, 28384, | 28736, 28768, | 29120, 29152, | 29504, 29536, |
| | 28192 | 28416, 28448, | 28800, 28832, | 29184, 29216, | 29568, 29600, |
| | | 28480, 28512, | 28864, 28896, | 29248, 29280, | 29632, 29664, |
| | | 28544, 28576 | 28928, 28960 | 29312, 29344 | 29696, 29728 |
| 28065 | 28097, | 28225, 28257, | 28609, 28641, | 28993, 29025, | 29377, 29409, |
| | 28129, | 28289, 28321, | 28673, 28705, | 29057, 29089, | 29441, 29473, |
| | 28161, | 28353, 28385, | 28737, 28769, | 29121, 29153, | 29505, 29537, |
| | 28193 | 28417, 28449, | 28801, 28833, | 29185, 29217, | 29569, 29601, |
| | | 28481, 28513, | 28865, 28897, | 29249, 29281, | 29633, 29665, |
| | | 28545, 28577 | 28929, 28961 | 29313, 29345 | 29697, 29729 |
| 28066 | 28098, | 28226, 28258, | 28610, 28642, | 28994, 29026, | 29378, 29410, |
| | 28130, | 28290, 28322, | 28674, 28706, | 29058, 29090, | 29442, 29474, |
| | 28162, | 28354, 28386, | 28738, 28770, | 29122, 29154, | 29506, 29538, |
| | 28194 | 28418, 28450, | 28802, 28834, | 29186, 29218, | 29570, 29602, |
| | | 28482, 28514, | 28866, 28898, | 29250, 29282, | 29634, 29666, |
| | | 28546, 28578 | 28930, 28962 | 29314, 29346 | 29698, 29730 |
| 28067 | 28099, | 28227, 28259, | 28611, 28643, | 28995, 29027, | 29379, 29411, |
| | 28131, | 28291, 28323, | 28675, 28707, | 29059, 29091, | 29443, 29475, |
| | 28163, | 28355, 28387, | 28739, 28771, | 29123, 29155, | 29507, 29539, |
| | 28195 | 28419, 28451, | 28803, 28835, | 29187, 29219, | 29571, 29603, |
| | | 28483, 28515, | 28867, 28899, | 29251, 29283, | 29635, 29667, |
| | | 28547, 28579 | 28931, 28963 | 29315, 29347 | 29699, 29731 |
| 28068 | 28100, | 28228, 28260, | 28612, 28644, | 28996, 29028, | 29380, 29412, |
| | 28132, | 28292, 28324, | 28676, 28708, | 29060, 29092, | 29444, 29476, |
| | 28164, | 28356, 28388, | 28740, 28772, | 29124, 29156, | 29508, 29540, |
| | 28196 | 28420, 28452, | 28804, 28836, | 29188, 29220, | 29572, 29604, |
| | | 28484, 28516, | 28868, 28900, | 29252, 29284, | 29636, 29668, |
| | | 28548, 28580 | 28932, 28964 | 29316, 29348 | 29700, 29732 |

TABLE 3.6
Preferred LASV prefusion-stabilized (GPCmut6) constructs

| | | RNA designs and SEQ ID NOs | | | | |
|---|---|---|---|---|---|---|
| PRT | CDS | a-1 | a-2 | b-4 | i-2 | i-3 |
| 29733 | 29765, | 29893, 29925, | 30277, 30309, | 30661, 30693, | | 31045, 31077, |
| | 29797, | 29957, 29989, | 30341, 30373, | 30725, 30757, | | 31109, 31141, |
| | 29829, | 30021, 30053, | 30405, 30437, | 30789, 30821, | | 31173, 31205, |
| | 29861 | 30085, 30117, | 30469, 30501, | 30853, 30885, | | 31237, 31269, |
| | | 30149, 30181, | 30533, 30565, | 30917, 30949, | | 31301, 31333, |
| | | 30213, 30245 | 30597, 30629 | 30981, 31013 | | 31365, 31397 |
| 29734 | 29766, | 29894, 29926, | 30278, 30310, | 30662, 30694, | | 31046, 31078, |
| | 29798, | 29958, 29990, | 30342, 30374, | 30726, 30758, | | 31110, 31142, |
| | 29830, | 30022, 30054, | 30406, 30438, | 30790, 30822, | | 31174, 31206, |
| | 29862 | 30086, 30118, | 30470, 30502, | 30854, 30886, | | 31238, 31270, |
| | | 30150, 30182, | 30534, 30566, | 30918, 30950, | | 31302, 31334, |
| | | 30214, 30246 | 30598, 30630 | 30982, 31014 | | 31366, 31398 |
| 29735 | 29767, | 29895, 29927, | 30279, 30311, | 30663, 30695, | | 31047, 31079, |
| | 29799, | 29959, 29991, | 30343, 30375, | 30727, 30759, | | 31111, 31143, |
| | 29831, | 30023, 30055, | 30407, 30439, | 30791, 30823, | | 31175, 31207, |
| | 29863 | 30087, 30119, | 30471, 30503, | 30855, 30887, | | 31239, 31271, |
| | | 30151, 30183, | 30535, 30567, | 30919, 30951, | | 31303, 31335, |
| | | 30215, 30247 | 30599, 30631 | 30983, 31015 | | 31367, 31399 |
| 29736 | 29768, | 29896, 29928, | 30280, 30312, | 30664, 30696, | | 31048, 31080, |
| | 29800, | 29960, 29992, | 30344, 30376, | 30728, 30760, | | 31112, 31144, |
| | 29832, | 30024, 30056, | 30408, 30440, | 30792, 30824, | | 31176, 31208, |
| | 29864 | 30088, 30120, | 30472, 30504, | 30856, 30888, | | 31240, 31272, |
| | | 30152, 30184, | 30536, 30568, | 30920, 30952, | | 31304, 31336, |
| | | 30216, 30248 | 30600, 30632 | 30984, 31016 | | 31368, 31400 |
| 29737 | 29769, | 29897, 29929, | 30281, 30313, | 30665, 30697, | | 31049, 31081, |
| | 29801, | 29961, 29993, | 30345, 30377, | 30729, 30761, | | 31113, 31145, |
| | 29833, | 30025, 30057, | 30409, 30441, | 30793, 30825, | | 31177, 31209, |
| | 29865 | 30089, 30121, | 30473, 30505, | 30857, 30889, | | 31241, 31273, |
| | | 30153, 30185, | 30537, 30569, | 30921, 30953, | | 31305, 31337, |
| | | 30217, 30249 | 30601, 30633 | 30985, 31017 | | 31369, 31401 |
| 29738 | 29770, | 29898, 29930, | 30282, 30314, | 30666, 30698, | | 31050, 31082, |
| | 29802, | 29962, 29994, | 30346, 30378, | 30730, 30762, | | 31114, 31146, |
| | 29834, | 30026, 30058, | 30410, 30442, | 30794, 30826, | | 31178, 31210, |
| | 29866 | 30090, 30122, | 30474, 30506, | 30858, 30890, | | 31242, 31274, |
| | | 30154, 30186, | 30538, 30570, | 30922, 30954, | | 31306, 31338, |
| | | 30218, 30250 | 30602, 30634 | 30986, 31018 | | 31370, 31402 |
| 29739 | 29771, | 29899, 29931, | 30283, 30315, | 30667, 30699, | | 31051, 31083, |
| | 29803, | 29963, 29995, | 30347, 30379, | 30731, 30763, | | 31115, 31147, |
| | 29835, | 30027, 30059, | 30411, 30443, | 30795, 30827, | | 31179, 31211, |
| | 29867 | 30091, 30123, | 30475, 30507, | 30859, 30891, | | 31243, 31275, |
| | | 30155, 30187, | 30539, 30571, | 30923, 30955, | | 31307, 31339, |
| | | 30219, 30251 | 30603, 30635 | 30987, 31019 | | 31371, 31403 |
| 29740 | 29772, | 29900, 29932, | 30284, 30316, | 30668, 30700, | | 31052, 31084, |
| | 29804, | 29964, 29996, | 30348, 30380, | 30732, 30764, | | 31116, 31148, |
| | 29836, | 30028, 30060, | 30412, 30444, | 30796, 30828, | | 31180, 31212, |
| | 29868 | 30092, 30124, | 30476, 30508, | 30860, 30892, | | 31244, 31276, |
| | | 30156, 30188, | 30540, 30572, | 30924, 30956, | | 31308, 31340, |
| | | 30220, 30252 | 30604, 30636 | 30988, 31020 | | 31372, 31404 |
| 29741 | 29773, | 29901, 29933, | 30285, 30317, | 30669, 30701, | | 31053, 31085, |
| | 29805, | 29965, 29997, | 30349, 30381, | 30733, 30765, | | 31117, 31149, |
| | 29837, | 30029, 30061, | 30413, 30445, | 30797, 30829, | | 31181, 31213, |
| | 29869 | 30093, 30125, | 30477, 30509, | 30861, 30893, | | 31245, 31277, |
| | | 30157, 30189, | 30541, 30573, | 30925, 30957, | | 31309, 31341, |
| | | 30221, 30253 | 30605, 30637 | 30989, 31021 | | 31373, 31405 |
| 29742 | 29774, | 29902, 29934, | 30286, 30318, | 30670, 30702, | | 31054, 31086, |
| | 29806, | 29966, 29998, | 30350, 30382, | 30734, 30766, | | 31118, 31150, |
| | 29838, | 30030, 30062, | 30414, 30446, | 30798, 30830, | | 31182, 31214, |
| | 29870 | 30094, 30126, | 30478, 30510, | 30862, 30894, | | 31246, 31278, |
| | | 30158, 30190, | 30542, 30574, | 30926, 30958, | | 31310, 31342, |
| | | 30222, 30254 | 30606, 30638 | 30990, 31022 | | 31374, 31406 |
| 29743 | 29775, | 29903, 29935, | 30287, 30319, | 30671, 30703, | | 31055, 31087, |
| | 29807, | 29967, 29999, | 30351, 30383, | 30735, 30767, | | 31119, 31151, |
| | 29839, | 30031, 30063, | 30415, 30447, | 30799, 30831, | | 31183, 31215, |
| | 29871 | 30095, 30127, | 30479, 30511, | 30863, 30895, | | 31247, 31279, |
| | | 30159, 30191, | 30543, 30575, | 30927, 30959, | | 31311, 31343, |
| | | 30223, 30255 | 30607, 30639 | 30991, 31023 | | 31375, 31407 |
| 29744 | 29776, | 29904, 29936, | 30288, 30320, | 30672, 30704, | | 31056, 31088, |
| | 29808, | 29968, 30000, | 30352, 30384, | 30736, 30768, | | 31120, 31152, |
| | 29840, | 30032, 30064, | 30416, 30448, | 30800, 30832, | | 31184, 31216, |
| | 29872 | 30096, 30128, | 30480, 30512, | 30864, 30896, | | 31248, 31280, |
| | | 30160, 30192, | 30544, 30576, | 30928, 30960, | | 31312, 31344, |
| | | 30224, 30256 | 30608, 30640 | 30992, 31024 | | 31376, 31408 |
| 29745 | 29777, | 29905, 29937, | 30289, 30321, | 30673, 30705, | | 31057, 31089, |
| | 29809, | 29969, 30001, | 30353, 30385, | 30737, 30769, | | 31121, 31153, |
| | 29841, | 30033, 30065, | 30417, 30449, | 30801, 30833, | | 31185, 31217, |
| | 29873 | 30097, 30129, | 30481, 30513, | 30865, 30897, | | 31249, 31281, |
| | | 30161, 30193, | 30545, 30577, | 30929, 30961, | | 31313, 31345, |
| | | 30225, 30257 | 30609, 30641 | 30993, 31025 | | 31377, 31409 |
| 29746 | 29778, | 29906, 29938, | 30290, 30322, | 30674, 30706, | | 31058, 31090, |
| | 29810, | 29970, 30002, | 30354, 30386, | 30738, 30770, | | 31122, 31154, |
| | 29842, | 30034, 30066, | 30418, 30450, | 30802, 30834, | | 31186, 31218, |
| | 29874 | 30098, 30130, | 30482, 30514, | 30866, 30898, | | 31250, 31282, |
| | | 30162, 30194, | 30546, 30578, | 30930, 30962, | | 31314, 31346, |
| | | 30226, 30258 | 30610, 30642 | 30994, 31026 | | 31378, 31410 |
| 29747 | 29779, | 29907, 29939, | 30291, 30323, | 30675, 30707, | | 31059, 31091, |
| | 29811, | 29971, 30003, | 30355, 30387, | 30739, 30771, | | 31123, 31155, |
| | 29843, | 30035, 30067, | 30419, 30451, | 30803, 30835, | | 31187, 31219, |
| | 29875 | 30099, 30131, | 30483, 30515, | 30867, 30899, | | 31251, 31283, |
| | | 30163, 30195, | 30547, 30579, | 30931, 30963, | | 31315, 31347, |
| | | 30227, 30259 | 30611, 30643 | 30995, 31027 | | 31379, 31411 |
| 29748 | 29780, | 29908, 29940, | 30292, 30324, | 30676, 30708, | | 31060, 31092, |
| | 29812, | 29972, 30004, | 30356, 30388, | 30740, 30772, | | 31124, 31156, |
| | 29844, | 30036, 30068, | 30420, 30452, | 30804, 30836, | | 31188, 31220, |
| | 29876 | 30100, 30132, | 30484, 30516, | 30868, 30900, | | 31252, 31284, |
| | | 30164, 30196, | 30548, 30580, | 30932, 30964, | | 31316, 31348, |
| | | 30228, 30260 | 30612, 30644 | 30996, 31028 | | 31380, 31412 |
| 29749 | 29781, | 29909, 29941, | 30293, 30325, | 30677, 30709, | | 31061, 31093, |
| | 29813, | 29973, 30005, | 30357, 30389, | 30741, 30773, | | 31125, 31157, |
| | 29845, | 30037, 30069, | 30421, 30453, | 30805, 30837, | | 31189, 31221, |
| | 29877 | 30101, 30133, | 30485, 30517, | 30869, 30901, | | 31253, 31285, |
| | | 30165, 30197, | 30549, 30581, | 30933, 30965, | | 31317, 31349, |
| | | 30229, 30261 | 30613, 30645 | 30997, 31029 | | 31381, 31413 |
| 29750 | 29782, | 29910, 29942, | 30294, 30326, | 30678, 30710, | | 31062, 31094, |
| | 29814, | 29974, 30006, | 30358, 30390, | 30742, 30774, | | 31126, 31158, |
| | 29846, | 30038, 30070, | 30422, 30454, | 30806, 30838, | | 31190, 31222, |
| | 29878 | 30102, 30134, | 30486, 30518, | 30870, 30902, | | 31254, 31286, |
| | | 30166, 30198, | 30550, 30582, | 30934, 30966, | | 31318, 31350, |
| | | 30230, 30262 | 30614, 30646 | 30998, 31030 | | 31382, 31414 |
| 29751 | 29783, | 29911, 29943, | 30295, 30327, | 30679, 30711, | | 31063, 31095, |
| | 29815, | 29975, 30007, | 30359, 30391, | 30743, 30775, | | 31127, 31159, |
| | 29847, | 30039, 30071, | 30423, 30455, | 30807, 30839, | | 31191, 31223, |
| | 29879 | 30103, 30135, | 30487, 30519, | 30871, 30903, | | 31255, 31287, |
| | | 30167, 30199, | 30551, 30583, | 30935, 30967, | | 31319, 31351, |
| | | 30231, 30263 | 30615, 30647 | 30999, 31031 | | 31383, 31415 |
| 29752 | 29784, | 29912, 29944, | 30296, 30328, | 30680, 30712, | | 31064, 31096, |
| | 29816, | 29976, 30008, | 30360, 30392, | 30744, 30776, | | 31128, 31160, |
| | 29848, | 30040, 30072, | 30424, 30456, | 30808, 30840, | | 31192, 31224, |
| | 29880 | 30104, 30136, | 30488, 30520, | 30872, 30904, | | 31256, 31288, |
| | | 30168, 30200, | 30552, 30584, | 30936, 30968, | | 31320, 31352, |
| | | 30232, 30264 | 30616, 30648 | 31000, 31032 | | 31384, 31416 |
| 29753 | 29785, | 29913, 29945, | 30297, 30329, | 30681, 30713, | | 31065, 31097, |
| | 29817, | 29977, 30009, | 30361, 30393, | 30745, 30777, | | 31129, 31161, |
| | 29849, | 30041, 30073, | 30425, 30457, | 30809, 30841, | | 31193, 31225, |
| | 29881 | 30105, 30137, | 30489, 30521, | 30873, 30905, | | 31257, 31289, |
| | | 30169, 30201, | 30553, 30585, | 30937, 30969, | | 31321, 31353, |
| | | 30233, 30265 | 30617, 30649 | 31001, 31033 | | 31385, 31417 |
| 29754 | 29786, | 29914, 29946, | 30298, 30330, | 30682, 30714, | | 31066, 31098, |
| | 29818, | 29978, 30010, | 30362, 30394, | 30746, 30778, | | 31130, 31162, |
| | 29850, | 30042, 30074, | 30426, 30458, | 30810, 30842, | | 31194, 31226, |
| | 29882 | 30106, 30138, | 30490, 30522, | 30874, 30906, | | 31258, 31290, |
| | | 30170, 30202, | 30554, 30586, | 30938, 30970, | | 31322, 31354, |
| | | 30234, 30266 | 30618, 30650 | 31002, 31034 | | 31386, 31418 |
| 29755 | 29787, | 29915, 29947, | 30299, 30331, | 30683, 30715, | | 31067, 31099, |
| | 29819, | 29979, 30011, | 30363, 30395, | 30747, 30779, | | 31131, 31163, |
| | 29851, | 30043, 30075, | 30427, 30459, | 30811, 30843, | | 31195, 31227, |
| | 29883 | 30107, 30139, | 30491, 30523, | 30875, 30907, | | 31259, 31291, |
| | | 30171, 30203, | 30555, 30587, | 30939, 30971, | | 31323, 31355, |
| | | 30235, 30267 | 30619, 30651 | 31003, 31035 | | 31387, 31419 |
| 29756 | 29788, | 29916, 29948, | 30300, 30332, | 30684, 30716, | | 31068, 31100, |
| | 29820, | 29980, 30012, | 30364, 30396, | 30748, 30780, | | 31132, 31164, |
| | 29852, | 30044, 30076, | 30428, 30460, | 30812, 30844, | | 31196, 31228, |
| | 29884 | 30108, 30140, | 30492, 30524, | 30876, 30908, | | 31260, 31292, |
| | | 30172, 30204, | 30556, 30588, | 30940, 30972, | | 31324, 31356, |
| | | 30236, 30268 | 30620, 30652 | 31004, 31036 | | 31388, 31420 |
| 29757 | 29789, | 29917, 29949, | 30301, 30333, | 30685, 30717, | | 31069, 31101, |
| | 29821, | 29981, 30013, | 30365, 30397, | 30749, 30781, | | 31133, 31165, |
| | 29853, | 30045, 30077, | 30429, 30461, | 30813, 30845, | | 31197, 31229, |
| | 29885 | 30109, 30141, | 30493, 30525, | 30877, 30909, | | 31261, 31293, |
| | | 30173, 30205, | 30557, 30589, | 30941, 30973, | | 31325, 31357, |
| | | 30237, 30269 | 30621, 30653 | 31005, 31037 | | 31389, 31421 |
| 29758 | 29790, | 29918, 29950, | 30302, 30334, | 30686, 30718, | | 31070, 31102, |
| | 29822, | 29982, 30014, | 30366, 30398, | 30750, 30782, | | 31134, 31166, |
| | 29854, | 30046, 30078, | 30430, 30462, | 30814, 30846, | | 31198, 31230, |
| | 29886 | 30110, 30142, | 30494, 30526, | 30878, 30910, | | 31262, 31294, |
| | | 30174, 30206, | 30558, 30590, | 30942, 30974, | | 31326, 31358, |
| | | 30238, 30270 | 30622, 30654 | 31006, 31038 | | 31390, 31422 |
| 29759 | 29791, | 29919, 29951, | 30303, 30335, | 30687, 30719, | | 31071, 31103, |
| | 29823, | 29983, 30015, | 30367, 30399, | 30751, 30783, | | 31135, 31167, |
| | 29855, | 30047, 30079, | 30431, 30463, | 30815, 30847, | | 31199, 31231, |
| | 29887 | 30111, 30143, | 30495, 30527, | 30879, 30911, | | 31263, 31295, |
| | | 30175, 30207, | 30559, 30591, | 30943, 30975, | | 31327, 31359, |
| | | 30239, 30271 | 30623, 30655 | 31007, 31039 | | 31391, 31423 |
| 29760 | 29792, | 29920, 29952, | 30304, 30336, | 30688, 30720, | | 31072, 31104, |
| | 29824, | 29984, 30016, | 30368, 30400, | 30752, 30784, | | 31136, 31168, |
| | 29856, | 30048, 30080, | 30432, 30464, | 30816, 30848, | | 31200, 31232, |
| | 29888 | 30112, 30144, | 30496, 30528, | 30880, 30912, | | 31264, 31296, |
| | | 30176, 30208, | 30560, 30592, | 30944, 30976, | | 31328, 31360, |
| | | 30240, 30272 | 30624, 30656 | 31008, 31040 | | 31392, 31424 |
| 29761 | 29793, | 29921, 29953, | 30305, 30337, | 30689, 30721, | | 31073, 31105, |
| | 29825, | 29985, 30017, | 30369, 30401, | 30753, 30785, | | 31137, 31169, |
| | 29857, | 30049, 30081, | 30433, 30465, | 30817, 30849, | | 31201, 31233, |
| | 29889 | 30113, 30145, | 30497, 30529, | 30881, 30913, | | 31265, 31297, |
| | | 30177, 30209, | 30561, 30593, | 30945, 30977, | | 31329, 31361, |
| | | 30241, 30273 | 30625, 30657 | 31009, 31041 | | 31393, 31425 |
| 29762 | 29794, | 29922, 29954, | 30306, 30338, | 30690, 30722, | | 31074, 31106, |
| | 29826, | 29986, 30018, | 30370, 30402, | 30754, 30786, | | 31138, 31170, |
| | 29858, | 30050, 30082, | 30434, 30466, | 30818, 30850, | | 31202, 31234, |
| | 29890 | 30114, 30146, | 30498, 30530, | 30882, 30914, | | 31266, 31298, |
| | | 30178, 30210, | 30562, 30594, | 30946, 30978, | | 31330, 31362, |
| | | 30242, 30274 | 30626, 30658 | 31010, 31042 | | 31394, 31426 |
| 29763 | 29795, | 29923, 29955, | 30307, 30339, | 30691, 30723, | | 31075, 31107, |
| | 29827, | 29987, 30019, | 30371, 30403, | 30755, 30787, | | 31139, 31171, |
| | 29859, | 30051, 30083, | 30435, 30467, | 30819, 30851, | | 31203, 31235, |
| | 29891 | 30115, 30147, | 30499, 30531, | 30883, 30915, | | 31267, 31299, |
| | | 30179, 30211, | 30563, 30595, | 30947, 30979, | | 31331, 31363, |
| | | 30243, 30275 | 30627, 30659 | 31011, 31043 | | 31395, 31427 |
| 29764 | 29796, | 29924, 29956, | 30308, 30340, | 30692, 30724, | | 31076, 31108, |
| | 29828, | 29988, 30020, | 30372, 30404, | 30756, 30788, | | 31140, 31172, |
| | 29860, | 30052, 30084, | 30436, 30468, | 30820, 30852, | | 31204, 31236, |
| | 29892 | 30116, 30148, | 30500, 30532, | 30884, 30916, | | 31268, 31300, |
| | | 30180, 30212, | 30564, 30596, | 30948, 30980, | | 31332, 31364, |
| | | 30244, 30276 | 30628, 30660 | 31012, 31044 | | 31396, 31428 |

TABLE 3.7
Preferred LASV prefusion-stabilized (GPCmut7) constructs

| | | RNA designs and SEQ ID NOs | | | | |
|---|---|---|---|---|---|---|
| PRT | CDS | a-1 | a-2 | b-4 | i-2 | i-3 |
| 31429 | 31461, | 31589, 31621, | 31973, 32005, | 32357, 32389, | | 32741, 32773, |
| | 31493, | 31653, 31685, | 32037, 32069, | 32421, 32453, | | 32805, 32837, |
| | 31525, | 31717, 31749, | 32101, 32133, | 32485, 32517, | | 32869, 32901, |
| | 31557 | 31781, 31813, | 32165, 32197, | 32549, 32581, | | 32933, 32965, |
| | | 31845, 31877, | 32229, 32261, | 32613, 32645, | | 32997, 33029, |
| | | 31909, 31941 | 32293, 32325 | 32677, 32709 | | 33061, 33093 |
| 31430 | 31462, | 31590, 31622, | 31974, 32006, | 32358, 32390, | | 32742, 32774, |
| | 31494, | 31654, 31686, | 32038, 32070, | 32422, 32454, | | 32806, 32838, |
| | 31526, | 31718, 31750, | 32102, 32134, | 32486, 32518, | | 32870, 32902, |
| | 31558 | 31782, 31814, | 32166, 32198, | 32550, 32582, | | 32934, 32966, |
| | | 31846, 31878, | 32230, 32262, | 32614, 32646, | | 32998, 33030, |
| | | 31910, 31942 | 32294, 32326 | 32678, 32710 | | 33062, 33094 |
| 31431 | 31463, | 31591, 31623, | 31975, 32007, | 32359, 32391, | | 32743, 32775, |
| | 31495, | 31655, 31687, | 32039, 32071, | 32423, 32455, | | 32807, 32839, |
| | 31527, | 31719, 31751, | 32103, 32135, | 32487, 32519, | | 32871, 32903, |
| | 31559 | 31783, 31815, | 32167, 32199, | 32551, 32583, | | 32935, 32967, |
| | | 31847, 31879, | 32231, 32263, | 32615, 32647, | | 32999, 33031, |
| | | 31911, 31943 | 32295, 32327 | 32679, 32711 | | 33063, 33095 |
| 31432 | 31464, | 31592, 31624, | 31976, 32008, | 32360, 32392, | | 32744, 32776, |
| | 31496, | 31656, 31688, | 32040, 32072, | 32424, 32456, | | 32808, 32840, |
| | 31528, | 31720, 31752, | 32104, 32136, | 32488, 32520, | | 32872, 32904, |
| | 31560 | 31784, 31816, | 32168, 32200, | 32552, 32584, | | 32936, 32968, |
| | | 31848, 31880, | 32232, 32264, | 32616, 32648, | | 33000, 33032, |
| | | 31912, 31944 | 32296, 32328 | 32680, 32712 | | 33064, 33096 |
| 31433 | 31465, | 31593, 31625, | 31977, 32009, | 32361, 32393, | | 32745, 32777, |
| | 31497, | 31657, 31689, | 32041, 32073, | 32425, 32457, | | 32809, 32841, |
| | 31529, | 31721, 31753, | 32105, 32137, | 32489, 32521, | | 32873, 32905, |
| | 31561 | 31785, 31817, | 32169, 32201, | 32553, 32585, | | 32937, 32969, |
| | | 31849, 31881, | 32233, 32265, | 32617, 32649, | | 33001, 33033, |
| | | 31913, 31945 | 32297, 32329 | 32681, 32713 | | 33065, 33097 |
| 31434 | 31466, | 31594, 31626, | 31978, 32010, | 32362, 32394, | | 32746, 32778, |
| | 31498, | 31658, 31690, | 32042, 32074, | 32426, 32458, | | 32810, 32842, |
| | 31530, | 31722, 31754, | 32106, 32138, | 32490, 32522, | | 32874, 32906, |
| | 31562 | 31786, 31818, | 32170, 32202, | 32554, 32586, | | 32938, 32970, |
| | | 31850, 31882, | 32234, 32266, | 32618, 32650, | | 33002, 33034, |
| | | 31914, 31946 | 32298, 32330 | 32682, 32714 | | 33066, 33098 |
| 31435 | 31467, | 31595, 31627, | 31979, 32011, | 32363, 32395, | | 32747, 32779, |
| | 31499, | 31659, 31691, | 32043, 32075, | 32427, 32459, | | 32811, 32843, |
| | 31531, | 31723, 31755, | 32107, 32139, | 32491, 32523, | | 32875, 32907, |
| | 31563 | 31787, 31819, | 32171, 32203, | 32555, 32587, | | 32939, 32971, |
| | | 31851, 31883, | 32235, 32267, | 32619, 32651, | | 33003, 33035, |
| | | 31915, 31947 | 32299, 32331 | 32683, 32715 | | 33067, 33099 |
| 31436 | 31468, | 31596, 31628, | 31980, 32012, | 32364, 32396, | | 32748, 32780, |
| | 31500, | 31660, 31692, | 32044, 32076, | 32428, 32460, | | 32812, 32844, |
| | 31532, | 31724, 31756, | 32108, 32140, | 32492, 32524, | | 32876, 32908, |
| | 31564 | 31788, 31820, | 32172, 32204, | 32556, 32588, | | 32940, 32972, |
| | | 31852, 31884, | 32236, 32268, | 32620, 32652, | | 33004, 33036, |
| | | 31916, 31948 | 32300, 32332 | 32684, 32716 | | 33068, 33100 |
| 31437 | 31469, | 31597, 31629, | 31981, 32013, | 32365, 32397, | | 32749, 32781, |
| | 31501, | 31661, 31693, | 32045, 32077, | 32429, 32461, | | 32813, 32845, |
| | 31533, | 31725, 31757, | 32109, 32141, | 32493, 32525, | | 32877, 32909, |
| | 31565 | 31789, 31821, | 32173, 32205, | 32557, 32589, | | 32941, 32973, |
| | | 31853, 31885, | 32237, 32269, | 32621, 32653, | | 33005, 33037, |
| | | 31917, 31949 | 32301, 32333 | 32685, 32717 | | 33069, 33101 |
| 31438 | 31470, | 31598, 31630, | 31982, 32014, | 32366, 32398, | | 32750, 32782, |
| | 31502, | 31662, 31694, | 32046, 32078, | 32430, 32462, | | 32814, 32846, |
| | 31534, | 31726, 31758, | 32110, 32142, | 32494, 32526, | | 32878, 32910, |
| | 31566 | 31790, 31822, | 32174, 32206, | 32558, 32590, | | 32942, 32974, |
| | | 31854, 31886, | 32238, 32270, | 32622, 32654, | | 33006, 33038, |
| | | 31918, 31950 | 32302, 32334 | 32686, 32718 | | 33070, 33102 |
| 31439 | 31471, | 31599, 31631, | 31983, 32015, | 32367, 32399, | | 32751, 32783, |
| | 31503, | 31663, 31695, | 32047, 32079, | 32431, 32463, | | 32815, 32847, |
| | 31535, | 31727, 31759, | 32111, 32143, | 32495, 32527, | | 32879, 32911, |
| | 31567 | 31791, 31823, | 32175, 32207, | 32559, 32591, | | 32943, 32975, |
| | | 31855, 31887, | 32239, 32271, | 32623, 32655, | | 33007, 33039, |
| | | 31919, 31951 | 32303, 32335 | 32687, 32719 | | 33071, 33103 |
| 31440 | 31472, | 31600, 31632, | 31984, 32016, | 32368, 32400, | | 32752, 32784, |
| | 31504, | 31664, 31696, | 32048, 32080, | 32432, 32464, | | 32816, 32848, |
| | 31536, | 31728, 31760, | 32112, 32144, | 32496, 32528, | | 32880, 32912, |
| | 31568 | 31792, 31824, | 32176, 32208, | 32560, 32592, | | 32944, 32976, |
| | | 31856, 31888, | 32240, 32272, | 32624, 32656, | | 33008, 33040, |
| | | 31920, 31952 | 32304, 32336 | 32688, 32720 | | 33072, 33104 |
| 31441 | 31473, | 31601, 31633, | 31985, 32017, | 32369, 32401, | | 32753, 32785, |
| | 31505, | 31665, 31697, | 32049, 32081, | 32433, 32465, | | 32817, 32849, |
| | 31537, | 31729, 31761, | 32113, 32145, | 32497, 32529, | | 32881, 32913, |
| | 31569 | 31793, 31825, | 32177, 32209, | 32561, 32593, | | 32945, 32977, |
| | | 31857, 31889, | 32241, 32273, | 32625, 32657, | | 33009, 33041, |
| | | 31921, 31953 | 32305, 32337 | 32689, 32721 | | 33073, 33105 |
| 31442 | 31474, | 31602, 31634, | 31986, 32018, | 32370, 32402, | | 32754, 32786, |
| | 31506, | 31666, 31698, | 32050, 32082, | 32434, 32466, | | 32818, 32850, |
| | 31538, | 31730, 31762, | 32114, 32146, | 32498, 32530, | | 32882, 32914, |
| | 31570 | 31794, 31826, | 32178, 32210, | 32562, 32594, | | 32946, 32978, |
| | | 31858, 31890, | 32242, 32274, | 32626, 32658, | | 33010, 33042, |
| | | 31922, 31954 | 32306, 32338 | 32690, 32722 | | 33074, 33106 |
| 31443 | 31475, | 31603, 31635, | 31987, 32019, | 32371, 32403, | | 32755, 32787, |
| | 31507, | 31667, 31699, | 32051, 32083, | 32435, 32467, | | 32819, 32851, |
| | 31539, | 31731, 31763, | 32115, 32147, | 32499, 32531, | | 32883, 32915, |
| | 31571 | 31795, 31827, | 32179, 32211, | 32563, 32595, | | 32947, 32979, |
| | | 31859, 31891, | 32243, 32275, | 32627, 32659, | | 33011, 33043, |
| | | 31923, 31955 | 32307, 32339 | 32691, 32723 | | 33075, 33107 |
| 31444 | 31476, | 31604, 31636, | 31988, 32020, | 32372, 32404, | | 32756, 32788, |
| | 31508, | 31668, 31700, | 32052, 32084, | 32436, 32468, | | 32820, 32852, |
| | 31540, | 31732, 31764, | 32116, 32148, | 32500, 32532, | | 32884, 32916, |
| | 31572 | 31796, 31828, | 32180, 32212, | 32564, 32596, | | 32948, 32980, |
| | | 31860, 31892, | 32244, 32276, | 32628, 32660, | | 33012, 33044, |
| | | 31924, 31956 | 32308, 32340 | 32692, 32724 | | 33076, 33108 |
| 31445 | 31477, | 31605, 31637, | 31989, 32021, | 32373, 32405, | | 32757, 32789, |
| | 31509, | 31669, 31701, | 32053, 32085, | 32437, 32469, | | 32821, 32853, |
| | 31541, | 31733, 31765, | 32117, 32149, | 32501, 32533, | | 32885, 32917, |
| | 31573 | 31797, 31829, | 32181, 32213, | 32565, 32597, | | 32949, 32981, |
| | | 31861, 31893, | 32245, 32277, | 32629, 32661, | | 33013, 33045, |
| | | 31925, 31957 | 32309, 32341 | 32693, 32725 | | 33077, 33109 |
| 31446 | 31478, | 31606, 31638, | 31990, 32022, | 32374, 32406, | | 32758, 32790, |
| | 31510, | 31670, 31702, | 32054, 32086, | 32438, 32470, | | 32822, 32854, |
| | 31542, | 31734, 31766, | 32118, 32150, | 32502, 32534, | | 32886, 32918, |
| | 31574 | 31798, 31830, | 32182, 32214, | 32566, 32598, | | 32950, 32982, |
| | | 31862, 31894, | 32246, 32278, | 32630, 32662, | | 33014, 33046, |
| | | 31926, 31958 | 32310, 32342 | 32694, 32726 | | 33078, 33110 |
| 31447 | 31479, | 31607, 31639, | 31991, 32023, | 32375, 32407, | | 32759, 32791, |
| | 31511, | 31671, 31703, | 32055, 32087, | 32439, 32471, | | 32823, 32855, |
| | 31543, | 31735, 31767, | 32119, 32151, | 32503, 32535, | | 32887, 32919, |
| | 31575 | 31799, 31831, | 32183, 32215, | 32567, 32599, | | 32951, 32983, |
| | | 31863, 31895, | 32247, 32279, | 32631, 32663, | | 33015, 33047, |
| | | 31927, 31959 | 32311, 32343 | 32695, 32727 | | 33079, 33111 |
| 31448 | 31480, | 31608, 31640, | 31992, 32024, | 32376, 32408, | | 32760, 32792, |
| | 31512, | 31672, 31704, | 32056, 32088, | 32440, 32472, | | 32824, 32856, |
| | 31544, | 31736, 31768, | 32120, 32152, | 32504, 32536, | | 32888, 32920, |
| | 31576 | 31800, 31832, | 32184, 32216, | 32568, 32600, | | 32952, 32984, |
| | | 31864, 31896, | 32248, 32280, | 32632, 32664, | | 33016, 33048, |
| | | 31928, 31960 | 32312, 32344 | 32696, 32728 | | 33080, 33112 |
| 31449 | 31481, | 31609, 31641, | 31993, 32025, | 32377, 32409, | | 32761, 32793, |
| | 31513, | 31673, 31705, | 32057, 32089, | 32441, 32473, | | 32825, 32857, |
| | 31545, | 31737, 31769, | 32121, 32153, | 32505, 32537, | | 32889, 32921, |
| | 31577 | 31801, 31833, | 32185, 32217, | 32569, 32601, | | 32953, 32985, |
| | | 31865, 31897, | 32249, 32281, | 32633, 32665, | | 33017, 33049, |
| | | 31929, 31961 | 32313, 32345 | 32697, 32729 | | 33081, 33113 |
| 31450 | 31482, | 31610, 31642, | 31994, 32026, | 32378, 32410, | | 32762, 32794, |
| | 31514, | 31674, 31706, | 32058, 32090, | 32442, 32474, | | 32826, 32858, |
| | 31546, | 31738, 31770, | 32122, 32154, | 32506, 32538, | | 32890, 32922, |
| | 31578 | 31802, 31834, | 32186, 32218, | 32570, 32602, | | 32954, 32986, |
| | | 31866, 31898, | 32250, 32282, | 32634, 32666, | | 33018, 33050, |
| | | 31930, 31962 | 32314, 32346 | 32698, 32730 | | 33082, 33114 |
| 31451 | 31483, | 31611, 31643, | 31995, 32027, | 32379, 32411, | | 32763, 32795, |
| | 31515, | 31675, 31707, | 32059, 32091, | 32443, 32475, | | 32827, 32859, |
| | 31547, | 31739, 31771, | 32123, 32155, | 32507, 32539, | | 32891, 32923, |
| | 31579 | 31803, 31835, | 32187, 32219, | 32571, 32603, | | 32955, 32987, |
| | | 31867, 31899, | 32251, 32283, | 32635, 32667, | | 33019, 33051, |
| | | 31931, 31963 | 32315, 32347 | 32699, 32731 | | 33083, 33115 |
| 31452 | 31484, | 31612, 31644, | 31996, 32028, | 32380, 32412, | | 32764, 32796, |
| | 31516, | 31676, 31708, | 32060, 32092, | 32444, 32476, | | 32828, 32860, |
| | 31548, | 31740, 31772, | 32124, 32156, | 32508, 32540, | | 32892, 32924, |
| | 31580 | 31804, 31836, | 32188, 32220, | 32572, 32604, | | 32956, 32988, |
| | | 31868, 31900, | 32252, 32284, | 32636, 32668, | | 33020, 33052, |
| | | 31932, 31964 | 32316, 32348 | 32700, 32732 | | 33084, 33116 |
| 31453 | 31485, | 31613, 31645, | 31997, 32029, | 32381, 32413, | | 32765, 32797, |
| | 31517, | 31677, 31709, | 32061, 32093, | 32445, 32477, | | 32829, 32861, |
| | 31549, | 31741, 31773, | 32125, 32157, | 32509, 32541, | | 32893, 32925, |
| | 31581 | 31805, 31837, | 32189, 32221, | 32573, 32605, | | 32957, 32989, |
| | | 31869, 31901, | 32253, 32285, | 32637, 32669, | | 33021, 33053, |
| | | 31933, 31965 | 32317, 32349 | 32701, 32733 | | 33085, 33117 |
| 31454 | 31486, | 31614, 31646, | 31998, 32030, | 32382, 32414, | | 32766, 32798, |
| | 31518, | 31678, 31710, | 32062, 32094, | 32446, 32478, | | 32830, 32862, |
| | 31550, | 31742, 31774, | 32126, 32158, | 32510, 32542, | | 32894, 32926, |
| | 31582 | 31806, 31838, | 32190, 32222, | 32574, 32606, | | 32958, 32990, |
| | | 31870, 31902, | 32254, 32286, | 32638, 32670, | | 33022, 33054, |
| | | 31934, 31966 | 32318, 32350 | 32702, 32734 | | 33086, 33118 |
| 31455 | 31487, | 31615, 31647, | 31999, 32031, | 32383, 32415, | | 32767, 32799, |
| | 31519, | 31679, 31711, | 32063, 32095, | 32447, 32479, | | 32831, 32863, |
| | 31551, | 31743, 31775, | 32127, 32159, | 32511, 32543, | | 32895, 32927, |
| | 31583 | 31807, 31839, | 32191, 32223, | 32575, 32607, | | 32959, 32991, |
| | | 31871, 31903, | 32255, 32287, | 32639, 32671, | | 33023, 33055, |
| | | 31935, 31967 | 32319, 32351 | 32703, 32735 | | 33087, 33119 |
| 31456 | 31488, | 31616, 31648, | 32000, 32032, | 32384, 32416, | | 32768, 32800, |
| | 31520, | 31680, 31712, | 32064, 32096, | 32448, 32480, | | 32832, 32864, |
| | 31552, | 31744, 31776, | 32128, 32160, | 32512, 32544, | | 32896, 32928, |
| | 31584 | 31808, 31840, | 32192, 32224, | 32576, 32608, | | 32960, 32992, |
| | | 31872, 31904, | 32256, 32288, | 32640, 32672, | | 33024, 33056, |
| | | 31936, 31968 | 32320, 32352 | 32704, 32736 | | 33088, 33120 |
| 31457 | 31489, | 31617, 31649, | 32001, 32033, | 32385, 32417, | | 32769, 32801, |
| | 31521, | 31681, 31713, | 32065, 32097, | 32449, 32481, | | 32833, 32865, |
| | 31553, | 31745, 31777, | 32129, 32161, | 32513, 32545, | | 32897, 32929, |
| | 31585 | 31809, 31841, | 32193, 32225, | 32577, 32609, | | 32961, 32993, |
| | | 31873, 31905, | 32257, 32289, | 32641, 32673, | | 33025, 33057, |
| | | 31937, 31969 | 32321, 32353 | 32705, 32737 | | 33089, 33121 |
| 31458 | 31490, | 31618, 31650, | 32002, 32034, | 32386, 32418, | | 32770, 32802, |
| | 31522, | 31682, 31714, | 32066, 32098, | 32450, 32482, | | 32834, 32866, |
| | 31554, | 31746, 31778, | 32130, 32162, | 32514, 32546, | | 32898, 32930, |
| | 31586 | 31810, 31842, | 32194, 32226, | 32578, 32610, | | 32962, 32994, |
| | | 31874, 31906, | 32258, 32290, | 32642, 32674, | | 33026, 33058, |
| | | 31938, 31970 | 32322, 32354 | 32706, 32738 | | 33090, 33122 |
| 31459 | 31491, | 31619, 31651, | 32003, 32035, | 32387, 32419, | | 32771, 32803, |
| | 31523, | 31683, 31715, | 32067, 32099, | 32451, 32483, | | 32835, 32867, |
| | 31555, | 31747, 31779, | 32131, 32163, | 32515, 32547, | | 32899, 32931, |
| | 31587 | 31811, 31843, | 32195, 32227, | 32579, 32611, | | 32963, 32995, |
| | | 31875, 31907, | 32259, 32291, | 32643, 32675, | | 33027, 33059, |
| | | 31939, 31971 | 32323, 32355 | 32707, 32739 | | 33091, 33123 |
| 31460 | 31492, | 31620, 31652, | 32004, 32036, | 32388, 32420, | | 32772, 32804, |
| | 31524, | 31684, 31716, | 32068, 32100, | 32452, 32484, | | 32836, 32868, |
| | 31556, | 31748, 31780, | 32132, 32164, | 32516, 32548, | | 32900, 32932, |
| | 31588 | 31812, 31844, | 32196, 32228, | 32580, 32612, | | 32964, 32996, |
| | | 31876, 31908, | 32260, 32292, | 32644, 32676, | | 33028, 33060, |
| | | 31940, 31972 | 32324, 32356 | 32708, 32740 | | 33092, 33124 |

TABLE 3.8
Preferred LASV prefusion-stabilized (GPCmut8) constructs

| | | RNA designs and SEQ ID NOs | | | | |
|---|---|---|---|---|---|---|
| PRT | CDS | a-1 | a-2 | b-4 | i-2 | i-3 |
| 33125 | 33157, | 33285, 33317, | 33669, 33701, | 34053, 34085, | | 34437, 34469, |
| | 33189, | 33349, 33381, | 33733, 33765, | 34117, 34149, | | 34501, 34533, |
| | 33221, | 33413, 33445, | 33797, 33829, | 34181, 34213, | | 34565, 34597, |
| | 33253 | 33477, 33509, | 33861, 33893, | 34245, 34277, | | 34629, 34661, |
| | | 33541, 33573, | 33925, 33957, | 34309, 34341, | | 34693, 34725, |
| | | 33605, 33637 | 33989, 34021 | 34373, 34405 | | 34757, 34789 |
| 33126 | 33158, | 33286, 33318, | 33670, 33702, | 34054, 34086, | | 34438, 34470, |
| | 33190, | 33350, 33382, | 33734, 33766, | 34118, 34150, | | 34502, 34534, |
| | 33222, | 33414, 33446, | 33798, 33830, | 34182, 34214, | | 34566, 34598, |
| | 33254 | 33478, 33510, | 33862, 33894, | 34246, 34278, | | 34630, 34662, |
| | | 33542, 33574, | 33926, 33958, | 34310, 34342, | | 34694, 34726, |
| | | 33606, 33638 | 33990, 34022 | 34374, 34406 | | 34758, 34790 |
| 33127 | 33159, | 33287, 33319, | 33671, 33703, | 34055, 34087, | | 34439, 34471, |
| | 33191, | 33351, 33383, | 33735, 33767, | 34119, 34151, | | 34503, 34535, |
| | 33223, | 33415, 33447, | 33799, 33831, | 34183, 34215, | | 34567, 34599, |
| | 33255 | 33479, 33511, | 33863, 33895, | 34247, 34279, | | 34631, 34663, |
| | | 33543, 33575, | 33927, 33959, | 34311, 34343, | | 34695, 34727, |
| | | 33607, 33639 | 33991, 34023 | 34375, 34407 | | 34759, 34791 |
| 33128 | 33160, | 33288, 33320, | 33672, 33704, | 34056, 34088, | | 34440, 34472, |
| | 33192, | 33352, 33384, | 33736, 33768, | 34120, 34152, | | 34504, 34536, |
| | 33224, | 33416, 33448, | 33800, 33832, | 34184, 34216, | | 34568, 34600, |
| | 33256 | 33480, 33512, | 33864, 33896, | 34248, 34280, | | 34632, 34664, |
| | | 33544, 33576, | 33928, 33960, | 34312, 34344, | | 34696, 34728, |
| | | 33608, 33640 | 33992, 34024 | 34376, 34408 | | 34760, 34792 |
| 33129 | 33161, | 33289, 33321, | 33673, 33705, | 34057, 34089, | | 34441, 34473, |
| | 33193, | 33353, 33385, | 33737, 33769, | 34121, 34153, | | 34505, 34537, |
| | 33225, | 33417, 33449, | 33801, 33833, | 34185, 34217, | | 34569, 34601, |
| | 33257 | 33481, 33513, | 33865, 33897, | 34249, 34281, | | 34633, 34665, |
| | | 33545, 33577, | 33929, 33961, | 34313, 34345, | | 34697, 34729, |
| | | 33609, 33641 | 33993, 34025 | 34377, 34409 | | 34761, 34793 |
| 33130 | 33162, | 33290, 33322, | 33674, 33706, | 34058, 34090, | | 34442, 34474, |
| | 33194, | 33354, 33386, | 33738, 33770, | 34122, 34154, | | 34506, 34538, |
| | 33226, | 33418, 33450, | 33802, 33834, | 34186, 34218, | | 34570, 34602, |
| | 33258 | 33482, 33514, | 33866, 33898, | 34250, 34282, | | 34634, 34666, |
| | | 33546, 33578, | 33930, 33962, | 34314, 34346, | | 34698, 34730, |
| | | 33610, 33642 | 33994, 34026 | 34378, 34410 | | 34762, 34794 |
| 33131 | 33163, | 33291, 33323, | 33675, 33707, | 34059, 34091, | | 34443, 34475, |
| | 33195, | 33355, 33387, | 33739, 33771, | 34123, 34155, | | 34507, 34539, |
| | 33227, | 33419, 33451, | 33803, 33835, | 34187, 34219, | | 34571, 34603, |
| | 33259 | 33483, 33515, | 33867, 33899, | 34251, 34283, | | 34635, 34667, |
| | | 33547, 33579, | 33931, 33963, | 34315, 34347, | | 34699, 34731, |
| | | 33611, 33643 | 33995, 34027 | 34379, 34411 | | 34763, 34795 |
| 33132 | 33164, | 33292, 33324, | 33676, 33708, | 34060, 34092, | | 34444, 34476, |
| | 33196, | 33356, 33388, | 33740, 33772, | 34124, 34156, | | 34508, 34540, |
| | 33228, | 33420, 33452, | 33804, 33836, | 34188, 34220, | | 34572, 34604, |
| | 33260 | 33484, 33516, | 33868, 33900, | 34252, 34284, | | 34636, 34668, |
| | | 33548, 33580, | 33932, 33964, | 34316, 34348, | | 34700, 34732, |
| | | 33612, 33644 | 33996, 34028 | 34380, 34412 | | 34764, 34796 |
| 33133 | 33165, | 33293, 33325, | 33677, 33709, | 34061, 34093, | | 34445, 34477, |
| | 33197, | 33357, 33389, | 33741, 33773, | 34125, 34157, | | 34509, 34541, |
| | 33229, | 33421, 33453, | 33805, 33837, | 34189, 34221, | | 34573, 34605, |
| | 33261 | 33485, 33517, | 33869, 33901, | 34253, 34285, | | 34637, 34669, |
| | | 33549, 33581, | 33933, 33965, | 34317, 34349, | | 34701, 34733, |
| | | 33613, 33645 | 33997, 34029 | 34381, 34413 | | 34765, 34797 |
| 33134 | 33166, | 33294, 33326, | 33678, 33710, | 34062, 34094, | | 34446, 34478, |
| | 33198, | 33358, 33390, | 33742, 33774, | 34126, 34158, | | 34510, 34542, |
| | 33230, | 33422, 33454, | 33806, 33838, | 34190, 34222, | | 34574, 34606, |
| | 33262 | 33486, 33518, | 33870, 33902, | 34254, 34286, | | 34638, 34670, |
| | | 33550, 33582, | 33934, 33966, | 34318, 34350, | | 34702, 34734, |
| | | 33614, 33646 | 33998, 34030 | 34382, 34414 | | 34766, 34798 |
| 33135 | 33167, | 33295, 33327, | 33679, 33711, | 34063, 34095, | | 34447, 34479, |
| | 33199, | 33359, 33391, | 33743, 33775, | 34127, 34159, | | 34511, 34543, |
| | 33231, | 33423, 33455, | 33807, 33839, | 34191, 34223, | | 34575, 34607, |
| | 33263 | 33487, 33519, | 33871, 33903, | 34255, 34287, | | 34639, 34671, |
| | | 33551, 33583, | 33935, 33967, | 34319, 34351, | | 34703, 34735, |
| | | 33615, 33647 | 33999, 34031 | 34383, 34415 | | 34767, 34799 |
| 33136 | 33168, | 33296, 33328, | 33680, 33712, | 34064, 34096, | | 34448, 34480, |
| | 33200, | 33360, 33392, | 33744, 33776, | 34128, 34160, | | 34512, 34544, |
| | 33232, | 33424, 33456, | 33808, 33840, | 34192, 34224, | | 34576, 34608, |
| | 33264 | 33488, 33520, | 33872, 33904, | 34256, 34288, | | 34640, 34672, |
| | | 33552, 33584, | 33936, 33968, | 34320, 34352, | | 34704, 34736, |
| | | 33616, 33648 | 34000, 34032 | 34384, 34416 | | 34768, 34800 |
| 33137 | 33169, | 33297, 33329, | 33681, 33713, | 34065, 34097, | | 34449, 34481, |
| | 33201, | 33361, 33393, | 33745, 33777, | 34129, 34161, | | 34513, 34545, |
| | 33233, | 33425, 33457, | 33809, 33841, | 34193, 34225, | | 34577, 34609, |
| | 33265 | 33489, 33521, | 33873, 33905, | 34257, 34289, | | 34641, 34673, |
| | | 33553, 33585, | 33937, 33969, | 34321, 34353, | | 34705, 34737, |
| | | 33617, 33649 | 34001, 34033 | 34385, 34417 | | 34769, 34801 |
| 33138 | 33170, | 33298, 33330, | 33682, 33714, | 34066, 34098, | | 34450, 34482, |
| | 33202, | 33362, 33394, | 33746, 33778, | 34130, 34162, | | 34514, 34546, |
| | 33234, | 33426, 33458, | 33810, 33842, | 34194, 34226, | | 34578, 34610, |
| | 33266 | 33490, 33522, | 33874, 33906, | 34258, 34290, | | 34642, 34674, |
| | | 33554, 33586, | 33938, 33970, | 34322, 34354, | | 34706, 34738, |
| | | 33618, 33650 | 34002, 34034 | 34386, 34418 | | 34770, 34802 |
| 33139 | 33171, | 33299, 33331, | 33683, 33715, | 34067, 34099, | | 34451, 34483, |
| | 33203, | 33363, 33395, | 33747, 33779, | 34131, 34163, | | 34515, 34547, |
| | 33235, | 33427, 33459, | 33811, 33843, | 34195, 34227, | | 34579, 34611, |
| | 33267 | 33491, 33523, | 33875, 33907, | 34259, 34291, | | 34643, 34675, |
| | | 33555, 33587, | 33939, 33971, | 34323, 34355, | | 34707, 34739, |
| | | 33619, 33651 | 34003, 34035 | 34387, 34419 | | 34771, 34803 |
| 33140 | 33172, | 33300, 33332, | 33684, 33716, | 34068, 34100, | | 34452, 34484, |
| | 33204, | 33364, 33396, | 33748, 33780, | 34132, 34164, | | 34516, 34548, |
| | 33236, | 33428, 33460, | 33812, 33844, | 34196, 34228, | | 34580, 34612, |
| | 33268 | 33492, 33524, | 33876, 33908, | 34260, 34292, | | 34644, 34676, |
| | | 33556, 33588, | 33940, 33972, | 34324, 34356, | | 34708, 34740, |
| | | 33620, 33652 | 34004, 34036 | 34388, 34420 | | 34772, 34804 |
| 33141 | 33173, | 33301, 33333, | 33685, 33717, | 34069, 34101, | | 34453, 34485, |
| | 33205, | 33365, 33397, | 33749, 33781, | 34133, 34165, | | 34517, 34549, |
| | 33237, | 33429, 33461, | 33813, 33845, | 34197, 34229, | | 34581, 34613, |
| | 33269 | 33493, 33525, | 33877, 33909, | 34261, 34293, | | 34645, 34677, |
| | | 33557, 33589, | 33941, 33973, | 34325, 34357, | | 34709, 34741, |
| | | 33621, 33653 | 34005, 34037 | 34389, 34421 | | 34773, 34805 |
| 33142 | 33174, | 33302, 33334, | 33686, 33718, | 34070, 34102, | | 34454, 34486, |
| | 33206, | 33366, 33398, | 33750, 33782, | 34134, 34166, | | 34518, 34550, |
| | 33238, | 33430, 33462, | 33814, 33846, | 34198, 34230, | | 34582, 34614, |
| | 33270 | 33494, 33526, | 33878, 33910, | 34262, 34294, | | 34646, 34678, |
| | | 33558, 33590, | 33942, 33974, | 34326, 34358, | | 34710, 34742, |
| | | 33622, 33654 | 34006, 34038 | 34390, 34422 | | 34774, 34806 |
| 33143 | 33175, | 33303, 33335, | 33687, 33719, | 34071, 34103, | | 34455, 34487, |
| | 33207, | 33367, 33399, | 33751, 33783, | 34135, 34167, | | 34519, 34551, |
| | 33239, | 33431, 33463, | 33815, 33847, | 34199, 34231, | | 34583, 34615, |
| | 33271 | 33495, 33527, | 33879, 33911, | 34263, 34295, | | 34647, 34679, |
| | | 33559, 33591, | 33943, 33975, | 34327, 34359, | | 34711, 34743, |
| | | 33623, 33655 | 34007, 34039 | 34391, 34423 | | 34775, 34807 |
| 33144 | 33176, | 33304, 33336, | 33688, 33720, | 34072, 34104, | | 34456, 34488, |
| | 33208, | 33368, 33400, | 33752, 33784, | 34136, 34168, | | 34520, 34552, |
| | 33240, | 33432, 33464, | 33816, 33848, | 34200, 34232, | | 34584, 34616, |
| | 33272 | 33496, 33528, | 33880, 33912, | 34264, 34296, | | 34648, 34680, |
| | | 33560, 33592, | 33944, 33976, | 34328, 34360, | | 34712, 34744, |
| | | 33624, 33656 | 34008, 34040 | 34392, 34424 | | 34776, 34808 |
| 33145 | 33177, | 33305, 33337, | 33689, 33721, | 34073, 34105, | | 34457, 34489, |
| | 33209, | 33369, 33401, | 33753, 33785, | 34137, 34169, | | 34521, 34553, |
| | 33241, | 33433, 33465, | 33817, 33849, | 34201, 34233, | | 34585, 34617, |
| | 33273 | 33497, 33529, | 33881, 33913, | 34265, 34297, | | 34649, 34681, |
| | | 33561, 33593, | 33945, 33977, | 34329, 34361, | | 34713, 34745, |
| | | 33625, 33657 | 34009, 34041 | 34393, 34425 | | 34777, 34809 |
| 33146 | 33178, | 33306, 33338, | 33690, 33722, | 34074, 34106, | | 34458, 34490, |
| | 33210, | 33370, 33402, | 33754, 33786, | 34138, 34170, | | 34522, 34554, |
| | 33242, | 33434, 33466, | 33818, 33850, | 34202, 34234, | | 34586, 34618, |
| | 33274 | 33498, 33530, | 33882, 33914, | 34266, 34298, | | 34650, 34682, |
| | | 33562, 33594, | 33946, 33978, | 34330, 34362, | | 34714, 34746, |
| | | 33626, 33658 | 34010, 34042 | 34394, 34426 | | 34778, 34810 |
| 33147 | 33179, | 33307, 33339, | 33691, 33723, | 34075, 34107, | | 34459, 34491, |
| | 33211, | 33371, 33403, | 33755, 33787, | 34139, 34171, | | 34523, 34555, |
| | 33243, | 33435, 33467, | 33819, 33851, | 34203, 34235, | | 34587, 34619, |
| | 33275 | 33499, 33531, | 33883, 33915, | 34267, 34299, | | 34651, 34683, |
| | | 33563, 33595, | 33947, 33979, | 34331, 34363, | | 34715, 34747, |
| | | 33627, 33659 | 34011, 34043 | 34395, 34427 | | 34779, 34811 |
| 33148 | 33180, | 33308, 33340, | 33692, 33724, | 34076, 34108, | | 34460, 34492, |
| | 33212, | 33372, 33404, | 33756, 33788, | 34140, 34172, | | 34524, 34556, |
| | 33244, | 33436, 33468, | 33820, 33852, | 34204, 34236, | | 34588, 34620, |
| | 33276 | 33500, 33532, | 33884, 33916, | 34268, 34300, | | 34652, 34684, |
| | | 33564, 33596, | 33948, 33980, | 34332, 34364, | | 34716, 34748, |
| | | 33628, 33660 | 34012, 34044 | 34396, 34428 | | 34780, 34812 |
| 33149 | 33181, | 33309, 33341, | 33693, 33725, | 34077, 34109, | | 34461, 34493, |
| | 33213, | 33373, 33405, | 33757, 33789, | 34141, 34173, | | 34525, 34557, |
| | 33245, | 33437, 33469, | 33821, 33853, | 34205, 34237, | | 34589, 34621, |
| | 33277 | 33501, 33533, | 33885, 33917, | 34269, 34301, | | 34653, 34685, |
| | | 33565, 33597, | 33949, 33981, | 34333, 34365, | | 34717, 34749, |
| | | 33629, 33661 | 34013, 34045 | 34397, 34429 | | 34781, 34813 |
| 33150 | 33182, | 33310, 33342, | 33694, 33726, | 34078, 34110, | | 34462, 34494, |
| | 33214, | 33374, 33406, | 33758, 33790, | 34142, 34174, | | 34526, 34558, |
| | 33246, | 33438, 33470, | 33822, 33854, | 34206, 34238, | | 34590, 34622, |
| | 33278 | 33502, 33534, | 33886, 33918, | 34270, 34302, | | 34654, 34686, |
| | | 33566, 33598, | 33950, 33982, | 34334, 34366, | | 34718, 34750, |
| | | 33630, 33662 | 34014, 34046 | 34398, 34430 | | 34782, 34814 |
| 33151 | 33183, | 33311, 33343, | 33695, 33727, | 34079, 34111, | | 34463, 34495, |
| | 33215, | 33375, 33407, | 33759, 33791, | 34143, 34175, | | 34527, 34559, |
| | 33247, | 33439, 33471, | 33823, 33855, | 34207, 34239, | | 34591, 34623, |
| | 33279 | 33503, 33535, | 33887, 33919, | 34271, 34303, | | 34655, 34687, |
| | | 33567, 33599, | 33951, 33983, | 34335, 34367, | | 34719, 34751, |
| | | 33631, 33663 | 34015, 34047 | 34399, 34431 | | 34783, 34815 |
| 33152 | 33184, | 33312, 33344, | 33696, 33728, | 34080, 34112, | | 34464, 34496, |
| | 33216, | 33376, 33408, | 33760, 33792, | 34144, 34176, | | 34528, 34560, |
| | 33248, | 33440, 33472, | 33824, 33856, | 34208, 34240, | | 34592, 34624, |
| | 33280 | 33504, 33536, | 33888, 33920, | 34272, 34304, | | 34656, 34688, |
| | | 33568, 33600, | 33952, 33984, | 34336, 34368, | | 34720, 34752, |
| | | 33632, 33664 | 34016, 34048 | 34400, 34432 | | 34784, 34816 |
| 33153 | 33185, | 33313, 33345, | 33697, 33729, | 34081, 34113, | | 34465, 34497, |
| | 33217, | 33377, 33409, | 33761, 33793, | 34145, 34177, | | 34529, 34561, |
| | 33249, | 33441, 33473, | 33825, 33857, | 34209, 34241, | | 34593, 34625, |
| | 33281 | 33505, 33537, | 33889, 33921, | 34273, 34305, | | 34657, 34689, |
| | | 33569, 33601, | 33953, 33985, | 34337, 34369, | | 34721, 34753, |
| | | 33633, 33665 | 34017, 34049 | 34401, 34433 | | 34785, 34817 |
| 33154 | 33186, | 33314, 33346, | 33698, 33730, | 34082, 34114, | | 34466, 34498, |
| | 33218, | 33378, 33410, | 33762, 33794, | 34146, 34178, | | 34530, 34562, |
| | 33250, | 33442, 33474, | 33826, 33858, | 34210, 34242, | | 34594, 34626, |
| | 33282 | 33506, 33538, | 33890, 33922, | 34274, 34306, | | 34658, 34690, |
| | | 33570, 33602, | 33954, 33986, | 34338, 34370, | | 34722, 34754, |
| | | 33634, 33666 | 34018, 34050 | 34402, 34434 | | 34786, 34818 |
| 33155 | 33187, | 33315, 33347, | 33699, 33731, | 34083, 34115, | | 34467, 34499, |
| | 33219, | 33379, 33411, | 33763, 33795, | 34147, 34179, | | 34531, 34563, |
| | 33251, | 33443, 33475, | 33827, 33859, | 34211, 34243, | | 34595, 34627, |
| | 33283 | 33507, 33539, | 33891, 33923, | 34275, 34307, | | 34659, 34691, |
| | | 33571, 33603, | 33955, 33987, | 34339, 34371, | | 34723, 34755, |
| | | 33635, 33667 | 34019, 34051 | 34403, 34435 | | 34787, 34819 |
| 33156 | 33188, | 33316, 33348, | 33700, 33732, | 34084, 34116, | | 34468, 34500, |
| | 33220, | 33380, 33412, | 33764, 33796, | 34148, 34180, | | 34532, 34564, |
| | 33252, | 33444, 33476, | 33828, 33860, | 34212, 34244, | | 34596, 34628, |
| | 33284 | 33508, 33540, | 33892, 33924, | 34276, 34308, | | 34660, 34692, |
| | | 33572, 33604, | 33956, 33988, | 34340, 34372, | | 34724, 34756, |
| | | 33636, 33668 | 34020, 34052 | 34404, 34436 | | 34788, 34820 |

TABLE 3.9
Preferred LASV prefusion-stabilized (GPCmut9) constructs

| | | RNA designs and SEQ ID NOs | | | | |
|---|---|---|---|---|---|---|
| PRT | CDS | a-1 | a-2 | b-4 | i-2 | i-3 |
| 34821 | 34853, | 34981, 35013, | 35365, 35397, | 35749, 35781, | | 36133, 36165, |
| | 34885, | 35045, 35077, | 35429, 35461, | 35813, 35845, | | 36197, 36229, |
| | 34917, | 35109, 35141, | 35493, 35525, | 35877, 35909, | | 36261, 36293, |
| | 34949 | 35173, 35205, | 35557, 35589, | 35941, 35973, | | 36325, 36357, |
| | | 35237, 35269, | 35621, 35653, | 36005, 36037, | | 36389, 36421, |
| | | 35301, 35333 | 35685, 35717 | 36069, 36101 | | 36453, 36485 |
| 34822 | 34854, | 34982, 35014, | 35366, 35398, | 35750, 35782, | | 36134, 36166, |
| | 34886, | 35046, 35078, | 35430, 35462, | 35814, 35846, | | 36198, 36230, |
| | 34918, | 35110, 35142, | 35494, 35526, | 35878, 35910, | | 36262, 36294, |
| | 34950 | 35174, 35206, | 35558, 35590, | 35942, 35974, | | 36326, 36358, |
| | | 35238, 35270, | 35622, 35654, | 36006, 36038, | | 36390, 36422, |
| | | 35302, 35334 | 35686, 35718 | 36070, 36102 | | 36454, 36486 |
| 34823 | 34855, | 34983, 35015, | 35367, 35399, | 35751, 35783, | | 36135, 36167, |
| | 34887, | 35047, 35079, | 35431, 35463, | 35815, 35847, | | 36199, 36231, |
| | 34919, | 35111, 35143, | 35495, 35527, | 35879, 35911, | | 36263, 36295, |
| | 34951 | 35175, 35207, | 35559, 35591, | 35943, 35975, | | 36327, 36359, |
| | | 35239, 35271, | 35623, 35655, | 36007, 36039, | | 36391, 36423, |
| | | 35303, 35335 | 35687, 35719 | 36071, 36103 | | 36455, 36487 |
| 34824 | 34856, | 34984, 35016, | 35368, 35400, | 35752, 35784, | | 36136, 36168, |
| | 34888, | 35048, 35080, | 35432, 35464, | 35816, 35848, | | 36200, 36232, |
| | 34920, | 35112, 35144, | 35496, 35528, | 35880, 35912, | | 36264, 36296, |
| | 34952 | 35176, 35208, | 35560, 35592, | 35944, 35976, | | 36328, 36360, |
| | | 35240, 35272, | 35624, 35656, | 36008, 36040, | | 36392, 36424, |
| | | 35304, 35336 | 35688, 35720 | 36072, 36104 | | 36456, 36488 |
| 34825 | 34857, | 34985, 35017, | 35369, 35401, | 35753, 35785, | | 36137, 36169, |
| | 34889, | 35049, 35081, | 35433, 35465, | 35817, 35849, | | 36201, 36233, |
| | 34921, | 35113, 35145, | 35497, 35529, | 35881, 35913, | | 36265, 36297, |
| | 34953 | 35177, 35209, | 35561, 35593, | 35945, 35977, | | 36329, 36361, |
| | | 35241, 35273, | 35625, 35657, | 36009, 36041, | | 36393, 36425, |
| | | 35305, 35337 | 35689, 35721 | 36073, 36105 | | 36457, 36489 |
| 34826 | 34858, | 34986, 35018, | 35370, 35402, | 35754, 35786, | | 36138, 36170, |
| | 34890, | 35050, 35082, | 35434, 35466, | 35818, 35850, | | 36202, 36234, |
| | 34922, | 35114, 35146, | 35498, 35530, | 35882, 35914, | | 36266, 36298, |
| | 34954 | 35178, 35210, | 35562, 35594, | 35946, 35978, | | 36330, 36362, |
| | | 35242, 35274, | 35626, 35658, | 36010, 36042, | | 36394, 36426, |
| | | 35306, 35338 | 35690, 35722 | 36074, 36106 | | 36458, 36490 |
| 34827 | 34859, | 34987, 35019, | 35371, 35403, | 35755, 35787, | | 36139, 36171, |
| | 34891, | 35051, 35083, | 35435, 35467, | 35819, 35851, | | 36203, 36235, |
| | 34923, | 35115, 35147, | 35499, 35531, | 35883, 35915, | | 36267, 36299, |
| | 34955 | 35179, 35211, | 35563, 35595, | 35947, 35979, | | 36331, 36363, |
| | | 35243, 35275, | 35627, 35659, | 36011, 36043, | | 36395, 36427, |
| | | 35307, 35339 | 35691, 35723 | 36075, 36107 | | 36459, 36491 |
| 34828 | 34860, | 34988, 35020, | 35372, 35404, | 35756, 35788, | | 36140, 36172, |
| | 34892, | 35052, 35084, | 35436, 35468, | 35820, 35852, | | 36204, 36236, |
| | 34924, | 35116, 35148, | 35500, 35532, | 35884, 35916, | | 36268, 36300, |
| | 34956 | 35180, 35212, | 35564, 35596, | 35948, 35980, | | 36332, 36364, |
| | | 35244, 35276, | 35628, 35660, | 36012, 36044, | | 36396, 36428, |
| | | 35308, 35340 | 35692, 35724 | 36076, 36108 | | 36460, 36492 |
| 34829 | 34861, | 34989, 35021, | 35373, 35405, | 35757, 35789, | | 36141, 36173, |
| | 34893, | 35053, 35085, | 35437, 35469, | 35821, 35853, | | 36205, 36237, |
| | 34925, | 35117, 35149, | 35501, 35533, | 35885, 35917, | | 36269, 36301, |
| | 34957 | 35181, 35213, | 35565, 35597, | 35949, 35981, | | 36333, 36365, |
| | | 35245, 35277, | 35629, 35661, | 36013, 36045, | | 36397, 36429, |
| | | 35309, 35341 | 35693, 35725 | 36077, 36109 | | 36461, 36493 |
| 34830 | 34862, | 34990, 35022, | 35374, 35406, | 35758, 35790, | | 36142, 36174, |
| | 34894, | 35054, 35086, | 35438, 35470, | 35822, 35854, | | 36206, 36238, |
| | 34926, | 35118, 35150, | 35502, 35534, | 35886, 35918, | | 36270, 36302, |
| | 34958 | 35182, 35214, | 35566, 35598, | 35950, 35982, | | 36334, 36366, |
| | | 35246, 35278, | 35630, 35662, | 36014, 36046, | | 36398, 36430, |
| | | 35310, 35342 | 35694, 35726 | 36078, 36110 | | 36462, 36494 |
| 34831 | 34863, | 34991, 35023, | 35375, 35407, | 35759, 35791, | | 36143, 36175, |
| | 34895, | 35055, 35087, | 35439, 35471, | 35823, 35855, | | 36207, 36239, |
| | 34927, | 35119, 35151, | 35503, 35535, | 35887, 35919, | | 36271, 36303, |
| | 34959 | 35183, 35215, | 35567, 35599, | 35951, 35983, | | 36335, 36367, |
| | | 35247, 35279, | 35631, 35663, | 36015, 36047, | | 36399, 36431, |
| | | 35311, 35343 | 35695, 35727 | 36079, 36111 | | 36463, 36495 |
| 34832 | 34864, | 34992, 35024, | 35376, 35408, | 35760, 35792, | | 36144, 36176, |
| | 34896, | 35056, 35088, | 35440, 35472, | 35824, 35856, | | 36208, 36240, |
| | 34928, | 35120, 35152, | 35504, 35536, | 35888, 35920, | | 36272, 36304, |
| | 34960 | 35184, 35216, | 35568, 35600, | 35952, 35984, | | 36336, 36368, |
| | | 35248, 35280, | 35632, 35664, | 36016, 36048, | | 36400, 36432, |
| | | 35312, 35344 | 35696, 35728 | 36080, 36112 | | 36464, 36496 |
| 34833 | 34865, | 34993, 35025, | 35377, 35409, | 35761, 35793, | | 36145, 36177, |
| | 34897, | 35057, 35089, | 35441, 35473, | 35825, 35857, | | 36209, 36241, |
| | 34929, | 35121, 35153, | 35505, 35537, | 35889, 35921, | | 36273, 36305, |
| | 34961 | 35185, 35217, | 35569, 35601, | 35953, 35985, | | 36337, 36369, |
| | | 35249, 35281, | 35633, 35665, | 36017, 36049, | | 36401, 36433, |
| | | 35313, 35345 | 35697, 35729 | 36081, 36113 | | 36465, 36497 |
| 34834 | 34866, | 34994, 35026, | 35378, 35410, | 35762, 35794, | | 36146, 36178, |
| | 34898, | 35058, 35090, | 35442, 35474, | 35826, 35858, | | 36210, 36242, |
| | 34930, | 35122, 35154, | 35506, 35538, | 35890, 35922, | | 36274, 36306, |
| | 34962 | 35186, 35218, | 35570, 35602, | 35954, 35986, | | 36338, 36370, |
| | | 35250, 35282, | 35634, 35666, | 36018, 36050, | | 36402, 36434, |
| | | 35314, 35346 | 35698, 35730 | 36082, 36114 | | 36466, 36498 |
| 34835 | 34867, | 34995, 35027, | 35379, 35411, | 35763, 35795, | | 36147, 36179, |
| | 34899, | 35059, 35091, | 35443, 35475, | 35827, 35859, | | 36211, 36243, |
| | 34931, | 35123, 35155, | 35507, 35539, | 35891, 35923, | | 36275, 36307, |
| | 34963 | 35187, 35219, | 35571, 35603, | 35955, 35987, | | 36339, 36371, |
| | | 35251, 35283, | 35635, 35667, | 36019, 36051, | | 36403, 36435, |
| | | 35315, 35347 | 35699, 35731 | 36083, 36115 | | 36467, 36499 |
| 34836 | 34868, | 34996, 35028, | 35380, 35412, | 35764, 35796, | | 36148, 36180, |
| | 34900, | 35060, 35092, | 35444, 35476, | 35828, 35860, | | 36212, 36244, |
| | 34932, | 35124, 35156, | 35508, 35540, | 35892, 35924, | | 36276, 36308, |
| | 34964 | 35188, 35220, | 35572, 35604, | 35956, 35988, | | 36340, 36372, |
| | | 35252, 35284, | 35636, 35668, | 36020, 36052, | | 36404, 36436, |
| | | 35316, 35348 | 35700, 35732 | 36084, 36116 | | 36468, 36500 |
| 34837 | 34869, | 34997, 35029, | 35381, 35413, | 35765, 35797, | | 36149, 36181, |
| | 34901, | 35061, 35093, | 35445, 35477, | 35829, 35861, | | 36213, 36245, |
| | 34933, | 35125, 35157, | 35509, 35541, | 35893, 35925, | | 36277, 36309, |
| | 34965 | 35189, 35221, | 35573, 35605, | 35957, 35989, | | 36341, 36373, |
| | | 35253, 35285, | 35637, 35669, | 36021, 36053, | | 36405, 36437, |
| | | 35317, 35349 | 35701, 35733 | 36085, 36117 | | 36469, 36501 |
| 34838 | 34870, | 34998, 35030, | 35382, 35414, | 35766, 35798, | | 36150, 36182, |
| | 34902, | 35062, 35094, | 35446, 35478, | 35830, 35862, | | 36214, 36246, |
| | 34934, | 35126, 35158, | 35510, 35542, | 35894, 35926, | | 36278, 36310, |
| | 34966 | 35190, 35222, | 35574, 35606, | 35958, 35990, | | 36342, 36374, |
| | | 35254, 35286, | 35638, 35670, | 36022, 36054, | | 36406, 36438, |
| | | 35318, 35350 | 35702, 35734 | 36086, 36118 | | 36470, 36502 |
| 34839 | 34871, | 34999, 35031, | 35383, 35415, | 35767, 35799, | | 36151, 36183, |
| | 34903, | 35063, 35095, | 35447, 35479, | 35831, 35863, | | 36215, 36247, |
| | 34935, | 35127, 35159, | 35511, 35543, | 35895, 35927, | | 36279, 36311, |
| | 34967 | 35191, 35223, | 35575, 35607, | 35959, 35991, | | 36343, 36375, |
| | | 35255, 35287, | 35639, 35671, | 36023, 36055, | | 36407, 36439, |
| | | 35319, 35351 | 35703, 35735 | 36087, 36119 | | 36471, 36503 |
| 34840 | 34872, | 35000, 35032, | 35384, 35416, | 35768, 35800, | | 36152, 36184, |
| | 34904, | 35064, 35096, | 35448, 35480, | 35832, 35864, | | 36216, 36248, |
| | 34936, | 35128, 35160, | 35512, 35544, | 35896, 35928, | | 36280, 36312, |
| | 34968 | 35192, 35224, | 35576, 35608, | 35960, 35992, | | 36344, 36376, |
| | | 35256, 35288, | 35640, 35672, | 36024, 36056, | | 36408, 36440, |
| | | 35320, 35352 | 35704, 35736 | 36088, 36120 | | 36472, 36504 |
| 34841 | 34873, | 35001, 35033, | 35385, 35417, | 35769, 35801, | | 36153, 36185, |
| | 34905, | 35065, 35097, | 35449, 35481, | 35833, 35865, | | 36217, 36249, |
| | 34937, | 35129, 35161, | 35513, 35545, | 35897, 35929, | | 36281, 36313, |
| | 34969 | 35193, 35225, | 35577, 35609, | 35961, 35993, | | 36345, 36377, |
| | | 35257, 35289, | 35641, 35673, | 36025, 36057, | | 36409, 36441, |
| | | 35321, 35353 | 35705, 35737 | 36089, 36121 | | 36473, 36505 |
| 34842 | 34874, | 35002, 35034, | 35386, 35418, | 35770, 35802, | | 36154, 36186, |
| | 34906, | 35066, 35098, | 35450, 35482, | 35834, 35866, | | 36218, 36250, |
| | 34938, | 35130, 35162, | 35514, 35546, | 35898, 35930, | | 36282, 36314, |
| | 34970 | 35194, 35226, | 35578, 35610, | 35962, 35994, | | 36346, 36378, |
| | | 35258, 35290, | 35642, 35674, | 36026, 36058, | | 36410, 36442, |
| | | 35322, 35354 | 35706, 35738 | 36090, 36122 | | 36474, 36506 |
| 34843 | 34875, | 35003, 35035, | 35387, 35419, | 35771, 35803, | | 36155, 36187, |
| | 34907, | 35067, 35099, | 35451, 35483, | 35835, 35867, | | 36219, 36251, |
| | 34939, | 35131, 35163, | 35515, 35547, | 35899, 35931, | | 36283, 36315, |
| | 34971 | 35195, 35227, | 35579, 35611, | 35963, 35995, | | 36347, 36379, |
| | | 35259, 35291, | 35643, 35675, | 36027, 36059, | | 36411, 36443, |
| | | 35323, 35355 | 35707, 35739 | 36091, 36123 | | 36475, 36507 |
| 34844 | 34876, | 35004, 35036, | 35388, 35420, | 35772, 35804, | | 36156, 36188, |
| | 34908, | 35068, 35100, | 35452, 35484, | 35836, 35868, | | 36220, 36252, |
| | 34940, | 35132, 35164, | 35516, 35548, | 35900, 35932, | | 36284, 36316, |
| | 34972 | 35196, 35228, | 35580, 35612, | 35964, 35996, | | 36348, 36380, |
| | | 35260, 35292, | 35644, 35676, | 36028, 36060, | | 36412, 36444, |
| | | 35324, 35356 | 35708, 35740 | 36092, 36124 | | 36476, 36508 |
| 34845 | 34877, | 35005, 35037, | 35389, 35421, | 35773, 35805, | | 36157, 36189, |
| | 34909, | 35069, 35101, | 35453, 35485, | 35837, 35869, | | 36221, 36253, |
| | 34941, | 35133, 35165, | 35517, 35549, | 35901, 35933, | | 36285, 36317, |
| | 34973 | 35197, 35229, | 35581, 35613, | 35965, 35997, | | 36349, 36381, |
| | | 35261, 35293, | 35645, 35677, | 36029, 36061, | | 36413, 36445, |
| | | 35325, 35357 | 35709, 35741 | 36093, 36125 | | 36477, 36509 |
| 34846 | 34878, | 35006, 35038, | 35390, 35422, | 35774, 35806, | | 36158, 36190, |
| | 34910, | 35070, 35102, | 35454, 35486, | 35838, 35870, | | 36222, 36254, |
| | 34942, | 35134, 35166, | 35518, 35550, | 35902, 35934, | | 36286, 36318, |
| | 34974 | 35198, 35230, | 35582, 35614, | 35966, 35998, | | 36350, 36382, |
| | | 35262, 35294, | 35646, 35678, | 36030, 36062, | | 36414, 36446, |
| | | 35326, 35358 | 35710, 35742 | 36094, 36126 | | 36478, 36510 |
| 34847 | 34879, | 35007, 35039, | 35391, 35423, | 35775, 35807, | | 36159, 36191, |
| | 34911, | 35071, 35103, | 35455, 35487, | 35839, 35871, | | 36223, 36255, |
| | 34943, | 35135, 35167, | 35519, 35551, | 35903, 35935, | | 36287, 36319, |
| | 34975 | 35199, 35231, | 35583, 35615, | 35967, 35999, | | 36351, 36383, |
| | | 35263, 35295, | 35647, 35679, | 36031, 36063, | | 36415, 36447, |
| | | 35327, 35359 | 35711, 35743 | 36095, 36127 | | 36479, 36511 |
| 34848 | 34880, | 35008, 35040, | 35392, 35424, | 35776, 35808, | | 36160, 36192, |
| | 34912, | 35072, 35104, | 35456, 35488, | 35840, 35872, | | 36224, 36256, |
| | 34944, | 35136, 35168, | 35520, 35552, | 35904, 35936, | | 36288, 36320, |
| | 34976 | 35200, 35232, | 35584, 35616, | 35968, 36000, | | 36352, 36384, |
| | | 35264, 35296, | 35648, 35680, | 36032, 36064, | | 36416, 36448, |
| | | 35328, 35360 | 35712, 35744 | 36096, 36128 | | 36480, 36512 |
| 34849 | 34881, | 35009, 35041, | 35393, 35425, | 35777, 35809, | | 36161, 36193, |
| | 34913, | 35073, 35105, | 35457, 35489, | 35841, 35873, | | 36225, 36257, |
| | 34945, | 35137, 35169, | 35521, 35553, | 35905, 35937, | | 36289, 36321, |
| | 34977 | 35201, 35233, | 35585, 35617, | 35969, 36001, | | 36353, 36385, |
| | | 35265, 35297, | 35649, 35681, | 36033, 36065, | | 36417, 36449, |
| | | 35329, 35361 | 35713, 35745 | 36097, 36129 | | 36481, 36513 |
| 34850 | 34882, | 35010, 35042, | 35394, 35426, | 35778, 35810, | | 36162, 36194, |
| | 34914, | 35074, 35106, | 35458, 35490, | 35842, 35874, | | 36226, 36258, |
| | 34946, | 35138, 35170, | 35522, 35554, | 35906, 35938, | | 36290, 36322, |
| | 34978 | 35202, 35234, | 35586, 35618, | 35970, 36002, | | 36354, 36386, |
| | | 35266, 35298, | 35650, 35682, | 36034, 36066, | | 36418, 36450, |
| | | 35330, 35362 | 35714, 35746 | 36098, 36130 | | 36482, 36514 |
| 34851 | 34883, | 35011, 35043, | 35395, 35427, | 35779, 35811, | | 36163, 36195, |
| | 34915, | 35075, 35107, | 35459, 35491, | 35843, 35875, | | 36227, 36259, |
| | 34947, | 35139, 35171, | 35523, 35555, | 35907, 35939, | | 36291, 36323, |
| | 34979 | 35203, 35235, | 35587, 35619, | 35971, 36003, | | 36355, 36387, |
| | | 35267, 35299, | 35651, 35683, | 36035, 36067, | | 36419, 36451, |
| | | 35331, 35363 | 35715, 35747 | 36099, 36131 | | 36483, 36515 |
| 34852 | 34884, | 35012, 35044, | 35396, 35428, | 35780, 35812, | | 36164, 36196, |
| | 34916, | 35076, 35108, | 35460, 35492, | 35844, 35876, | | 36228, 36260, |
| | 34948, | 35140, 35172, | 35524, 35556, | 35908, 35940, | | 36292, 36324, |
| | 34980 | 35204, 35236, | 35588, 35620, | 35972, 36004, | | 36356, 36388, |
| | | 35268, 35300, | 35652, 35684, | 36036, 36068, | | 36420, 36452, |
| | | 35332, 35364 | 35716, 35748 | 36100, 36132 | | 36484, 36516 |

TABLE 3.10
Preferred LASV prefusion-stabilized (GPCmut10) constructs

| | | RNA designs and SEQ ID NOs | | | | |
|---|---|---|---|---|---|---|
| PRT | CDS | a-1 | a-2 | b-4 | i-2 | i-3 |
| 36517 | 36549, | 36677, 36709, | 37061, 37093, | 37445, 37477, | | 37829, 37861, |
| | 36581, | 36741, 36773, | 37125, 37157, | 37509, 37541, | | 37893, 37925, |
| | 36613, | 36805, 36837, | 37189, 37221, | 37573, 37605, | | 37957, 37989, |
| | 36645 | 36869, 36901, | 37253, 37285, | 37637, 37669, | | 38021, 38053, |
| | | 36933, 36965, | 37317, 37349, | 37701, 37733, | | 38085, 38117, |
| | | 36997, 37029 | 37381, 37413 | 37765, 37797 | | 38149, 38181 |
| 36518 | 36550, | 36678, 36710, | 37062, 37094, | 37446, 37478, | | 37830, 37862, |
| | 36582, | 36742, 36774, | 37126, 37158, | 37510, 37542, | | 37894, 37926, |
| | 36614, | 36806, 36838, | 37190, 37222, | 37574, 37606, | | 37958, 37990, |
| | 36646 | 36870, 36902, | 37254, 37286, | 37638, 37670, | | 38022, 38054, |
| | | 36934, 36966, | 37318, 37350, | 37702, 37734, | | 38086, 38118, |
| | | 36998, 37030 | 37382, 37414 | 37766, 37798 | | 38150, 38182 |
| 36519 | 36551, | 36679, 36711, | 37063, 37095, | 37447, 37479, | | 37831, 37863, |
| | 36583, | 36743, 36775, | 37127, 37159, | 37511, 37543, | | 37895, 37927, |
| | 36615, | 36807, 36839, | 37191, 37223, | 37575, 37607, | | 37959, 37991, |
| | 36647 | 36871, 36903, | 37255, 37287, | 37639, 37671, | | 38023, 38055, |
| | | 36935, 36967, | 37319, 37351, | 37703, 37735, | | 38087, 38119, |
| | | 36999, 37031 | 37383, 37415 | 37767, 37799 | | 38151, 38183 |
| 36520 | 36552, | 36680, 36712, | 37064, 37096, | 37448, 37480, | | 37832, 37864, |
| | 36584, | 36744, 36776, | 37128, 37160, | 37512, 37544, | | 37896, 37928, |
| | 36616, | 36808, 36840, | 37192, 37224, | 37576, 37608, | | 37960, 37992, |
| | 36648 | 36872, 36904, | 37256, 37288, | 37640, 37672, | | 38024, 38056, |
| | | 36936, 36968, | 37320, 37352, | 37704, 37736, | | 38088, 38120, |
| | | 37000, 37032 | 37384, 37416 | 37768, 37800 | | 38152, 38184 |
| 36521 | 36553, | 36681, 36713, | 37065, 37097, | 37449, 37481, | | 37833, 37865, |
| | 36585, | 36745, 36777, | 37129, 37161, | 37513, 37545, | | 37897, 37929, |
| | 36617, | 36809, 36841, | 37193, 37225, | 37577, 37609, | | 37961, 37993, |
| | 36649 | 36873, 36905, | 37257, 37289, | 37641, 37673, | | 38025, 38057, |
| | | 36937, 36969, | 37321, 37353, | 37705, 37737, | | 38089, 38121, |
| | | 37001, 37033 | 37385, 37417 | 37769, 37801 | | 38153, 38185 |
| 36522 | 36554, | 36682, 36714, | 37066, 37098, | 37450, 37482, | | 37834, 37866, |
| | 36586, | 36746, 36778, | 37130, 37162, | 37514, 37546, | | 37898, 37930, |
| | 36618, | 36810, 36842, | 37194, 37226, | 37578, 37610, | | 37962, 37994, |
| | 36650 | 36874, 36906, | 37258, 37290, | 37642, 37674, | | 38026, 38058, |
| | | 36938, 36970, | 37322, 37354, | 37706, 37738, | | 38090, 38122, |
| | | 37002, 37034 | 37386, 37418 | 37770, 37802 | | 38154, 38186 |
| 36523 | 36555, | 36683, 36715, | 37067, 37099, | 37451, 37483, | | 37835, 37867, |
| | 36587, | 36747, 36779, | 37131, 37163, | 37515, 37547, | | 37899, 37931, |
| | 36619, | 36811, 36843, | 37195, 37227, | 37579, 37611, | | 37963, 37995, |
| | 36651 | 36875, 36907, | 37259, 37291, | 37643, 37675, | | 38027, 38059, |
| | | 36939, 36971, | 37323, 37355, | 37707, 37739, | | 38091, 38123, |
| | | 37003, 37035 | 37387, 37419 | 37771, 37803 | | 38155, 38187 |
| 36524 | 36556, | 36684, 36716, | 37068, 37100, | 37452, 37484, | | 37836, 37868, |
| | 36588, | 36748, 36780, | 37132, 37164, | 37516, 37548, | | 37900, 37932, |
| | 36620, | 36812, 36844, | 37196, 37228, | 37580, 37612, | | 37964, 37996, |
| | 36652 | 36876, 36908, | 37260, 37292, | 37644, 37676, | | 38028, 38060, |
| | | 36940, 36972, | 37324, 37356, | 37708, 37740, | | 38092, 38124, |
| | | 37004, 37036 | 37388, 37420 | 37772, 37804 | | 38156, 38188 |
| 36525 | 36557, | 36685, 36717, | 37069, 37101, | 37453, 37485, | | 37837, 37869, |
| | 36589, | 36749, 36781, | 37133, 37165, | 37517, 37549, | | 37901, 37933, |
| | 36621, | 36813, 36845, | 37197, 37229, | 37581, 37613, | | 37965, 37997, |
| | 36653 | 36877, 36909, | 37261, 37293, | 37645, 37677, | | 38029, 38061, |
| | | 36941, 36973, | 37325, 37357, | 37709, 37741, | | 38093, 38125, |
| | | 37005, 37037 | 37389, 37421 | 37773, 37805 | | 38157, 38189 |
| 36526 | 36558, | 36686, 36718, | 37070, 37102, | 37454, 37486, | | 37838, 37870, |
| | 36590, | 36750, 36782, | 37134, 37166, | 37518, 37550, | | 37902, 37934, |
| | 36622, | 36814, 36846, | 37198, 37230, | 37582, 37614, | | 37966, 37998, |
| | 36654 | 36878, 36910, | 37262, 37294, | 37646, 37678, | | 38030, 38062, |
| | | 36942, 36974, | 37326, 37358, | 37710, 37742, | | 38094, 38126, |
| | | 37006, 37038 | 37390, 37422 | 37774, 37806 | | 38158, 38190 |
| 36527 | 36559, | 36687, 36719, | 37071, 37103, | 37455, 37487, | | 37839, 37871, |
| | 36591, | 36751, 36783, | 37135, 37167, | 37519, 37551, | | 37903, 37935, |
| | 36623, | 36815, 36847, | 37199, 37231, | 37583, 37615, | | 37967, 37999, |
| | 36655 | 36879, 36911, | 37263, 37295, | 37647, 37679, | | 38031, 38063, |
| | | 36943, 36975, | 37327, 37359, | 37711, 37743, | | 38095, 38127, |
| | | 37007, 37039 | 37391, 37423 | 37775, 37807 | | 38159, 38191 |
| 36528 | 36560, | 36688, 36720, | 37072, 37104, | 37456, 37488, | | 37840, 37872, |
| | 36592, | 36752, 36784, | 37136, 37168, | 37520, 37552, | | 37904, 37936, |
| | 36624, | 36816, 36848, | 37200, 37232, | 37584, 37616, | | 37968, 38000, |
| | 36656 | 36880, 36912, | 37264, 37296, | 37648, 37680, | | 38032, 38064, |
| | | 36944, 36976, | 37328, 37360, | 37712, 37744, | | 38096, 38128, |
| | | 37008, 37040 | 37392, 37424 | 37776, 37808 | | 38160, 38192 |
| 36529 | 36561, | 36689, 36721, | 37073, 37105, | 37457, 37489, | | 37841, 37873, |
| | 36593, | 36753, 36785, | 37137, 37169, | 37521, 37553, | | 37905, 37937, |
| | 36625, | 36817, 36849, | 37201, 37233, | 37585, 37617, | | 37969, 38001, |
| | 36657 | 36881, 36913, | 37265, 37297, | 37649, 37681, | | 38033, 38065, |
| | | 36945, 36977, | 37329, 37361, | 37713, 37745, | | 38097, 38129, |
| | | 37009, 37041 | 37393, 37425 | 37777, 37809 | | 38161, 38193 |
| 36530 | 36562, | 36690, 36722, | 37074, 37106, | 37458, 37490, | | 37842, 37874, |
| | 36594, | 36754, 36786, | 37138, 37170, | 37522, 37554, | | 37906, 37938, |
| | 36626, | 36818, 36850, | 37202, 37234, | 37586, 37618, | | 37970, 38002, |
| | 36658 | 36882, 36914, | 37266, 37298, | 37650, 37682, | | 38034, 38066, |
| | | 36946, 36978, | 37330, 37362, | 37714, 37746, | | 38098, 38130, |
| | | 37010, 37042 | 37394, 37426 | 37778, 37810 | | 38162, 38194 |
| 36531 | 36563, | 36691, 36723, | 37075, 37107, | 37459, 37491, | | 37843, 37875, |
| | 36595, | 36755, 36787, | 37139, 37171, | 37523, 37555, | | 37907, 37939, |
| | 36627, | 36819, 36851, | 37203, 37235, | 37587, 37619, | | 37971, 38003, |
| | 36659 | 36883, 36915, | 37267, 37299, | 37651, 37683, | | 38035, 38067, |
| | | 36947, 36979, | 37331, 37363, | 37715, 37747, | | 38099, 38131, |
| | | 37011, 37043 | 37395, 37427 | 37779, 37811 | | 38163, 38195 |
| 36532 | 36564, | 36692, 36724, | 37076, 37108, | 37460, 37492, | | 37844, 37876, |
| | 36596, | 36756, 36788, | 37140, 37172, | 37524, 37556, | | 37908, 37940, |
| | 36628, | 36820, 36852, | 37204, 37236, | 37588, 37620, | | 37972, 38004, |
| | 36660 | 36884, 36916, | 37268, 37300, | 37652, 37684, | | 38036, 38068, |
| | | 36948, 36980, | 37332, 37364, | 37716, 37748, | | 38100, 38132, |
| | | 37012, 37044 | 37396, 37428 | 37780, 37812 | | 38164, 38196 |
| 36533 | 36565, | 36693, 36725, | 37077, 37109, | 37461, 37493, | | 37845, 37877, |
| | 36597, | 36757, 36789, | 37141, 37173, | 37525, 37557, | | 37909, 37941, |
| | 36629, | 36821, 36853, | 37205, 37237, | 37589, 37621, | | 37973, 38005, |
| | 36661 | 36885, 36917, | 37269, 37301, | 37653, 37685, | | 38037, 38069, |
| | | 36949, 36981, | 37333, 37365, | 37717, 37749, | | 38101, 38133, |
| | | 37013, 37045 | 37397, 37429 | 37781, 37813 | | 38165, 38197 |
| 36534 | 36566, | 36694, 36726, | 37078, 37110, | 37462, 37494, | | 37846, 37878, |
| | 36598, | 36758, 36790, | 37142, 37174, | 37526, 37558, | | 37910, 37942, |
| | 36630, | 36822, 36854, | 37206, 37238, | 37590, 37622, | | 37974, 38006, |
| | 36662 | 36886, 36918, | 37270, 37302, | 37654, 37686, | | 38038, 38070, |
| | | 36950, 36982, | 37334, 37366, | 37718, 37750, | | 38102, 38134, |
| | | 37014, 37046 | 37398, 37430 | 37782, 37814 | | 38166, 38198 |
| 36535 | 36567, | 36695, 36727, | 37079, 37111, | 37463, 37495, | | 37847, 37879, |
| | 36599, | 36759, 36791, | 37143, 37175, | 37527, 37559, | | 37911, 37943, |
| | 36631, | 36823, 36855, | 37207, 37239, | 37591, 37623, | | 37975, 38007, |
| | 36663 | 36887, 36919, | 37271, 37303, | 37655, 37687, | | 38039, 38071, |
| | | 36951, 36983, | 37335, 37367, | 37719, 37751, | | 38103, 38135, |
| | | 37015, 37047 | 37399, 37431 | 37783, 37815 | | 38167, 38199 |
| 36536 | 36568, | 36696, 36728, | 37080, 37112, | 37464, 37496, | | 37848, 37880, |
| | 36600, | 36760, 36792, | 37144, 37176, | 37528, 37560, | | 37912, 37944, |
| | 36632, | 36824, 36856, | 37208, 37240, | 37592, 37624, | | 37976, 38008, |
| | 36664 | 36888, 36920, | 37272, 37304, | 37656, 37688, | | 38040, 38072, |
| | | 36952, 36984, | 37336, 37368, | 37720, 37752, | | 38104, 38136, |
| | | 37016, 37048 | 37400, 37432 | 37784, 37816 | | 38168, 38200 |
| 36537 | 36569, | 36697, 36729, | 37081, 37113, | 37465, 37497, | | 37849, 37881, |
| | 36601, | 36761, 36793, | 37145, 37177, | 37529, 37561, | | 37913, 37945, |
| | 36633, | 36825, 36857, | 37209, 37241, | 37593, 37625, | | 37977, 38009, |
| | 36665 | 36889, 36921, | 37273, 37305, | 37657, 37689, | | 38041, 38073, |
| | | 36953, 36985, | 37337, 37369, | 37721, 37753, | | 38105, 38137, |
| | | 37017, 37049 | 37401, 37433 | 37785, 37817 | | 38169, 38201 |
| 36538 | 36570, | 36698, 36730, | 37082, 37114, | 37466, 37498, | | 37850, 37882, |
| | 36602, | 36762, 36794, | 37146, 37178, | 37530, 37562, | | 37914, 37946, |
| | 36634, | 36826, 36858, | 37210, 37242, | 37594, 37626, | | 37978, 38010, |
| | 36666 | 36890, 36922, | 37274, 37306, | 37658, 37690, | | 38042, 38074, |
| | | 36954, 36986, | 37338, 37370, | 37722, 37754, | | 38106, 38138, |
| | | 37018, 37050 | 37402, 37434 | 37786, 37818 | | 38170, 38202 |
| 36539 | 36571, | 36699, 36731, | 37083, 37115, | 37467, 37499, | | 37851, 37883, |
| | 36603, | 36763, 36795, | 37147, 37179, | 37531, 37563, | | 37915, 37947, |
| | 36635, | 36827, 36859, | 37211, 37243, | 37595, 37627, | | 37979, 38011, |
| | 36667 | 36891, 36923, | 37275, 37307, | 37659, 37691, | | 38043, 38075, |
| | | 36955, 36987, | 37339, 37371, | 37723, 37755, | | 38107, 38139, |
| | | 37019, 37051 | 37403, 37435 | 37787, 37819 | | 38171, 38203 |
| 36540 | 36572, | 36700, 36732, | 37084, 37116, | 37468, 37500, | | 37852, 37884, |
| | 36604, | 36764, 36796, | 37148, 37180, | 37532, 37564, | | 37916, 37948, |
| | 36636, | 36828, 36860, | 37212, 37244, | 37596, 37628, | | 37980, 38012, |
| | 36668 | 36892, 36924, | 37276, 37308, | 37660, 37692, | | 38044, 38076, |
| | | 36956, 36988, | 37340, 37372, | 37724, 37756, | | 38108, 38140, |
| | | 37020, 37052 | 37404, 37436 | 37788, 37820 | | 38172, 38204 |
| 36541 | 36573, | 36701, 36733, | 37085, 37117, | 37469, 37501, | | 37853, 37885, |
| | 36605, | 36765, 36797, | 37149, 37181, | 37533, 37565, | | 37917, 37949, |
| | 36637, | 36829, 36861, | 37213, 37245, | 37597, 37629, | | 37981, 38013, |
| | 36669 | 36893, 36925, | 37277, 37309, | 37661, 37693, | | 38045, 38077, |
| | | 36957, 36989, | 37341, 37373, | 37725, 37757, | | 38109, 38141, |
| | | 37021, 37053 | 37405, 37437 | 37789, 37821 | | 38173, 38205 |
| 36542 | 36574, | 36702, 36734, | 37086, 37118, | 37470, 37502, | | 37854, 37886, |
| | 36606, | 36766, 36798, | 37150, 37182, | 37534, 37566, | | 37918, 37950, |
| | 36638, | 36830, 36862, | 37214, 37246, | 37598, 37630, | | 37982, 38014, |
| | 36670 | 36894, 36926, | 37278, 37310, | 37662, 37694, | | 38046, 38078, |
| | | 36958, 36990, | 37342, 37374, | 37726, 37758, | | 38110, 38142, |
| | | 37022, 37054 | 37406, 37438 | 37790, 37822 | | 38174, 38206 |
| 36543 | 36575, | 36703, 36735, | 37087, 37119, | 37471, 37503, | | 37855, 37887, |
| | 36607, | 36767, 36799, | 37151, 37183, | 37535, 37567, | | 37919, 37951, |
| | 36639, | 36831, 36863, | 37215, 37247, | 37599, 37631, | | 37983, 38015, |
| | 36671 | 36895, 36927, | 37279, 37311, | 37663, 37695, | | 38047, 38079, |
| | | 36959, 36991, | 37343, 37375, | 37727, 37759, | | 38111, 38143, |
| | | 37023, 37055 | 37407, 37439 | 37791, 37823 | | 38175, 38207 |
| 36544 | 36576, | 36704, 36736, | 37088, 37120, | 37472, 37504, | | 37856, 37888, |
| | 36608, | 36768, 36800, | 37152, 37184, | 37536, 37568, | | 37920, 37952, |
| | 36640, | 36832, 36864, | 37216, 37248, | 37600, 37632, | | 37984, 38016, |
| | 36672 | 36896, 36928, | 37280, 37312, | 37664, 37696, | | 38048, 38080, |
| | | 36960, 36992, | 37344, 37376, | 37728, 37760, | | 38112, 38144, |
| | | 37024, 37056 | 37408, 37440 | 37792, 37824 | | 38176, 38208 |
| 36545 | 36577, | 36705, 36737, | 37089, 37121, | 37473, 37505, | | 37857, 37889, |
| | 36609, | 36769, 36801, | 37153, 37185, | 37537, 37569, | | 37921, 37953, |
| | 36641, | 36833, 36865, | 37217, 37249, | 37601, 37633, | | 37985, 38017, |
| | 36673 | 36897, 36929, | 37281, 37313, | 37665, 37697, | | 38049, 38081, |
| | | 36961, 36993, | 37345, 37377, | 37729, 37761, | | 38113, 38145, |
| | | 37025, 37057 | 37409, 37441 | 37793, 37825 | | 38177, 38209 |
| 36546 | 36578, | 36706, 36738, | 37090, 37122, | 37474, 37506, | | 37858, 37890, |
| | 36610, | 36770, 36802, | 37154, 37186, | 37538, 37570, | | 37922, 37954, |
| | 36642, | 36834, 36866, | 37218, 37250, | 37602, 37634, | | 37986, 38018, |
| | 36674 | 36898, 36930, | 37282, 37314, | 37666, 37698, | | 38050, 38082, |
| | | 36962, 36994, | 37346, 37378, | 37730, 37762, | | 38114, 38146, |
| | | 37026, 37058 | 37410, 37442 | 37794, 37826 | | 38178, 38210 |
| 36547 | 36579, | 36707, 36739, | 37091, 37123, | 37475, 37507, | | 37859, 37891, |
| | 36611, | 36771, 36803, | 37155, 37187, | 37539, 37571, | | 37923, 37955, |
| | 36643, | 36835, 36867, | 37219, 37251, | 37603, 37635, | | 37987, 38019, |
| | 36675 | 36899, 36931, | 37283, 37315, | 37667, 37699, | | 38051, 38083, |
| | | 36963, 36995, | 37347, 37379, | 37731, 37763, | | 38115, 38147, |
| | | 37027, 37059 | 37411, 37443 | 37795, 37827 | | 38179, 38211 |
| 36548 | 36580, | 36708, 36740, | 37092, 37124, | 37476, 37508, | | 37860, 37892, |
| | 36612, | 36772, 36804, | 37156, 37188, | 37540, 37572, | | 37924, 37956, |
| | 36644, | 36836, 36868, | 37220, 37252, | 37604, 37636, | | 37988, 38020, |
| | 36676 | 36900, 36932, | 37284, 37316, | 37668, 37700, | | 38052, 38084, |
| | | 36964, 36996, | 37348, 37380, | 37732, 37764, | | 38116, 38148, |
| | | 37028, 37060 | 37412, 37444 | 37796, 37828 | | 38180, 38212 |

TABLE 3.11
Preferred LASV prefusion-stabilized (GPCmut11) constructs

| | | RNA designs and SEQ ID NOs | | | | |
|---|---|---|---|---|---|---|
| PRT | CDS | a-1 | a-2 | b-4 | i-2 | i-3 |
| 38213 | 38245, | 38373, 38405, | 38757, 38789, | 39141, 39173, | | 39525, 39557, |
| | 38277, | 38437, 38469, | 38821, 38853, | 39205, 39237, | | 39589, 39621, |
| | 38309, | 38501, 38533, | 38885, 38917, | 39269, 39301, | | 39653, 39685, |
| | 38341 | 38565, 38597, | 38949, 38981, | 39333, 39365, | | 39717, 39749, |
| | | 38629, 38661, | 39013, 39045, | 39397, 39429, | | 39781, 39813, |
| | | 38693, 38725 | 39077, 39109 | 39461, 39493 | | 39845, 39877 |
| 38214 | 38246, | 38374, 38406, | 38758, 38790, | 39142, 39174, | | 39526, 39558, |
| | 38278, | 38438, 38470, | 38822, 38854, | 39206, 39238, | | 39590, 39622, |
| | 38310, | 38502, 38534, | 38886, 38918, | 39270, 39302, | | 39654, 39686, |
| | 38342 | 38566, 38598, | 38950, 38982, | 39334, 39366, | | 39718, 39750, |
| | | 38630, 38662, | 39014, 39046, | 39398, 39430, | | 39782, 39814, |
| | | 38694, 38726 | 39078, 39110 | 39462, 39494 | | 39846, 39878 |
| 38215 | 38247, | 38375, 38407, | 38759, 38791, | 39143, 39175, | | 39527, 39559, |
| | 38279, | 38439, 38471, | 38823, 38855, | 39207, 39239, | | 39591, 39623, |
| | 38311, | 38503, 38535, | 38887, 38919, | 39271, 39303, | | 39655, 39687, |
| | 38343 | 38567, 38599, | 38951, 38983, | 39335, 39367, | | 39719, 39751, |
| | | 38631, 38663, | 39015, 39047, | 39399, 39431, | | 39783, 39815, |
| | | 38695, 38727 | 39079, 39111 | 39463, 39495 | | 39847, 39879 |
| 38216 | 38248, | 38376, 38408, | 38760, 38792, | 39144, 39176, | | 39528, 39560, |
| | 38280, | 38440, 38472, | 38824, 38856, | 39208, 39240, | | 39592, 39624, |
| | 38312, | 38504, 38536, | 38888, 38920, | 39272, 39304, | | 39656, 39688, |
| | 38344 | 38568, 38600, | 38952, 38984, | 39336, 39368, | | 39720, 39752, |
| | | 38632, 38664, | 39016, 39048, | 39400, 39432, | | 39784, 39816, |
| | | 38696, 38728 | 39080, 39112 | 39464, 39496 | | 39848, 39880 |
| 38217 | 38249, | 38377, 38409, | 38761, 38793, | 39145, 39177, | | 39529, 39561, |
| | 38281, | 38441, 38473, | 38825, 38857, | 39209, 39241, | | 39593, 39625, |
| | 38313, | 38505, 38537, | 38889, 38921, | 39273, 39305, | | 39657, 39689, |
| | 38345 | 38569, 38601, | 38953, 38985, | 39337, 39369, | | 39721, 39753, |
| | | 38633, 38665, | 39017, 39049, | 39401, 39433, | | 39785, 39817, |
| | | 38697, 38729 | 39081, 39113 | 39465, 39497 | | 39849, 39881 |
| 38218 | 38250, | 38378, 38410, | 38762, 38794, | 39146, 39178, | | 39530, 39562, |
| | 38282, | 38442, 38474, | 38826, 38858, | 39210, 39242, | | 39594, 39626, |
| | 38314, | 38506, 38538, | 38890, 38922, | 39274, 39306, | | 39658, 39690, |
| | 38346 | 38570, 38602, | 38954, 38986, | 39338, 39370, | | 39722, 39754, |
| | | 38634, 38666, | 39018, 39050, | 39402, 39434, | | 39786, 39818, |
| | | 38698, 38730 | 39082, 39114 | 39466, 39498 | | 39850, 39882 |
| 38219 | 38251, | 38379, 38411, | 38763, 38795, | 39147, 39179, | | 39531, 39563, |
| | 38283, | 38443, 38475, | 38827, 38859, | 39211, 39243, | | 39595, 39627, |
| | 38315, | 38507, 38539, | 38891, 38923, | 39275, 39307, | | 39659, 39691, |
| | 38347 | 38571, 38603, | 38955, 38987, | 39339, 39371, | | 39723, 39755, |
| | | 38635, 38667, | 39019, 39051, | 39403, 39435, | | 39787, 39819, |
| | | 38699, 38731 | 39083, 39115 | 39467, 39499 | | 39851, 39883 |
| 38220 | 38252, | 38380, 38412, | 38764, 38796, | 39148, 39180, | | 39532, 39564, |
| | 38284, | 38444, 38476, | 38828, 38860, | 39212, 39244, | | 39596, 39628, |
| | 38316, | 38508, 38540, | 38892, 38924, | 39276, 39308, | | 39660, 39692, |
| | 38348 | 38572, 38604, | 38956, 38988, | 39340, 39372, | | 39724, 39756, |
| | | 38636, 38668, | 39020, 39052, | 39404, 39436, | | 39788, 39820, |
| | | 38700, 38732 | 39084, 39116 | 39468, 39500 | | 39852, 39884 |
| 38221 | 38253, | 38381, 38413, | 38765, 38797, | 39149, 39181, | | 39533, 39565, |
| | 38285, | 38445, 38477, | 38829, 38861, | 39213, 39245, | | 39597, 39629, |
| | 38317, | 38509, 38541, | 38893, 38925, | 39277, 39309, | | 39661, 39693, |
| | 38349 | 38573, 38605, | 38957, 38989, | 39341, 39373, | | 39725, 39757, |
| | | 38637, 38669, | 39021, 39053, | 39405, 39437, | | 39789, 39821, |
| | | 38701, 38733 | 39085, 39117 | 39469, 39501 | | 39853, 39885 |
| 38222 | 38254, | 38382, 38414, | 38766, 38798, | 39150, 39182, | | 39534, 39566, |
| | 38286, | 38446, 38478, | 38830, 38862, | 39214, 39246, | | 39598, 39630, |
| | 38318, | 38510, 38542, | 38894, 38926, | 39278, 39310, | | 39662, 39694, |
| | 38350 | 38574, 38606, | 38958, 38990, | 39342, 39374, | | 39726, 39758, |
| | | 38638, 38670, | 39022, 39054, | 39406, 39438, | | 39790, 39822, |
| | | 38702, 38734 | 39086, 39118 | 39470, 39502 | | 39854, 39886 |
| 38223 | 38255, | 38383, 38415, | 38767, 38799, | 39151, 39183, | | 39535, 39567, |
| | 38287, | 38447, 38479, | 38831, 38863, | 39215, 39247, | | 39599, 39631, |
| | 38319, | 38511, 38543, | 38895, 38927, | 39279, 39311, | | 39663, 39695, |
| | 38351 | 38575, 38607, | 38959, 38991, | 39343, 39375, | | 39727, 39759, |
| | | 38639, 38671, | 39023, 39055, | 39407, 39439, | | 39791, 39823, |
| | | 38703, 38735 | 39087, 39119 | 39471, 39503 | | 39855, 39887 |
| 38224 | 38256, | 38384, 38416, | 38768, 38800, | 39152, 39184, | | 39536, 39568, |
| | 38288, | 38448, 38480, | 38832, 38864, | 39216, 39248, | | 39600, 39632, |
| | 38320, | 38512, 38544, | 38896, 38928, | 39280, 39312, | | 39664, 39696, |
| | 38352 | 38576, 38608, | 38960, 38992, | 39344, 39376, | | 39728, 39760, |
| | | 38640, 38672, | 39024, 39056, | 39408, 39440, | | 39792, 39824, |
| | | 38704, 38736 | 39088, 39120 | 39472, 39504 | | 39856, 39888 |
| 38225 | 38257, | 38385, 38417, | 38769, 38801, | 39153, 39185, | | 39537, 39569, |
| | 38289, | 38449, 38481, | 38833, 38865, | 39217, 39249, | | 39601, 39633, |
| | 38321, | 38513, 38545, | 38897, 38929, | 39281, 39313, | | 39665, 39697, |
| | 38353 | 38577, 38609, | 38961, 38993, | 39345, 39377, | | 39729, 39761, |
| | | 38641, 38673, | 39025, 39057, | 39409, 39441, | | 39793, 39825, |
| | | 38705, 38737 | 39089, 39121 | 39473, 39505 | | 39857, 39889 |
| 38226 | 38258, | 38386, 38418, | 38770, 38802, | 39154, 39186, | | 39538, 39570, |
| | 38290, | 38450, 38482, | 38834, 38866, | 39218, 39250, | | 39602, 39634, |
| | 38322, | 38514, 38546, | 38898, 38930, | 39282, 39314, | | 39666, 39698, |
| | 38354 | 38578, 38610, | 38962, 38994, | 39346, 39378, | | 39730, 39762, |
| | | 38642, 38674, | 39026, 39058, | 39410, 39442, | | 39794, 39826, |
| | | 38706, 38738 | 39090, 39122 | 39474, 39506 | | 39858, 39890 |
| 38227 | 38259, | 38387, 38419, | 38771, 38803, | 39155, 39187, | | 39539, 39571, |
| | 38291, | 38451, 38483, | 38835, 38867, | 39219, 39251, | | 39603, 39635, |
| | 38323, | 38515, 38547, | 38899, 38931, | 39283, 39315, | | 39667, 39699, |
| | 38355 | 38579, 38611, | 38963, 38995, | 39347, 39379, | | 39731, 39763, |
| | | 38643, 38675, | 39027, 39059, | 39411, 39443, | | 39795, 39827, |
| | | 38707, 38739 | 39091, 39123 | 39475, 39507 | | 39859, 39891 |
| 38228 | 38260, | 38388, 38420, | 38772, 38804, | 39156, 39188, | | 39540, 39572, |
| | 38292, | 38452, 38484, | 38836, 38868, | 39220, 39252, | | 39604, 39636, |
| | 38324, | 38516, 38548, | 38900, 38932, | 39284, 39316, | | 39668, 39700, |
| | 38356 | 38580, 38612, | 38964, 38996, | 39348, 39380, | | 39732, 39764, |
| | | 38644, 38676, | 39028, 39060, | 39412, 39444, | | 39796, 39828, |
| | | 38708, 38740 | 39092, 39124 | 39476, 39508 | | 39860, 39892 |
| 38229 | 38261, | 38389, 38421, | 38773, 38805, | 39157, 39189, | | 39541, 39573, |
| | 38293, | 38453, 38485, | 38837, 38869, | 39221, 39253, | | 39605, 39637, |
| | 38325, | 38517, 38549, | 38901, 38933, | 39285, 39317, | | 39669, 39701, |
| | 38357 | 38581, 38613, | 38965, 38997, | 39349, 39381, | | 39733, 39765, |
| | | 38645, 38677, | 39029, 39061, | 39413, 39445, | | 39797, 39829, |
| | | 38709, 38741 | 39093, 39125 | 39477, 39509 | | 39861, 39893 |
| 38230 | 38262, | 38390, 38422, | 38774, 38806, | 39158, 39190, | | 39542, 39574, |
| | 38294, | 38454, 38486, | 38838, 38870, | 39222, 39254, | | 39606, 39638, |
| | 38326, | 38518, 38550, | 38902, 38934, | 39286, 39318, | | 39670, 39702, |
| | 38358 | 38582, 38614, | 38966, 38998, | 39350, 39382, | | 39734, 39766, |
| | | 38646, 38678, | 39030, 39062, | 39414, 39446, | | 39798, 39830, |
| | | 38710, 38742 | 39094, 39126 | 39478, 39510 | | 39862, 39894 |
| 38231 | 38263, | 38391, 38423, | 38775, 38807, | 39159, 39191, | | 39543, 39575, |
| | 38295, | 38455, 38487, | 38839, 38871, | 39223, 39255, | | 39607, 39639, |
| | 38327, | 38519, 38551, | 38903, 38935, | 39287, 39319, | | 39671, 39703, |
| | 38359 | 38583, 38615, | 38967, 38999, | 39351, 39383, | | 39735, 39767, |
| | | 38647, 38679, | 39031, 39063, | 39415, 39447, | | 39799, 39831, |
| | | 38711, 38743 | 39095, 39127 | 39479, 39511 | | 39863, 39895 |
| 38232 | 38264, | 38392, 38424, | 38776, 38808, | 39160, 39192, | | 39544, 39576, |
| | 38296, | 38456, 38488, | 38840, 38872, | 39224, 39256, | | 39608, 39640, |
| | 38328, | 38520, 38552, | 38904, 38936, | 39288, 39320, | | 39672, 39704, |
| | 38360 | 38584, 38616, | 38968, 39000, | 39352, 39384, | | 39736, 39768, |
| | | 38648, 38680, | 39032, 39064, | 39416, 39448, | | 39800, 39832, |
| | | 38712, 38744 | 39096, 39128 | 39480, 39512 | | 39864, 39896 |
| 38233 | 38265, | 38393, 38425, | 38777, 38809, | 39161, 39193, | | 39545, 39577, |
| | 38297, | 38457, 38489, | 38841, 38873, | 39225, 39257, | | 39609, 39641, |
| | 38329, | 38521, 38553, | 38905, 38937, | 39289, 39321, | | 39673, 39705, |
| | 38361 | 38585, 38617, | 38969, 39001, | 39353, 39385, | | 39737, 39769, |
| | | 38649, 38681, | 39033, 39065, | 39417, 39449, | | 39801, 39833, |
| | | 38713, 38745 | 39097, 39129 | 39481, 39513 | | 39865, 39897 |
| 38234 | 38266, | 38394, 38426, | 38778, 38810, | 39162, 39194, | | 39546, 39578, |
| | 38298, | 38458, 38490, | 38842, 38874, | 39226, 39258, | | 39610, 39642, |
| | 38330, | 38522, 38554, | 38906, 38938, | 39290, 39322, | | 39674, 39706, |
| | 38362 | 38586, 38618, | 38970, 39002, | 39354, 39386, | | 39738, 39770, |
| | | 38650, 38682, | 39034, 39066, | 39418, 39450, | | 39802, 39834, |
| | | 38714, 38746 | 39098, 39130 | 39482, 39514 | | 39866, 39898 |
| 38235 | 38267, | 38395, 38427, | 38779, 38811, | 39163, 39195, | | 39547, 39579, |
| | 38299, | 38459, 38491, | 38843, 38875, | 39227, 39259, | | 39611, 39643, |
| | 38331, | 38523, 38555, | 38907, 38939, | 39291, 39323, | | 39675, 39707, |
| | 38363 | 38587, 38619, | 38971, 39003, | 39355, 39387, | | 39739, 39771, |
| | | 38651, 38683, | 39035, 39067, | 39419, 39451, | | 39803, 39835, |
| | | 38715, 38747 | 39099, 39131 | 39483, 39515 | | 39867, 39899 |
| 38236 | 38268, | 38396, 38428, | 38780, 38812, | 39164, 39196, | | 39548, 39580, |
| | 38300, | 38460, 38492, | 38844, 38876, | 39228, 39260, | | 39612, 39644, |
| | 38332, | 38524, 38556, | 38908, 38940, | 39292, 39324, | | 39676, 39708, |
| | 38364 | 38588, 38620, | 38972, 39004, | 39356, 39388, | | 39740, 39772, |
| | | 38652, 38684, | 39036, 39068, | 39420, 39452, | | 39804, 39836, |
| | | 38716, 38748 | 39100, 39132 | 39484, 39516 | | 39868, 39900 |
| 38237 | 38269, | 38397, 38429, | 38781, 38813, | 39165, 39197, | | 39549, 39581, |
| | 38301, | 38461, 38493, | 38845, 38877, | 39229, 39261, | | 39613, 39645, |
| | 38333, | 38525, 38557, | 38909, 38941, | 39293, 39325, | | 39677, 39709, |
| | 38365 | 38589, 38621, | 38973, 39005, | 39357, 39389, | | 39741, 39773, |
| | | 38653, 38685, | 39037, 39069, | 39421, 39453, | | 39805, 39837, |
| | | 38717, 38749 | 39101, 39133 | 39485, 39517 | | 39869, 39901 |
| 38238 | 38270, | 38398, 38430, | 38782, 38814, | 39166, 39198, | | 39550, 39582, |
| | 38302, | 38462, 38494, | 38846, 38878, | 39230, 39262, | | 39614, 39646, |
| | 38334, | 38526, 38558, | 38910, 38942, | 39294, 39326, | | 39678, 39710, |
| | 38366 | 38590, 38622, | 38974, 39006, | 39358, 39390, | | 39742, 39774, |
| | | 38654, 38686, | 39038, 39070, | 39422, 39454, | | 39806, 39838, |
| | | 38718, 38750 | 39102, 39134 | 39486, 39518 | | 39870, 39902 |
| 38239 | 38271, | 38399, 38431, | 38783, 38815, | 39167, 39199, | | 39551, 39583, |
| | 38303, | 38463, 38495, | 38847, 38879, | 39231, 39263, | | 39615, 39647, |
| | 38335, | 38527, 38559, | 38911, 38943, | 39295, 39327, | | 39679, 39711, |
| | 38367 | 38591, 38623, | 38975, 39007, | 39359, 39391, | | 39743, 39775, |
| | | 38655, 38687, | 39039, 39071, | 39423, 39455, | | 39807, 39839, |
| | | 38719, 38751 | 39103, 39135 | 39487, 39519 | | 39871, 39903 |
| 38240 | 38272, | 38400, 38432, | 38784, 38816, | 39168, 39200, | | 39552, 39584, |
| | 38304, | 38464, 38496, | 38848, 38880, | 39232, 39264, | | 39616, 39648, |
| | 38336, | 38528, 38560, | 38912, 38944, | 39296, 39328, | | 39680, 39712, |
| | 38368 | 38592, 38624, | 38976, 39008, | 39360, 39392, | | 39744, 39776, |
| | | 38656, 38688, | 39040, 39072, | 39424, 39456, | | 39808, 39840, |
| | | 38720, 38752 | 39104, 39136 | 39488, 39520 | | 39872, 39904 |
| 38241 | 38273, | 38401, 38433, | 38785, 38817, | 39169, 39201, | | 39553, 39585, |
| | 38305, | 38465, 38497, | 38849, 38881, | 39233, 39265, | | 39617, 39649, |
| | 38337, | 38529, 38561, | 38913, 38945, | 39297, 39329, | | 39681, 39713, |
| | 38369 | 38593, 38625, | 38977, 39009, | 39361, 39393, | | 39745, 39777, |
| | | 38657, 38689, | 39041, 39073, | 39425, 39457, | | 39809, 39841, |
| | | 38721, 38753 | 39105, 39137 | 39489, 39521 | | 39873, 39905 |
| 38242 | 38274, | 38402, 38434, | 38786, 38818, | 39170, 39202, | | 39554, 39586, |
| | 38306, | 38466, 38498, | 38850, 38882, | 39234, 39266, | | 39618, 39650, |
| | 38338, | 38530, 38562, | 38914, 38946, | 39298, 39330, | | 39682, 39714, |
| | 38370 | 38594, 38626, | 38978, 39010, | 39362, 39394, | | 39746, 39778, |
| | | 38658, 38690, | 39042, 39074, | 39426, 39458, | | 39810, 39842, |
| | | 38722, 38754 | 39106, 39138 | 39490, 39522 | | 39874, 39906 |
| 38243 | 38275, | 38403, 38435, | 38787, 38819, | 39171, 39203, | | 39555, 39587, |
| | 38307, | 38467, 38499, | 38851, 38883, | 39235, 39267, | | 39619, 39651, |
| | 38339, | 38531, 38563, | 38915, 38947, | 39299, 39331, | | 39683, 39715, |
| | 38371 | 38595, 38627, | 38979, 39011, | 39363, 39395, | | 39747, 39779, |
| | | 38659, 38691, | 39043, 39075, | 39427, 39459, | | 39811, 39843, |
| | | 38723, 38755 | 39107, 39139 | 39491, 39523 | | 39875, 39907 |
| 38244 | 38276, | 38404, 38436, | 38788, 38820, | 39172, 39204, | | 39556, 39588, |
| | 38308, | 38468, 38500, | 38852, 38884, | 39236, 39268, | | 39620, 39652, |
| | 38340, | 38532, 38564, | 38916, 38948, | 39300, 39332, | | 39684, 39716, |
| | 38372 | 38596, 38628, | 38980, 39012, | 39364, 39396, | | 39748, 39780, |
| | | 38660, 38692, | 39044, 39076, | 39428, 39460, | | 39812, 39844, |
| | | 38724, 38756 | 39108, 39140 | 39492, 39524 | | 39876, 39908 |

TABLE 3.12
Preferred LASV prefusion-stabilized (GPCmut12) constructs

| | | RNA designs and SEQ ID NOs | | | | |
|---|---|---|---|---|---|---|
| PRT | CDS | a-1 | a-2 | b-4 | i-2 | i-3 |
| 39909 | 39941, | 40069, 40101, | 40453, 40485, | 40837, 40869, | | 41221, 41253, |
| | 39973, | 40133, 40165, | 40517, 40549, | 40901, 40933, | | 41285, 41317, |
| | 40005, | 40197, 40229, | 40581, 40613, | 40965, 40997, | | 41349, 41381, |
| | 40037 | 40261, 40293, | 40645, 40677, | 41029, 41061, | | 41413, 41445, |
| | | 40325, 40357, | 40709, 40741, | 41093, 41125, | | 41477, 41509, |
| | | 40389, 40421 | 40773, 40805 | 41157, 41189 | | 41541, 41573 |
| 39910 | 39942, | 40070, 40102, | 40454, 40486, | 40838, 40870, | | 41222, 41254, |
| | 39974, | 40134, 40166, | 40518, 40550, | 40902, 40934, | | 41286, 41318, |
| | 40006, | 40198, 40230, | 40582, 40614, | 40966, 40998, | | 41350, 41382, |
| | 40038 | 40262, 40294, | 40646, 40678, | 41030, 41062, | | 41414, 41446, |
| | | 40326, 40358, | 40710, 40742, | 41094, 41126, | | 41478, 41510, |
| | | 40390, 40422 | 40774, 40806 | 41158, 41190 | | 41542, 41574 |
| 39911 | 39943, | 40071, 40103, | 40455, 40487, | 40839, 40871, | | 41223, 41255, |
| | 39975, | 40135, 40167, | 40519, 40551, | 40903, 40935, | | 41287, 41319, |
| | 40007, | 40199, 40231, | 40583, 40615, | 40967, 40999, | | 41351, 41383, |
| | 40039 | 40263, 40295, | 40647, 40679, | 41031, 41063, | | 41415, 41447, |
| | | 40327, 40359, | 40711, 40743, | 41095, 41127, | | 41479, 41511, |
| | | 40391, 40423 | 40775, 40807 | 41159, 41191 | | 41543, 41575 |
| 39912 | 39944, | 40072, 40104, | 40456, 40488, | 40840, 40872, | | 41224, 41256, |
| | 39976, | 40136, 40168, | 40520, 40552, | 40904, 40936, | | 41288, 41320, |
| | 40008, | 40200, 40232, | 40584, 40616, | 40968, 41000, | | 41352, 41384, |
| | 40040 | 40264, 40296, | 40648, 40680, | 41032, 41064, | | 41416, 41448, |
| | | 40328, 40360, | 40712, 40744, | 41096, 41128, | | 41480, 41512, |
| | | 40392, 40424 | 40776, 40808 | 41160, 41192 | | 41544, 41576 |
| 39913 | 39945, | 40073, 40105, | 40457, 40489, | 40841, 40873, | | 41225, 41257, |
| | 39977, | 40137, 40169, | 40521, 40553, | 40905, 40937, | | 41289, 41321, |
| | 40009, | 40201, 40233, | 40585, 40617, | 40969, 41001, | | 41353, 41385, |
| | 40041 | 40265, 40297, | 40649, 40681, | 41033, 41065, | | 41417, 41449, |
| | | 40329, 40361, | 40713, 40745, | 41097, 41129, | | 41481, 41513, |
| | | 40393, 40425 | 40777, 40809 | 41161, 41193 | | 41545, 41577 |
| 39914 | 39946, | 40074, 40106, | 40458, 40490, | 40842, 40874, | | 41226, 41258, |
| | 39978, | 40138, 40170, | 40522, 40554, | 40906, 40938, | | 41290, 41322, |
| | 40010, | 40202, 40234, | 40586, 40618, | 40970, 41002, | | 41354, 41386, |
| | 40042 | 40266, 40298, | 40650, 40682, | 41034, 41066, | | 41418, 41450, |
| | | 40330, 40362, | 40714, 40746, | 41098, 41130, | | 41482, 41514, |
| | | 40394, 40426 | 40778, 40810 | 41162, 41194 | | 41546, 41578 |
| 39915 | 39947, | 40075, 40107, | 40459, 40491, | 40843, 40875, | | 41227, 41259, |
| | 39979, | 40139, 40171, | 40523, 40555, | 40907, 40939, | | 41291, 41323, |
| | 40011, | 40203, 40235, | 40587, 40619, | 40971, 41003, | | 41355, 41387, |
| | 40043 | 40267, 40299, | 40651, 40683, | 41035, 41067, | | 41419, 41451, |
| | | 40331, 40363, | 40715, 40747, | 41099, 41131, | | 41483, 41515, |
| | | 40395, 40427 | 40779, 40811 | 41163, 41195 | | 41547, 41579 |
| 39916 | 39948, | 40076, 40108, | 40460, 40492, | 40844, 40876, | | 41228, 41260, |
| | 39980, | 40140, 40172, | 40524, 40556, | 40908, 40940, | | 41292, 41324, |
| | 40012, | 40204, 40236, | 40588, 40620, | 40972, 41004, | | 41356, 41388, |
| | 40044 | 40268, 40300, | 40652, 40684, | 41036, 41068, | | 41420, 41452, |
| | | 40332, 40364, | 40716, 40748, | 41100, 41132, | | 41484, 41516, |
| | | 40396, 40428 | 40780, 40812 | 41164, 41196 | | 41548, 41580 |
| 39917 | 39949, | 40077, 40109, | 40461, 40493, | 40845, 40877, | | 41229, 41261, |
| | 39981, | 40141, 40173, | 40525, 40557, | 40909, 40941, | | 41293, 41325, |
| | 40013, | 40205, 40237, | 40589, 40621, | 40973, 41005, | | 41357, 41389, |
| | 40045 | 40269, 40301, | 40653, 40685, | 41037, 41069, | | 41421, 41453, |
| | | 40333, 40365, | 40717, 40749, | 41101, 41133, | | 41485, 41517, |
| | | 40397, 40429 | 40781, 40813 | 41165, 41197 | | 41549, 41581 |
| 39918 | 39950, | 40078, 40110, | 40462, 40494, | 40846, 40878, | | 41230, 41262, |
| | 39982, | 40142, 40174, | 40526, 40558, | 40910, 40942, | | 41294, 41326, |
| | 40014, | 40206, 40238, | 40590, 40622, | 40974, 41006, | | 41358, 41390, |
| | 40046 | 40270, 40302, | 40654, 40686, | 41038, 41070, | | 41422, 41454, |
| | | 40334, 40366, | 40718, 40750, | 41102, 41134, | | 41486, 41518, |
| | | 40398, 40430 | 40782, 40814 | 41166, 41198 | | 41550, 41582 |
| 39919 | 39951, | 40079, 40111, | 40463, 40495, | 40847, 40879, | | 41231, 41263, |
| | 39983, | 40143, 40175, | 40527, 40559, | 40911, 40943, | | 41295, 41327, |
| | 40015, | 40207, 40239, | 40591, 40623, | 40975, 41007, | | 41359, 41391, |
| | 40047 | 40271, 40303, | 40655, 40687, | 41039, 41071, | | 41423, 41455, |
| | | 40335, 40367, | 40719, 40751, | 41103, 41135, | | 41487, 41519, |
| | | 40399, 40431 | 40783, 40815 | 41167, 41199 | | 41551, 41583 |
| 39920 | 39952, | 40080, 40112, | 40464, 40496, | 40848, 40880, | | 41232, 41264, |
| | 39984, | 40144, 40176, | 40528, 40560, | 40912, 40944, | | 41296, 41328, |
| | 40016, | 40208, 40240, | 40592, 40624, | 40976, 41008, | | 41360, 41392, |
| | 40048 | 40272, 40304, | 40656, 40688, | 41040, 41072, | | 41424, 41456, |
| | | 40336, 40368, | 40720, 40752, | 41104, 41136, | | 41488, 41520, |
| | | 40400, 40432 | 40784, 40816 | 41168, 41200 | | 41552, 41584 |
| 39921 | 39953, | 40081, 40113, | 40465, 40497, | 40849, 40881, | | 41233, 41265, |
| | 39985, | 40145, 40177, | 40529, 40561, | 40913, 40945, | | 41297, 41329, |
| | 40017, | 40209, 40241, | 40593, 40625, | 40977, 41009, | | 41361, 41393, |
| | 40049 | 40273, 40305, | 40657, 40689, | 41041, 41073, | | 41425, 41457, |
| | | 40337, 40369, | 40721, 40753, | 41105, 41137, | | 41489, 41521, |
| | | 40401, 40433 | 40785, 40817 | 41169, 41201 | | 41553, 41585 |
| 39922 | 39954, | 40082, 40114, | 40466, 40498, | 40850, 40882, | | 41234, 41266, |
| | 39986, | 40146, 40178, | 40530, 40562, | 40914, 40946, | | 41298, 41330, |
| | 40018, | 40210, 40242, | 40594, 40626, | 40978, 41010, | | 41362, 41394, |
| | 40050 | 40274, 40306, | 40658, 40690, | 41042, 41074, | | 41426, 41458, |
| | | 40338, 40370, | 40722, 40754, | 41106, 41138, | | 41490, 41522, |
| | | 40402, 40434 | 40786, 40818 | 41170, 41202 | | 41554, 41586 |
| 39923 | 39955, | 40083, 40115, | 40467, 40499, | 40851, 40883, | | 41235, 41267, |
| | 39987, | 40147, 40179, | 40531, 40563, | 40915, 40947, | | 41299, 41331, |
| | 40019, | 40211, 40243, | 40595, 40627, | 40979, 41011, | | 41363, 41395, |
| | 40051 | 40275, 40307, | 40659, 40691, | 41043, 41075, | | 41427, 41459, |
| | | 40339, 40371, | 40723, 40755, | 41107, 41139, | | 41491, 41523, |
| | | 40403, 40435 | 40787, 40819 | 41171, 41203 | | 41555, 41587 |
| 39924 | 39956, | 40084, 40116, | 40468, 40500, | 40852, 40884, | | 41236, 41268, |
| | 39988, | 40148, 40180, | 40532, 40564, | 40916, 40948, | | 41300, 41332, |
| | 40020, | 40212, 40244, | 40596, 40628, | 40980, 41012, | | 41364, 41396, |
| | 40052 | 40276, 40308, | 40660, 40692, | 41044, 41076, | | 41428, 41460, |
| | | 40340, 40372, | 40724, 40756, | 41108, 41140, | | 41492, 41524, |
| | | 40404, 40436 | 40788, 40820 | 41172, 41204 | | 41556, 41588 |
| 39925 | 39957, | 40085, 40117, | 40469, 40501, | 40853, 40885, | | 41237, 41269, |
| | 39989, | 40149, 40181, | 40533, 40565, | 40917, 40949, | | 41301, 41333, |
| | 40021, | 40213, 40245, | 40597, 40629, | 40981, 41013, | | 41365, 41397, |
| | 40053 | 40277, 40309, | 40661, 40693, | 41045, 41077, | | 41429, 41461, |
| | | 40341, 40373, | 40725, 40757, | 41109, 41141, | | 41493, 41525, |
| | | 40405, 40437 | 40789, 40821 | 41173, 41205 | | 41557, 41589 |
| 39926 | 39958, | 40086, 40118, | 40470, 40502, | 40854, 40886, | | 41238, 41270, |
| | 39990, | 40150, 40182, | 40534, 40566, | 40918, 40950, | | 41302, 41334, |
| | 40022, | 40214, 40246, | 40598, 40630, | 40982, 41014, | | 41366, 41398, |
| | 40054 | 40278, 40310, | 40662, 40694, | 41046, 41078, | | 41430, 41462, |
| | | 40342, 40374, | 40726, 40758, | 41110, 41142, | | 41494, 41526, |
| | | 40406, 40438 | 40790, 40822 | 41174, 41206 | | 41558, 41590 |
| 39927 | 39959, | 40087, 40119, | 40471, 40503, | 40855, 40887, | | 41239, 41271, |
| | 39991, | 40151, 40183, | 40535, 40567, | 40919, 40951, | | 41303, 41335, |
| | 40023, | 40215, 40247, | 40599, 40631, | 40983, 41015, | | 41367, 41399, |
| | 40055 | 40279, 40311, | 40663, 40695, | 41047, 41079, | | 41431, 41463, |
| | | 40343, 40375, | 40727, 40759, | 41111, 41143, | | 41495, 41527, |
| | | 40407, 40439 | 40791, 40823 | 41175, 41207 | | 41559, 41591 |
| 39928 | 39960, | 40088, 40120, | 40472, 40504, | 40856, 40888, | | 41240, 41272, |
| | 39992, | 40152, 40184, | 40536, 40568, | 40920, 40952, | | 41304, 41336, |
| | 40024, | 40216, 40248, | 40600, 40632, | 40984, 41016, | | 41368, 41400, |
| | 40056 | 40280, 40312, | 40664, 40696, | 41048, 41080, | | 41432, 41464, |
| | | 40344, 40376, | 40728, 40760, | 41112, 41144, | | 41496, 41528, |
| | | 40408, 40440 | 40792, 40824 | 41176, 41208 | | 41560, 41592 |
| 39929 | 39961, | 40089, 40121, | 40473, 40505, | 40857, 40889, | | 41241, 41273, |
| | 39993, | 40153, 40185, | 40537, 40569, | 40921, 40953, | | 41305, 41337, |
| | 40025, | 40217, 40249, | 40601, 40633, | 40985, 41017, | | 41369, 41401, |
| | 40057 | 40281, 40313, | 40665, 40697, | 41049, 41081, | | 41433, 41465, |
| | | 40345, 40377, | 40729, 40761, | 41113, 41145, | | 41497, 41529, |
| | | 40409, 40441 | 40793, 40825 | 41177, 41209 | | 41561, 41593 |
| 39930 | 39962, | 40090, 40122, | 40474, 40506, | 40858, 40890, | | 41242, 41274, |
| | 39994, | 40154, 40186, | 40538, 40570, | 40922, 40954, | | 41306, 41338, |
| | 40026, | 40218, 40250, | 40602, 40634, | 40986, 41018, | | 41370, 41402, |
| | 40058 | 40282, 40314, | 40666, 40698, | 41050, 41082, | | 41434, 41466, |
| | | 40346, 40378, | 40730, 40762, | 41114, 41146, | | 41498, 41530, |
| | | 40410, 40442 | 40794, 40826 | 41178, 41210 | | 41562, 41594 |
| 39931 | 39963, | 40091, 40123, | 40475, 40507, | 40859, 40891, | | 41243, 41275, |
| | 39995, | 40155, 40187, | 40539, 40571, | 40923, 40955, | | 41307, 41339, |
| | 40027, | 40219, 40251, | 40603, 40635, | 40987, 41019, | | 41371, 41403, |
| | 40059 | 40283, 40315, | 40667, 40699, | 41051, 41083, | | 41435, 41467, |
| | | 40347, 40379, | 40731, 40763, | 41115, 41147, | | 41499, 41531, |
| | | 40411, 40443 | 40795, 40827 | 41179, 41211 | | 41563, 41595 |
| 39932 | 39964, | 40092, 40124, | 40476, 40508, | 40860, 40892, | | 41244, 41276, |
| | 39996, | 40156, 40188, | 40540, 40572, | 40924, 40956, | | 41308, 41340, |
| | 40028, | 40220, 40252, | 40604, 40636, | 40988, 41020, | | 41372, 41404, |
| | 40060 | 40284, 40316, | 40668, 40700, | 41052, 41084, | | 41436, 41468, |
| | | 40348, 40380, | 40732, 40764, | 41116, 41148, | | 41500, 41532, |
| | | 40412, 40444 | 40796, 40828 | 41180, 41212 | | 41564, 41596 |
| 39933 | 39965, | 40093, 40125, | 40477, 40509, | 40861, 40893, | | 41245, 41277, |
| | 39997, | 40157, 40189, | 40541, 40573, | 40925, 40957, | | 41309, 41341, |
| | 40029, | 40221, 40253, | 40605, 40637, | 40989, 41021, | | 41373, 41405, |
| | 40061 | 40285, 40317, | 40669, 40701, | 41053, 41085, | | 41437, 41469, |
| | | 40349, 40381, | 40733, 40765, | 41117, 41149, | | 41501, 41533, |
| | | 40413, 40445 | 40797, 40829 | 41181, 41213 | | 41565, 41597 |
| 39934 | 39966, | 40094, 40126, | 40478, 40510, | 40862, 40894, | | 41246, 41278, |
| | 39998, | 40158, 40190, | 40542, 40574, | 40926, 40958, | | 41310, 41342, |
| | 40030, | 40222, 40254, | 40606, 40638, | 40990, 41022, | | 41374, 41406, |
| | 40062 | 40286, 40318, | 40670, 40702, | 41054, 41086, | | 41438, 41470, |
| | | 40350, 40382, | 40734, 40766, | 41118, 41150, | | 41502, 41534, |
| | | 40414, 40446 | 40798, 40830 | 41182, 41214 | | 41566, 41598 |
| 39935 | 39967, | 40095, 40127, | 40479, 40511, | 40863, 40895, | | 41247, 41279, |
| | 39999, | 40159, 40191, | 40543, 40575, | 40927, 40959, | | 41311, 41343, |
| | 40031, | 40223, 40255, | 40607, 40639, | 40991, 41023, | | 41375, 41407, |
| | 40063 | 40287, 40319, | 40671, 40703, | 41055, 41087, | | 41439, 41471, |
| | | 40351, 40383, | 40735, 40767, | 41119, 41151, | | 41503, 41535, |
| | | 40415, 40447 | 40799, 40831 | 41183, 41215 | | 41567, 41599 |
| 39936 | 39968, | 40096, 40128, | 40480, 40512, | 40864, 40896, | | 41248, 41280, |
| | 40000, | 40160, 40192, | 40544, 40576, | 40928, 40960, | | 41312, 41344, |
| | 40032, | 40224, 40256, | 40608, 40640, | 40992, 41024, | | 41376, 41408, |
| | 40064 | 40288, 40320, | 40672, 40704, | 41056, 41088, | | 41440, 41472, |
| | | 40352, 40384, | 40736, 40768, | 41120, 41152, | | 41504, 41536, |
| | | 40416, 40448 | 40800, 40832 | 41184, 41216 | | 41568, 41600 |
| 39937 | 39969, | 40097, 40129, | 40481, 40513, | 40865, 40897, | | 41249, 41281, |
| | 40001, | 40161, 40193, | 40545, 40577, | 40929, 40961, | | 41313, 41345, |
| | 40033, | 40225, 40257, | 40609, 40641, | 40993, 41025, | | 41377, 41409, |
| | 40065 | 40289, 40321, | 40673, 40705, | 41057, 41089, | | 41441, 41473, |
| | | 40353, 40385, | 40737, 40769, | 41121, 41153, | | 41505, 41537, |
| | | 40417, 40449 | 40801, 40833 | 41185, 41217 | | 41569, 41601 |
| 39938 | 39970, | 40098, 40130, | 40482, 40514, | 40866, 40898, | | 41250, 41282, |
| | 40002, | 40162, 40194, | 40546, 40578, | 40930, 40962, | | 41314, 41346, |
| | 40034, | 40226, 40258, | 40610, 40642, | 40994, 41026, | | 41378, 41410, |
| | 40066 | 40290, 40322, | 40674, 40706, | 41058, 41090, | | 41442, 41474, |
| | | 40354, 40386, | 40738, 40770, | 41122, 41154, | | 41506, 41538, |
| | | 40418, 40450 | 40802, 40834 | 41186, 41218 | | 41570, 41602 |
| 39939 | 39971, | 40099, 40131, | 40483, 40515, | 40867, 40899, | | 41251, 41283, |
| | 40003, | 40163, 40195, | 40547, 40579, | 40931, 40963, | | 41315, 41347, |
| | 40035, | 40227, 40259, | 40611, 40643, | 40995, 41027, | | 41379, 41411, |
| | 40067 | 40291, 40323, | 40675, 40707, | 41059, 41091, | | 41443, 41475, |
| | | 40355, 40387, | 40739, 40771, | 41123, 41155, | | 41507, 41539, |
| | | 40419, 40451 | 40803, 40835 | 41187, 41219 | | 41571, 41603 |
| 39940 | 39972, | 40100, 40132, | 40484, 40516, | 40868, 40900, | | 41252, 41284, |
| | 40004, | 40164, 40196, | 40548, 40580, | 40932, 40964, | | 41316, 41348, |
| | 40036, | 40228, 40260, | 40612, 40644, | 40996, 41028, | | 41380, 41412, |
| | 40068 | 40292, 40324, | 40676, 40708, | 41060, 41092, | | 41444, 41476, |
| | | 40356, 40388, | 40740, 40772, | 41124, 41156, | | 41508, 41540, |
| | | 40420, 40452 | 40804, 40836 | 41188, 41220 | | 41572, 41604 |

TABLE 3.13
Preferred LASV prefusion-stabilized (GPCmut13) constructs

| | | RNA designs and SEQ ID NOs | | | | |
|---|---|---|---|---|---|---|
| PRT | CDS | a-1 | a-2 | b-4 | i-2 | i-3 |
| 41605 | 41637, | 41765, 41797, | 42149, 42181, | 42533, 42565, | | 42917, 42949, |
| | 41669, | 41829, 41861, | 42213, 42245, | 42597, 42629, | | 42981, 43013, |
| | 41701, | 41893, 41925, | 42277, 42309, | 42661, 42693, | | 43045, 43077, |
| | 41733 | 41957, 41989, | 42341, 42373, | 42725, 42757, | | 43109, 43141, |
| | | 42021, 42053, | 42405, 42437, | 42789, 42821, | | 43173, 43205, |
| | | 42085, 42117 | 42469, 42501 | 42853, 42885 | | 43237, 43269 |
| 41606 | 41638, | 41766, 41798, | 42150, 42182, | 42534, 42566, | | 42918, 42950, |
| | 41670, | 41830, 41862, | 42214, 42246, | 42598, 42630, | | 42982, 43014, |
| | 41702, | 41894, 41926, | 42278, 42310, | 42662, 42694, | | 43046, 43078, |
| | 41734 | 41958, 41990, | 42342, 42374, | 42726, 42758, | | 43110, 43142, |
| | | 42022, 42054, | 42406, 42438, | 42790, 42822, | | 43174, 43206, |
| | | 42086, 42118 | 42470, 42502 | 42854, 42886 | | 43238, 43270 |
| 41607 | 41639, | 41767, 41799, | 42151, 42183, | 42535, 42567, | | 42919, 42951, |
| | 41671, | 41831, 41863, | 42215, 42247, | 42599, 42631, | | 42983, 43015, |
| | 41703, | 41895, 41927, | 42279, 42311, | 42663, 42695, | | 43047, 43079, |
| | 41735 | 41959, 41991, | 42343, 42375, | 42727, 42759, | | 43111, 43143, |
| | | 42023, 42055, | 42407, 42439, | 42791, 42823, | | 43175, 43207, |
| | | 42087, 42119 | 42471, 42503 | 42855, 42887 | | 43239, 43271 |
| 41608 | 41640, | 41768, 41800, | 42152, 42184, | 42536, 42568, | | 42920, 42952, |
| | 41672, | 41832, 41864, | 42216, 42248, | 42600, 42632, | | 42984, 43016, |
| | 41704, | 41896, 41928, | 42280, 42312, | 42664, 42696, | | 43048, 43080, |
| | 41736 | 41960, 41992, | 42344, 42376, | 42728, 42760, | | 43112, 43144, |
| | | 42024, 42056, | 42408, 42440, | 42792, 42824, | | 43176, 43208, |
| | | 42088, 42120 | 42472, 42504 | 42856, 42888 | | 43240, 43272 |
| 41609 | 41641, | 41769, 41801, | 42153, 42185, | 42537, 42569, | | 42921, 42953, |
| | 41673, | 41833, 41865, | 42217, 42249, | 42601, 42633, | | 42985, 43017, |
| | 41705, | 41897, 41929, | 42281, 42313, | 42665, 42697, | | 43049, 43081, |
| | 41737 | 41961, 41993, | 42345, 42377, | 42729, 42761, | | 43113, 43145, |
| | | 42025, 42057, | 42409, 42441, | 42793, 42825, | | 43177, 43209, |
| | | 42089, 42121 | 42473, 42505 | 42857, 42889 | | 43241, 43273 |
| 41610 | 41642, | 41770, 41802, | 42154, 42186, | 42538, 42570, | | 42922, 42954, |
| | 41674, | 41834, 41866, | 42218, 42250, | 42602, 42634, | | 42986, 43018, |
| | 41706, | 41898, 41930, | 42282, 42314, | 42666, 42698, | | 43050, 43082, |
| | 41738 | 41962, 41994, | 42346, 42378, | 42730, 42762, | | 43114, 43146, |
| | | 42026, 42058, | 42410, 42442, | 42794, 42826, | | 43178, 43210, |
| | | 42090, 42122 | 42474, 42506 | 42858, 42890 | | 43242, 43274 |
| 41611 | 41643, | 41771, 41803, | 42155, 42187, | 42539, 42571, | | 42923, 42955, |
| | 41675, | 41835, 41867, | 42219, 42251, | 42603, 42635, | | 42987, 43019, |
| | 41707, | 41899, 41931, | 42283, 42315, | 42667, 42699, | | 43051, 43083, |
| | 41739 | 41963, 41995, | 42347, 42379, | 42731, 42763, | | 43115, 43147, |
| | | 42027, 42059, | 42411, 42443, | 42795, 42827, | | 43179, 43211, |
| | | 42091, 42123 | 42475, 42507 | 42859, 42891 | | 43243, 43275 |
| 41612 | 41644, | 41772, 41804, | 42156, 42188, | 42540, 42572, | | 42924, 42956, |
| | 41676, | 41836, 41868, | 42220, 42252, | 42604, 42636, | | 42988, 43020, |
| | 41708, | 41900, 41932, | 42284, 42316, | 42668, 42700, | | 43052, 43084, |
| | 41740 | 41964, 41996, | 42348, 42380, | 42732, 42764, | | 43116, 43148, |
| | | 42028, 42060, | 42412, 42444, | 42796, 42828, | | 43180, 43212, |
| | | 42092, 42124 | 42476, 42508 | 42860, 42892 | | 43244, 43276 |
| 41613 | 41645, | 41773, 41805, | 42157, 42189, | 42541, 42573, | | 42925, 42957, |
| | 41677, | 41837, 41869, | 42221, 42253, | 42605, 42637, | | 42989, 43021, |
| | 41709, | 41901, 41933, | 42285, 42317, | 42669, 42701, | | 43053, 43085, |
| | 41741 | 41965, 41997, | 42349, 42381, | 42733, 42765, | | 43117, 43149, |
| | | 42029, 42061, | 42413, 42445, | 42797, 42829, | | 43181, 43213, |
| | | 42093, 42125 | 42477, 42509 | 42861, 42893 | | 43245, 43277 |
| 41614 | 41646, | 41774, 41806, | 42158, 42190, | 42542, 42574, | | 42926, 42958, |
| | 41678, | 41838, 41870, | 42222, 42254, | 42606, 42638, | | 42990, 43022, |
| | 41710, | 41902, 41934, | 42286, 42318, | 42670, 42702, | | 43054, 43086, |
| | 41742 | 41966, 41998, | 42350, 42382, | 42734, 42766, | | 43118, 43150, |
| | | 42030, 42062, | 42414, 42446, | 42798, 42830, | | 43182, 43214, |
| | | 42094, 42126 | 42478, 42510 | 42862, 42894 | | 43246, 43278 |
| 41615 | 41647, | 41775, 41807, | 42159, 42191, | 42543, 42575, | | 42927, 42959, |
| | 41679, | 41839, 41871, | 42223, 42255, | 42607, 42639, | | 42991, 43023, |
| | 41711, | 41903, 41935, | 42287, 42319, | 42671, 42703, | | 43055, 43087, |
| | 41743 | 41967, 41999, | 42351, 42383, | 42735, 42767, | | 43119, 43151, |
| | | 42031, 42063, | 42415, 42447, | 42799, 42831, | | 43183, 43215, |
| | | 42095, 42127 | 42479, 42511 | 42863, 42895 | | 43247, 43279 |
| 41616 | 41648, | 41776, 41808, | 42160, 42192, | 42544, 42576, | | 42928, 42960, |
| | 41680, | 41840, 41872, | 42224, 42256, | 42608, 42640, | | 42992, 43024, |
| | 41712, | 41904, 41936, | 42288, 42320, | 42672, 42704, | | 43056, 43088, |
| | 41744 | 41968, 42000, | 42352, 42384, | 42736, 42768, | | 43120, 43152, |
| | | 42032, 42064, | 42416, 42448, | 42800, 42832, | | 43184, 43216, |
| | | 42096, 42128 | 42480, 42512 | 42864, 42896 | | 43248, 43280 |
| 41617 | 41649, | 41777, 41809, | 42161, 42193, | 42545, 42577, | | 42929, 42961, |
| | 41681, | 41841, 41873, | 42225, 42257, | 42609, 42641, | | 42993, 43025, |
| | 41713, | 41905, 41937, | 42289, 42321, | 42673, 42705, | | 43057, 43089, |
| | 41745 | 41969, 42001, | 42353, 42385, | 42737, 42769, | | 43121, 43153, |
| | | 42033, 42065, | 42417, 42449, | 42801, 42833, | | 43185, 43217, |
| | | 42097, 42129 | 42481, 42513 | 42865, 42897 | | 43249, 43281 |
| 41618 | 41650, | 41778, 41810, | 42162, 42194, | 42546, 42578, | | 42930, 42962, |
| | 41682, | 41842, 41874, | 42226, 42258, | 42610, 42642, | | 42994, 43026, |
| | 41714, | 41906, 41938, | 42290, 42322, | 42674, 42706, | | 43058, 43090, |
| | 41746 | 41970, 42002, | 42354, 42386, | 42738, 42770, | | 43122, 43154, |
| | | 42034, 42066, | 42418, 42450, | 42802, 42834, | | 43186, 43218, |
| | | 42098, 42130 | 42482, 42514 | 42866, 42898 | | 43250, 43282 |
| 41619 | 41651, | 41779, 41811, | 42163, 42195, | 42547, 42579, | | 42931, 42963, |
| | 41683, | 41843, 41875, | 42227, 42259, | 42611, 42643, | | 42995, 43027, |
| | 41715, | 41907, 41939, | 42291, 42323, | 42675, 42707, | | 43059, 43091, |
| | 41747 | 41971, 42003, | 42355, 42387, | 42739, 42771, | | 43123, 43155, |
| | | 42035, 42067, | 42419, 42451, | 42803, 42835, | | 43187, 43219, |
| | | 42099, 42131 | 42483, 42515 | 42867, 42899 | | 43251, 43283 |
| 41620 | 41652, | 41780, 41812, | 42164, 42196, | 42548, 42580, | | 42932, 42964, |
| | 41684, | 41844, 41876, | 42228, 42260, | 42612, 42644, | | 42996, 43028, |
| | 41716, | 41908, 41940, | 42292, 42324, | 42676, 42708, | | 43060, 43092, |
| | 41748 | 41972, 42004, | 42356, 42388, | 42740, 42772, | | 43124, 43156, |
| | | 42036, 42068, | 42420, 42452, | 42804, 42836, | | 43188, 43220, |
| | | 42100, 42132 | 42484, 42516 | 42868, 42900 | | 43252, 43284 |
| 41621 | 41653, | 41781, 41813, | 42165, 42197, | 42549, 42581, | | 42933, 42965, |
| | 41685, | 41845, 41877, | 42229, 42261, | 42613, 42645, | | 42997, 43029, |
| | 41717, | 41909, 41941, | 42293, 42325, | 42677, 42709, | | 43061, 43093, |
| | 41749 | 41973, 42005, | 42357, 42389, | 42741, 42773, | | 43125, 43157, |
| | | 42037, 42069, | 42421, 42453, | 42805, 42837, | | 43189, 43221, |
| | | 42101, 42133 | 42485, 42517 | 42869, 42901 | | 43253, 43285 |
| 41622 | 41654, | 41782, 41814, | 42166, 42198, | 42550, 42582, | | 42934, 42966, |
| | 41686, | 41846, 41878, | 42230, 42262, | 42614, 42646, | | 42998, 43030, |
| | 41718, | 41910, 41942, | 42294, 42326, | 42678, 42710, | | 43062, 43094, |
| | 41750 | 41974, 42006, | 42358, 42390, | 42742, 42774, | | 43126, 43158, |
| | | 42038, 42070, | 42422, 42454, | 42806, 42838, | | 43190, 43222, |
| | | 42102, 42134 | 42486, 42518 | 42870, 42902 | | 43254, 43286 |
| 41623 | 41655, | 41783, 41815, | 42167, 42199, | 42551, 42583, | | 42935, 42967, |
| | 41687, | 41847, 41879, | 42231, 42263, | 42615, 42647, | | 42999, 43031, |
| | 41719, | 41911, 41943, | 42295, 42327, | 42679, 42711, | | 43063, 43095, |
| | 41751 | 41975, 42007, | 42359, 42391, | 42743, 42775, | | 43127, 43159, |
| | | 42039, 42071, | 42423, 42455, | 42807, 42839, | | 43191, 43223, |
| | | 42103, 42135 | 42487, 42519 | 42871, 42903 | | 43255, 43287 |
| 41624 | 41656, | 41784, 41816, | 42168, 42200, | 42552, 42584, | | 42936, 42968, |
| | 41688, | 41848, 41880, | 42232, 42264, | 42616, 42648, | | 43000, 43032, |
| | 41720, | 41912, 41944, | 42296, 42328, | 42680, 42712, | | 43064, 43096, |
| | 41752 | 41976, 42008, | 42360, 42392, | 42744, 42776, | | 43128, 43160, |
| | | 42040, 42072, | 42424, 42456, | 42808, 42840, | | 43192, 43224, |
| | | 42104, 42136 | 42488, 42520 | 42872, 42904 | | 43256, 43288 |
| 41625 | 41657, | 41785, 41817, | 42169, 42201, | 42553, 42585, | | 42937, 42969, |
| | 41689, | 41849, 41881, | 42233, 42265, | 42617, 42649, | | 43001, 43033, |
| | 41721, | 41913, 41945, | 42297, 42329, | 42681, 42713, | | 43065, 43097, |
| | 41753 | 41977, 42009, | 42361, 42393, | 42745, 42777, | | 43129, 43161, |
| | | 42041, 42073, | 42425, 42457, | 42809, 42841, | | 43193, 43225, |
| | | 42105, 42137 | 42489, 42521 | 42873, 42905 | | 43257, 43289 |
| 41626 | 41658, | 41786, 41818, | 42170, 42202, | 42554, 42586, | | 42938, 42970, |
| | 41690, | 41850, 41882, | 42234, 42266, | 42618, 42650, | | 43002, 43034, |
| | 41722, | 41914, 41946, | 42298, 42330, | 42682, 42714, | | 43066, 43098, |
| | 41754 | 41978, 42010, | 42362, 42394, | 42746, 42778, | | 43130, 43162, |
| | | 42042, 42074, | 42426, 42458, | 42810, 42842, | | 43194, 43226, |
| | | 42106, 42138 | 42490, 42522 | 42874, 42906 | | 43258, 43290 |
| 41627 | 41659, | 41787, 41819, | 42171, 42203, | 42555, 42587, | | 42939, 42971, |
| | 41691, | 41851, 41883, | 42235, 42267, | 42619, 42651, | | 43003, 43035, |
| | 41723, | 41915, 41947, | 42299, 42331, | 42683, 42715, | | 43067, 43099, |
| | 41755 | 41979, 42011, | 42363, 42395, | 42747, 42779, | | 43131, 43163, |
| | | 42043, 42075, | 42427, 42459, | 42811, 42843, | | 43195, 43227, |
| | | 42107, 42139 | 42491, 42523 | 42875, 42907 | | 43259, 43291 |
| 41628 | 41660, | 41788, 41820, | 42172, 42204, | 42556, 42588, | | 42940, 42972, |
| | 41692, | 41852, 41884, | 42236, 42268, | 42620, 42652, | | 43004, 43036, |
| | 41724, | 41916, 41948, | 42300, 42332, | 42684, 42716, | | 43068, 43100, |
| | 41756 | 41980, 42012, | 42364, 42396, | 42748, 42780, | | 43132, 43164, |
| | | 42044, 42076, | 42428, 42460, | 42812, 42844, | | 43196, 43228, |
| | | 42108, 42140 | 42492, 42524 | 42876, 42908 | | 43260, 43292 |
| 41629 | 41661, | 41789, 41821, | 42173, 42205, | 42557, 42589, | | 42941, 42973, |
| | 41693, | 41853, 41885, | 42237, 42269, | 42621, 42653, | | 43005, 43037, |
| | 41725, | 41917, 41949, | 42301, 42333, | 42685, 42717, | | 43069, 43101, |
| | 41757 | 41981, 42013, | 42365, 42397, | 42749, 42781, | | 43133, 43165, |
| | | 42045, 42077, | 42429, 42461, | 42813, 42845, | | 43197, 43229, |
| | | 42109, 42141 | 42493, 42525 | 42877, 42909 | | 43261, 43293 |
| 41630 | 41662, | 41790, 41822, | 42174, 42206, | 42558, 42590, | | 42942, 42974, |
| | 41694, | 41854, 41886, | 42238, 42270, | 42622, 42654, | | 43006, 43038, |
| | 41726, | 41918, 41950, | 42302, 42334, | 42686, 42718, | | 43070, 43102, |
| | 41758 | 41982, 42014, | 42366, 42398, | 42750, 42782, | | 43134, 43166, |
| | | 42046, 42078, | 42430, 42462, | 42814, 42846, | | 43198, 43230, |
| | | 42110, 42142 | 42494, 42526 | 42878, 42910 | | 43262, 43294 |
| 41631 | 41663, | 41791, 41823, | 42175, 42207, | 42559, 42591, | | 42943, 42975, |
| | 41695, | 41855, 41887, | 42239, 42271, | 42623, 42655, | | 43007, 43039, |
| | 41727, | 41919, 41951, | 42303, 42335, | 42687, 42719, | | 43071, 43103, |
| | 41759 | 41983, 42015, | 42367, 42399, | 42751, 42783, | | 43135, 43167, |
| | | 42047, 42079, | 42431, 42463, | 42815, 42847, | | 43199, 43231, |
| | | 42111, 42143 | 42495, 42527 | 42879, 42911 | | 43263, 43295 |
| 41632 | 41664, | 41792, 41824, | 42176, 42208, | 42560, 42592, | | 42944, 42976, |
| | 41696, | 41856, 41888, | 42240, 42272, | 42624, 42656, | | 43008, 43040, |
| | 41728, | 41920, 41952, | 42304, 42336, | 42688, 42720, | | 43072, 43104, |
| | 41760 | 41984, 42016, | 42368, 42400, | 42752, 42784, | | 43136, 43168, |
| | | 42048, 42080, | 42432, 42464, | 42816, 42848, | | 43200, 43232, |
| | | 42112, 42144 | 42496, 42528 | 42880, 42912 | | 43264, 43296 |
| 41633 | 41665, | 41793, 41825, | 42177, 42209, | 42561, 42593, | | 42945, 42977, |
| | 41697, | 41857, 41889, | 42241, 42273, | 42625, 42657, | | 43009, 43041, |
| | 41729, | 41921, 41953, | 42305, 42337, | 42689, 42721, | | 43073, 43105, |
| | 41761 | 41985, 42017, | 42369, 42401, | 42753, 42785, | | 43137, 43169, |
| | | 42049, 42081, | 42433, 42465, | 42817, 42849, | | 43201, 43233, |
| | | 42113, 42145 | 42497, 42529 | 42881, 42913 | | 43265, 43297 |
| 41634 | 41666, | 41794, 41826, | 42178, 42210, | 42562, 42594, | | 42946, 42978, |
| | 41698, | 41858, 41890, | 42242, 42274, | 42626, 42658, | | 43010, 43042, |
| | 41730, | 41922, 41954, | 42306, 42338, | 42690, 42722, | | 43074, 43106, |
| | 41762 | 41986, 42018, | 42370, 42402, | 42754, 42786, | | 43138, 43170, |
| | | 42050, 42082, | 42434, 42466, | 42818, 42850, | | 43202, 43234, |
| | | 42114, 42146 | 42498, 42530 | 42882, 42914 | | 43266, 43298 |
| 41635 | 41667, | 41795, 41827, | 42179, 42211, | 42563, 42595, | | 42947, 42979, |
| | 41699, | 41859, 41891, | 42243, 42275, | 42627, 42659, | | 43011, 43043, |
| | 41731, | 41923, 41955, | 42307, 42339, | 42691, 42723, | | 43075, 43107, |
| | 41763 | 41987, 42019, | 42371, 42403, | 42755, 42787, | | 43139, 43171, |
| | | 42051, 42083, | 42435, 42467, | 42819, 42851, | | 43203, 43235, |
| | | 42115, 42147 | 42499, 42531 | 42883, 42915 | | 43267, 43299 |
| 41636 | 41668, | 41796, 41828, | 42180, 42212, | 42564, 42596, | | 42948, 42980, |
| | 41700, | 41860, 41892, | 42244, 42276, | 42628, 42660, | | 43012, 43044, |
| | 41732, | 41924, 41956, | 42308, 42340, | 42692, 42724, | | 43076, 43108, |
| | 41764 | 41988, 42020, | 42372, 42404, | 42756, 42788, | | 43140, 43172, |
| | | 42052, 42084, | 42436, 42468, | 42820, 42852, | | 43204, 43236, |
| | | 42116, 42148 | 42500, 42532 | 42884, 42916 | | 43268, 43300 |

TABLE 4
Preferred LASV Nucleoprotein (NP) constructs

| | | RNA designs and SEQ ID NOs | | | | |
|---|---|---|---|---|---|---|
| PRT | CDS | a-1 | a-2 | b-4 | i-2 | i-3 |
| 7547 | 7798, | 9806, 9840, | 10078, 10112, | 10350, 10384, | 10622, | 10894, 10928, |
| | 8049, | 9874, 9908, | 10146, 10180, | 10418, 10452, | 10656, | 10962, 10996, |
| | 8300, | 9942, 9976, | 10214, 10248, | 10486, 10520, | 10690, | 11030, 11064, |
| | 8551, | 10010, 10044, | 10282, 10316, | 10554, 10588, | 10724, | 11098, 11132, |
| | 8802, | 16744, 16778, | 17050, 17084, | 17356, 17390, | 10758, | 17662, 17696, |
| | 9053, | 16812, 16846, | 17118, 17152, | 17424, 17458, | 10792, | 17730, 17764, |
| | 9304, | 16880, 16914, | 17186, 17220, | 17492, 17526, | 10826, | 17798, 17832, |
| | 9555 | 16948, 16982, | 17254, 17288, | 17560, 17594, | 10860 | 17866, 17900, |
| | | 17016 | 17322 | 17628 | | 17934 |
| 7548 | 7799, | 9807, 9841, | 10079, 10113, | 10351, 10385, | 10623, | 10895, 10929, |
| | 8050, | 9875, 9909, | 10147, 10181, | 10419, 10453, | 10657, | 10963, 10997, |
| | 8301, | 9943, 9977, | 10215, 10249, | 10487, 10521, | 10691, | 11031, 11065, |
| | 8552, | 10011, 10045, | 10283, 10317, | 10555, 10589, | 10725, | 11099, 11133, |
| | 8803, | 16745, 16779, | 17051, 17085, | 17357, 17391, | 10759, | 17663, 17697, |
| | 9054, | 16813, 16847, | 17119, 17153, | 17425, 17459, | 10793, | 17731, 17765, |
| | 9305, | 16881, 16915, | 17187, 17221, | 17493, 17527, | 10827, | 17799, 17833, |
| | 9556 | 16949, 16983, | 17255, 17289, | 17561, 17595, | 10861 | 17867, 17901, |
| | | 17017 | 17323 | 17629 | | 17935 |
| 7549 | 7800, | 9808, 9842, | 10080, 10114, | 10352, 10386, | 10624, | 10896, 10930, |
| | 8051, | 9876, 9910, | 10148, 10182, | 10420, 10454, | 10658, | 10964, 10998, |
| | 8302, | 9944, 9978, | 10216, 10250, | 10488, 10522, | 10692, | 11032, 11066, |
| | 8553, | 10012, 10046, | 10284, 10318, | 10556, 10590, | 10726, | 11100, 11134, |
| | 8804, | 16746, 16780, | 17052, 17086, | 17358, 17392, | 10760, | 17664, 17698, |
| | 9055, | 16814, 16848, | 17120, 17154, | 17426, 17460, | 10794, | 17732, 17766, |
| | 9306, | 16882, 16916, | 17188, 17222, | 17494, 17528, | 10828, | 17800, 17834, |
| | 9557 | 16950, 16984, | 17256, 17290, | 17562, 17596, | 10862 | 17868, 17902, |
| | | 17018 | 17324 | 17630 | | 17936 |
| 7550 | 7801, | 9809, 9843, | 10081, 10115, | 10353, 10387, | 10625, | 10897, 10931, |
| | 8052, | 9877, 9911, | 10149, 10183, | 10421, 10455, | 10659, | 10965, 10999, |
| | 8303, | 9945, 9979, | 10217, 10251, | 10489, 10523, | 10693, | 11033, 11067, |
| | 8554, | 10013, 10047, | 10285, 10319, | 10557, 10591, | 10727, | 11101, 11135, |
| | 8805, | 16747, 16781, | 17053, 17087, | 17359, 17393, | 10761, | 17665, 17699, |
| | 9056, | 16815, 16849, | 17121, 17155, | 17427, 17461, | 10795, | 17733, 17767, |
| | 9307, | 16883, 16917, | 17189, 17223, | 17495, 17529, | 10829, | 17801, 17835, |
| | 9558 | 16951, 16985, | 17257, 17291, | 17563, 17597, | 10863 | 17869, 17903, |
| | | 17019 | 17325 | 17631 | | 17937 |
| 7551 | 7802, | 9810, 9844, | 10082, 10116, | 10354, 10388, | 10626, | 10898, 10932, |
| | 8053, | 9878, 9912, | 10150, 10184, | 10422, 10456, | 10660, | 10966, 11000, |
| | 8304, | 9946, 9980, | 10218, 10252, | 10490, 10524, | 10694, | 11034, 11068, |
| | 8555, | 10014, 10048, | 10286, 10320, | 10558, 10592, | 10728, | 11102, 11136, |
| | 8806, | 16748, 16782, | 17054, 17088, | 17360, 17394, | 10762, | 17666, 17700, |
| | 9057, | 16816, 16850, | 17122, 17156, | 17428, 17462, | 10796, | 17734, 17768, |
| | 9308, | 16884, 16918, | 17190, 17224, | 17496, 17530, | 10830, | 17802, 17836, |
| | 9559 | 16952, 16986, | 17258, 17292, | 17564, 17598, | 10864 | 17870, 17904, |
| | | 17020 | 17326 | 17632 | | 17938 |
| 7552 | 7803, | 9811, 9845, | 10083, 10117, | 10355, 10389, | 10627, | 10899, 10933, |
| | 8054, | 9879, 9913, | 10151, 10185, | 10423, 10457, | 10661, | 10967, 11001, |
| | 8305, | 9947, 9981, | 10219, 10253, | 10491, 10525, | 10695, | 11035, 11069, |
| | 8556, | 10015, 10049, | 10287, 10321, | 10559, 10593, | 10729, | 11103, 11137, |
| | 8807, | 16749, 16783, | 17055, 17089, | 17361, 17395, | 10763, | 17667, 17701, |
| | 9058, | 16817, 16851, | 17123, 17157, | 17429, 17463, | 10797, | 17735, 17769, |
| | 9309, | 16885, 16919, | 17191, 17225, | 17497, 17531, | 10831, | 17803, 17837, |
| | 9560 | 16953, 16987, | 17259, 17293, | 17565, 17599, | 10865 | 17871, 17905, |
| | | 17021 | 17327 | 17633 | | 17939 |
| 7553 | 7804, | 9812, 9846, | 10084, 10118, | 10356, 10390, | 10628, | 10900, 10934, |
| | 8055, | 9880, 9914, | 10152, 10186, | 10424, 10458, | 10662, | 10968, 11002, |
| | 8306, | 9948, 9982, | 10220, 10254, | 10492, 10526, | 10696, | 11036, 11070, |
| | 8557, | 10016, 10050, | 10288, 10322, | 10560, 10594, | 10730, | 11104, 11138, |
| | 8808, | 16750, 16784, | 17056, 17090, | 17362, 17396, | 10764, | 17668, 17702, |
| | 9059, | 16818, 16852, | 17124, 17158, | 17430, 17464, | 10798, | 17736, 17770, |
| | 9310, | 16886, 16920, | 17192, 17226, | 17498, 17532, | 10832, | 17804, 17838, |
| | 9561 | 16954, 16988, | 17260, 17294, | 17566, 17600, | 10866 | 17872, 17906, |
| | | 17022 | 17328 | 17634 | | 17940 |
| 7554 | 7805, | 9813, 9847, | 10085, 10119, | 10357, 10391, | 10629, | 10901, 10935, |
| | 8056, | 9881, 9915, | 10153, 10187, | 10425, 10459, | 10663, | 10969, 11003, |
| | 8307, | 9949, 9983, | 10221, 10255, | 10493, 10527, | 10697, | 11037, 11071, |
| | 8558, | 10017, 10051, | 10289, 10323, | 10561, 10595, | 10731, | 11105, 11139, |
| | 8809, | 16751, 16785, | 17057, 17091, | 17363, 17397, | 10765, | 17669, 17703, |
| | 9060, | 16819, 16853, | 17125, 17159, | 17431, 17465, | 10799, | 17737, 17771, |
| | 9311, | 16887, 16921, | 17193, 17227, | 17499, 17533, | 10833, | 17805, 17839, |
| | 9562 | 16955, 16989, | 17261, 17295, | 17567, 17601, | 10867 | 17873, 17907, |
| | | 17023 | 17329 | 17635 | | 17941 |
| 7555 | 7806, | 9814, 9848, | 10086, 10120, | 10358, 10392, | 10630, | 10902, 10936, |
| | 8057, | 9882, 9916, | 10154, 10188, | 10426, 10460, | 10664, | 10970, 11004, |
| | 8308, | 9950, 9984, | 10222, 10256, | 10494, 10528, | 10698, | 11038, 11072, |
| | 8559, | 10018, 10052, | 10290, 10324, | 10562, 10596, | 10732, | 11106, 11140, |
| | 8810, | 16752, 16786, | 17058, 17092, | 17364, 17398, | 10766, | 17670, 17704, |
| | 9061, | 16820, 16854, | 17126, 17160, | 17432, 17466, | 10800, | 17738, 17772, |
| | 9312, | 16888, 16922, | 17194, 17228, | 17500, 17534, | 10834, | 17806, 17840, |
| | 9563 | 16956, 16990, | 17262, 17296, | 17568, 17602, | 10868 | 17874, 17908, |
| | | 17024 | 17330 | 17636 | | 17942 |
| 7573 | 7824, | 9815, 9849, | 10087, 10121, | 10359, 10393, | 10631, | 10903, 10937, |
| | 8075, | 9883, 9917, | 10155, 10189, | 10427, 10461, | 10665, | 10971, 11005, |
| | 8326, | 9951, 9985, | 10223, 10257, | 10495, 10529, | 10699, | 11039, 11073, |
| | 8577, | 10019, 10053, | 10291, 10325, | 10563, 10597, | 10733, | 11107, 11141, |
| | 8828, | 16753, 16787, | 17059, 17093, | 17365, 17399, | 10767, | 17671, 17705, |
| | 9079, | 16821, 16855, | 17127, 17161, | 17433, 17467, | 10801, | 17739, 17773, |
| | 9330, | 16889, 16923, | 17195, 17229, | 17501, 17535, | 10835, | 17807, 17841, |
| | 9581 | 16957, 16991, | 17263, 17297, | 17569, 17603, | 10869 | 17875, 17909, |
| | | 17025 | 17331 | 17637 | | 17943 |
| 7593 | 7844, | 9816, 9850, | 10088, 10122, | 10360, 10394, | 10632, | 10904, 10938, |
| | 8095, | 9884, 9918, | 10156, 10190, | 10428, 10462, | 10666, | 10972, 11006, |
| | 8346, | 9952, 9986, | 10224, 10258, | 10496, 10530, | 10700, | 11040, 11074, |
| | 8597, | 10020, 10054, | 10292, 10326, | 10564, 10598, | 10734, | 11108, 11142, |
| | 8848, | 16754, 16788, | 17060, 17094, | 17366, 17400, | 10768, | 17672, 17706, |
| | 9099, | 16822, 16856, | 17128, 17162, | 17434, 17468, | 10802, | 17740, 17774, |
| | 9350, | 16890, 16924, | 17196, 17230, | 17502, 17536, | 10836, | 17808, 17842, |
| | 9601 | 16958, 16992, | 17264, 17298, | 17570, 17604, | 10870 | 17876, 17910, |
| | | 17026 | 17332 | 17638 | | 17944 |
| 7602 | 7853, | 9817, 9851, | 10089, 10123, | 10361, 10395, | 10633, | 10905, 10939, |
| | 8104, | 9885, 9919, | 10157, 10191, | 10429, 10463, | 10667, | 10973, 11007, |
| | 8355, | 9953, 9987, | 10225, 10259, | 10497, 10531, | 10701, | 11041, 11075, |
| | 8606, | 10021, 10055, | 10293, 10327, | 10565, 10599, | 10735, | 11109, 11143, |
| | 8857, | 16755, 16789, | 17061, 17095, | 17367, 17401, | 10769, | 17673, 17707, |
| | 9108, | 16823, 16857, | 17129, 17163, | 17435, 17469, | 10803, | 17741, 17775, |
| | 9359, | 16891, 16925, | 17197, 17231, | 17503, 17537, | 10837, | 17809, 17843, |
| | 9610 | 16959, 16993, | 17265, 17299, | 17571, 17605, | 10871 | 17877, 17911, |
| | | 17027 | 17333 | 17639 | | 17945 |
| 7603 | 7854, | 9818, 9852, | 10090, 10124, | 10362, 10396, | 10634, | 10906, 10940, |
| | 8105, | 9886, 9920, | 10158, 10192, | 10430, 10464, | 10668, | 10974, 11008, |
| | 8356, | 9954, 9988, | 10226, 10260, | 10498, 10532, | 10702, | 11042, 11076, |
| | 8607, | 10022, 10056, | 10294, 10328, | 10566, 10600, | 10736, | 11110, 11144, |
| | 8858, | 16756, 16790, | 17062, 17096, | 17368, 17402, | 10770, | 17674, 17708, |
| | 9109, | 16824, 16858, | 17130, 17164, | 17436, 17470, | 10804, | 17742, 17776, |
| | 9360, | 16892, 16926, | 17198, 17232, | 17504, 17538, | 10838, | 17810, 17844, |
| | 9611 | 16960, 16994, | 17266, 17300, | 17572, 17606, | 10872 | 17878, 17912, |
| | | 17028 | 17334 | 17640 | | 17946 |
| 7645 | 7896, | 9819, 9853, | 10091, 10125, | 10363, 10397, | 10635, | 10907, 10941, |
| | 8147, | 9887, 9921, | 10159, 10193, | 10431, 10465, | 10669, | 10975, 11009, |
| | 8398, | 9955, 9989, | 10227, 10261, | 10499, 10533, | 10703, | 11043, 11077, |
| | 8649, | 10023, 10057, | 10295, 10329, | 10567, 10601, | 10737, | 11111, 11145, |
| | 8900, | 16757, 16791, | 17063, 17097, | 17369, 17403, | 10771, | 17675, 17709, |
| | 9151, | 16825, 16859, | 17131, 17165, | 17437, 17471, | 10805, | 17743, 17777, |
| | 9402, | 16893, 16927, | 17199, 17233, | 17505, 17539, | 10839, | 17811, 17845, |
| | 9653 | 16961, 16995, | 17267, 17301, | 17573, 17607, | 10873 | 17879, 17913, |
| | | 17029 | 17335 | 17641 | | 17947 |
| 7650 | 7901, | 9820, 9854, | 10092, 10126, | 10364, 10398, | 10636, | 10908, 10942, |
| | 8152, | 9888, 9922, | 10160, 10194, | 10432, 10466, | 10670, | 10976, 11010, |
| | 8403, | 9956, 9990, | 10228, 10262, | 10500, 10534, | 10704, | 11044, 11078, |
| | 8654, | 10024, 10058, | 10296, 10330, | 10568, 10602, | 10738, | 11112, 11146, |
| | 8905, | 16758, 16792, | 17064, 17098, | 17370, 17404, | 10772, | 17676, 17710, |
| | 9156, | 16826, 16860, | 17132, 17166, | 17438, 17472, | 10806, | 17744, 17778, |
| | 9407, | 16894, 16928, | 17200, 17234, | 17506, 17540, | 10840, | 17812, 17846, |
| | 9658 | 16962, 16996, | 17268, 17302, | 17574, 17608, | 10874 | 17880, 17914, |
| | | 17030 | 17336 | 17642 | | 17948 |
| 7651 | 7902, | 9821, 9855, | 10093, 10127, | 10365, 10399, | 10637, | 10909, 10943, |
| | 8153, | 9889, 9923, | 10161, 10195, | 10433, 10467, | 10671, | 10977, 11011, |
| | 8404, | 9957, 9991, | 10229, 10263, | 10501, 10535, | 10705, | 11045, 11079, |
| | 8655, | 10025, 10059, | 10297, 10331, | 10569, 10603, | 10739, | 11113, 11147, |
| | 8906, | 16759, 16793, | 17065, 17099, | 17371, 17405, | 10773, | 17677, 17711, |
| | 9157, | 16827, 16861, | 17133, 17167, | 17439, 17473, | 10807, | 17745, 17779, |
| | 9408, | 16895, 16929, | 17201, 17235, | 17507, 17541, | 10841, | 17813, 17847, |
| | 9659 | 16963, 16997, | 17269, 17303, | 17575, 17609, | 10875 | 17881, 17915, |
| | | 17031 | 17337 | 17643 | | 17949 |
| 7658 | 7909, | 9822, 9856, | 10094, 10128, | 10366, 10400, | 10638, | 10910, 10944, |
| | 8160, | 9890, 9924, | 10162, 10196, | 10434, 10468, | 10672, | 10978, 11012, |
| | 8411, | 9958, 9992, | 10230, 10264, | 10502, 10536, | 10706, | 11046, 11080, |
| | 8662, | 10026, 10060, | 10298, 10332, | 10570, 10604, | 10740, | 11114, 11148, |
| | 8913, | 16760, 16794, | 17066, 17100, | 17372, 17406, | 10774, | 17678, 17712, |
| | 9164, | 16828, 16862, | 17134, 17168, | 17440, 17474, | 10808, | 17746, 17780, |
| | 9415, | 16896, 16930, | 17202, 17236, | 17508, 17542, | 10842, | 17814, 17848, |
| | 9666 | 16964, 16998, | 17270, 17304, | 17576, 17610, | 10876 | 17882, 17916, |
| | | 17032 | 17338 | 17644 | | 17950 |
| 7662 | 7913, | 9823, 9857, | 10095, 10129, | 10367, 10401, | 10639, | 10911, 10945, |
| | 8164, | 9891, 9925, | 10163, 10197, | 10435, 10469, | 10673, | 10979, 11013, |
| | 8415, | 9959, 9993, | 10231, 10265, | 10503, 10537, | 10707, | 11047, 11081, |
| | 8666, | 10027, 10061, | 10299, 10333, | 10571, 10605, | 10741, | 11115, 11149, |
| | 8917, | 16761, 16795, | 17067, 17101, | 17373, 17407, | 10775, | 17679, 17713, |
| | 9168, | 16829, 16863, | 17135, 17169, | 17441, 17475, | 10809, | 17747, 17781, |
| | 9419, | 16897, 16931, | 17203, 17237, | 17509, 17543, | 10843, | 17815, 17849, |
| | 9670 | 16965, 16999, | 17271, 17305, | 17577, 17611, | 10877 | 17883, 17917, |
| | | 17033 | 17339 | 17645 | | 17951 |
| 7666 | 7917, | 9824, 9858, | 10096, 10130, | 10368, 10402, | 10640, | 10912, 10946, |
| | 8168, | 9892, 9926, | 10164, 10198, | 10436, 10470, | 10674, | 10980, 11014, |
| | 8419, | 9960, 9994, | 10232, 10266, | 10504, 10538, | 10708, | 11048, 11082, |
| | 8670, | 10028, 10062, | 10300, 10334, | 10572, 10606, | 10742, | 11116, 11150, |
| | 8921, | 16762, 16796, | 17068, 17102, | 17374, 17408, | 10776, | 17680, 17714, |
| | 9172, | 16830, 16864, | 17136, 17170, | 17442, 17476, | 10810, | 17748, 17782, |
| | 9423, | 16898, 16932, | 17204, 17238, | 17510, 17544, | 10844, | 17816, 17850, |
| | 9674 | 16966, 17000, | 17272, 17306, | 17578, 17612, | 10878 | 17884, 17918, |
| | | 17034 | 17340 | 17646 | | 17952 |
| 7671 | 7922, | 9825, 9859, | 10097, 10131, | 10369, 10403, | 10641, | 10913, 10947, |
| | 8173, | 9893, 9927, | 10165, 10199, | 10437, 10471, | 10675, | 10981, 11015, |
| | 8424, | 9961, 9995, | 10233, 10267, | 10505, 10539, | 10709, | 11049, 11083, |
| | 8675, | 10029, 10063, | 10301, 10335, | 10573, 10607, | 10743, | 11117, 11151, |
| | 8926, | 16763, 16797, | 17069, 17103, | 17375, 17409, | 10777, | 17681, 17715, |
| | 9177, | 16831, 16865, | 17137, 17171, | 17443, 17477, | 10811, | 17749, 17783, |
| | 9428, | 16899, 16933, | 17205, 17239, | 17511, 17545, | 10845, | 17817, 17851, |
| | 9679 | 16967, 17001, | 17273, 17307, | 17579, 17613, | 10879 | 17885, 17919, |
| | | 17035 | 17341 | 17647 | | 17953 |
| 7672 | 7923, | 9826, 9860, | 10098, 10132, | 10370, 10404, | 10642, | 10914, 10948, |
| | 8174, | 9894, 9928, | 10166, 10200, | 10438, 10472, | 10676, | 10982, 11016, |
| | 8425, | 9962, 9996, | 10234, 10268, | 10506, 10540, | 10710, | 11050, 11084, |
| | 8676, | 10030, 10064, | 10302, 10336, | 10574, 10608, | 10744, | 11118, 11152, |
| | 8927, | 16764, 16798, | 17070, 17104, | 17376, 17410, | 10778, | 17682, 17716, |
| | 9178, | 16832, 16866, | 17138, 17172, | 17444, 17478, | 10812, | 17750, 17784, |
| | 9429, | 16900, 16934, | 17206, 17240, | 17512, 17546, | 10846, | 17818, 17852, |
| | 9680 | 16968, 17002, | 17274, 17308, | 17580, 17614, | 10880 | 17886, 17920, |
| | | 17036 | 17342 | 17648 | | 17954 |
| 7690 | 7941, | 9827, 9861, | 10099, 10133, | 10371, 10405, | 10643, | 10915, 10949, |
| | 8192, | 9895, 9929, | 10167, 10201, | 10439, 10473, | 10677, | 10983, 11017, |
| | 8443, | 9963, 9997, | 10235, 10269, | 10507, 10541, | 10711, | 11051, 11085, |
| | 8694, | 10031, 10065, | 10303, 10337, | 10575, 10609, | 10745, | 11119, 11153, |
| | 8945, | 16765, 16799, | 17071, 17105, | 17377, 17411, | 10779, | 17683, 17717, |
| | 9196, | 16833, 16867, | 17139, 17173, | 17445, 17479, | 10813, | 17751, 17785, |
| | 9447, | 16901, 16935, | 17207, 17241, | 17513, 17547, | 10847, | 17819, 17853, |
| | 9698 | 16969, 17003, | 17275, 17309, | 17581, 17615, | 10881 | 17887, 17921, |
| | | 17037 | 17343 | 17649 | | 17955 |
| 7692 | 7943, | 9828, 9862, | 10100, 10134, | 10372, 10406, | 10644, | 10916, 10950, |
| | 8194, | 9896, 9930, | 10168, 10202, | 10440, 10474, | 10678, | 10984, 11018, |
| | 8445, | 9964, 9998, | 10236, 10270, | 10508, 10542, | 10712, | 11052, 11086, |
| | 8696, | 10032, 10066, | 10304, 10338, | 10576, 10610, | 10746, | 11120, 11154, |
| | 8947, | 16766, 16800, | 17072, 17106, | 17378, 17412, | 10780, | 17684, 17718, |
| | 9198, | 16834, 16868, | 17140, 17174, | 17446, 17480, | 10814, | 17752, 17786, |
| | 9449, | 16902, 16936, | 17208, 17242, | 17514, 17548, | 10848, | 17820, 17854, |
| | 9700 | 16970, 17004, | 17276, 17310, | 17582, 17616, | 10882 | 17888, 17922, |
| | | 17038 | 17344 | 17650 | | 17956 |
| 7695 | 7946, | 9829, 9863, | 10101, 10135, | 10373, 10407, | 10645, | 10917, 10951, |
| | 8197, | 9897, 9931, | 10169, 10203, | 10441, 10475, | 10679, | 10985, 11019, |
| | 8448, | 9965, 9999, | 10237, 10271, | 10509, 10543, | 10713, | 11053, 11087, |
| | 8699, | 10033, 10067, | 10305, 10339, | 10577, 10611, | 10747, | 11121, 11155, |
| | 8950, | 16767, 16801, | 17073, 17107, | 17379, 17413, | 10781, | 17685, 17719, |
| | 9201, | 16835, 16869, | 17141, 17175, | 17447, 17481, | 10815, | 17753, 17787, |
| | 9452, | 16903, 16937, | 17209, 17243, | 17515, 17549, | 10849, | 17821, 17855, |
| | 9703 | 16971, 17005, | 17277, 17311, | 17583, 17617, | 10883 | 17889, 17923, |
| | | 17039 | 17345 | 17651 | | 17957 |
| 7701 | 7952, | 9830, 9864, | 10102, 10136, | 10374, 10408, | 10646, | 10918, 10952, |
| | 8203, | 9898, 9932, | 10170, 10204, | 10442, 10476, | 10680, | 10986, 11020, |
| | 8454, | 9966, 10000, | 10238, 10272, | 10510, 10544, | 10714, | 11054, 11088, |
| | 8705, | 10034, 10068, | 10306, 10340, | 10578, 10612, | 10748, | 11122, 11156, |
| | 8956, | 16768, 16802, | 17074, 17108, | 17380, 17414, | 10782, | 17686, 17720, |
| | 9207, | 16836, 16870, | 17142, 17176, | 17448, 17482, | 10816, | 17754, 17788, |
| | 9458, | 16904, 16938, | 17210, 17244, | 17516, 17550, | 10850, | 17822, 17856, |
| | 9709 | 16972, 17006, | 17278, 17312, | 17584, 17618, | 10884 | 17890, 17924, |
| | | 17040 | 17346 | 17652 | | 17958 |
| 7704 | 7955, | 9831, 9865, | 10103, 10137, | 10375, 10409, | 10647, | 10919, 10953, |
| | 8206, | 9899, 9933, | 10171, 10205, | 10443, 10477, | 10681, | 10987, 11021, |
| | 8457, | 9967, 10001, | 10239, 10273, | 10511, 10545, | 10715, | 11055, 11089, |
| | 8708, | 10035, 10069, | 10307, 10341, | 10579, 10613, | 10749, | 11123, 11157, |
| | 8959, | 16769, 16803, | 17075, 17109, | 17381, 17415, | 10783, | 17687, 17721, |
| | 9210, | 16837, 16871, | 17143, 17177, | 17449, 17483, | 10817, | 17755, 17789, |
| | 9461, | 16905, 16939, | 17211, 17245, | 17517, 17551, | 10851, | 17823, 17857, |
| | 9712 | 16973, 17007, | 17279, 17313, | 17585, 17619, | 10885 | 17891, 17925, |
| | | 17041 | 17347 | 17653 | | 17959 |
| 7747 | 7998, | 9832, 9866, | 10104, 10138, | 10376, 10410, | 10648, | 10920, 10954, |
| | 8249, | 9900, 9934, | 10172, 10206, | 10444, 10478, | 10682, | 10988, 11022, |
| | 8500, | 9968, 10002, | 10240, 10274, | 10512, 10546, | 10716, | 11056, 11090, |
| | 8751, | 10036, 10070, | 10308, 10342, | 10580, 10614, | 10750, | 11124, 11158, |
| | 9002, | 16770, 16804, | 17076, 17110, | 17382, 17416, | 10784, | 17688, 17722, |
| | 9253, | 16838, 16872, | 17144, 17178, | 17450, 17484, | 10818, | 17756, 17790, |
| | 9504, | 16906, 16940, | 17212, 17246, | 17518, 17552, | 10852, | 17824, 17858, |
| | 9755 | 16974, 17008, | 17280, 17314, | 17586, 17620, | 10886 | 17892, 17926, |
| | | 17042 | 17348 | 17654 | | |
| | | | | | | 17960 |
| 7757 | 8008, | 9833, 9867, | 10105, 10139, | 10377, 10411, | 10649, | 10921, 10955, |
| | 8259, | 9901, 9935, | 10173, 10207, | 10445, 10479, | 10683, | 10989, 11023, |
| | 8510, | 9969, 10003, | 10241, 10275, | 10513, 10547, | 10717, | 11057, 11091, |
| | 8761, | 10037, 10071, | 10309, 10343, | 10581, 10615, | 10751, | 11125, 11159, |
| | 9012, | 16771, 16805, | 17077, 17111, | 17383, 17417, | 10785, | 17689, 17723, |
| | 9263, | 16839, 16873, | 17145, 17179, | 17451, 17485, | 10819, | 17757, 17791, |
| | 9514, | 16907, 16941, | 17213, 17247, | 17519, 17553, | 10853, | 17825, 17859, |
| | 9765 | 16975, 17009, | 17281, 17315, | 17587, 17621, | 10887 | 17893, 17927, |
| | | 17043 | 17349 | 17655 | | 17961 |
| 7763 | 8014, | 9834, 9868, | 10106, 10140, | 10378, 10412, | 10650, | 10922, 10956, |
| | 8265, | 9902, 9936, | 10174, 10208, | 10446, 10480, | 10684, | 10990, 11024, |
| | 8516, | 9970, 10004, | 10242, 10276, | 10514, 10548, | 10718, | 11058, 11092, |
| | 8767, | 10038, 10072, | 10310, 10344, | 10582, 10616, | 10752, | 11126, 11160, |
| | 9018, | 16772, 16806, | 17078, 17112, | 17384, 17418, | 10786, | 17690, 17724, |
| | 9269, | 16840, 16874, | 17146, 17180, | 17452, 17486, | 10820, | 17758, 17792, |
| | 9520, | 16908, 16942, | 17214, 17248, | 17520, 17554, | 10854, | 17826, 17860, |
| | 9771 | 16976, 17010, | 17282, 17316, | 17588, 17622, | 10888 | 17894, 17928, |
| | | 17044 | 17350 | 17656 | | 17962 |
| 7768 | 8019, | 9835, 9869, | 10107, 10141, | 10379, 10413, | 10651, | 10923, 10957, |
| | 8270, | 9903, 9937, | 10175, 10209, | 10447, 10481, | 10685, | 10991, 11025, |
| | 8521, | 9971, 10005, | 10243, 10277, | 10515, 10549, | 10719, | 11059, 11093, |
| | 8772, | 10039, 10073, | 10311, 10345, | 10583, 10617, | 10753, | 11127, 11161, |
| | 9023, | 16773, 16807, | 17079, 17113, | 17385, 17419, | 10787, | 17691, 17725, |
| | 9274, | 16841, 16875, | 17147, 17181, | 17453, 17487, | 10821, | 17759, 17793, |
| | 9525, | 16909, 16943, | 17215, 17249, | 17521, 17555, | 10855, | 17827, 17861, |
| | 9776 | 16977, 17011, | 17283, 17317, | 17589, 17623, | 10889 | 17895, 17929, |
| | | 17045 | 17351 | 17657 | | 17963 |
| 7779 | 8030, | 9836, 9870, | 10108, 10142, | 10380, 10414, | 10652, | 10924, 10958, |
| | 8281, | 9904, 9938, | 10176, 10210, | 10448, 10482, | 10686, | 10992, 11026, |
| | 8532, | 9972, 10006, | 10244, 10278, | 10516, 10550, | 10720, | 11060, 11094, |
| | 8783, | 10040, 10074, | 10312, 10346, | 10584, 10618, | 10754, | 11128, 11162, |
| | 9034, | 16774, 16808, | 17080, 17114, | 17386, 17420, | 10788, | 17692, 17726, |
| | 9285, | 16842, 16876, | 17148, 17182, | 17454, 17488, | 10822, | 17760, 17794, |
| | 9536, | 16910, 16944, | 17216, 17250, | 17522, 17556, | 10856, | 17828, 17862, |
| | 9787 | 16978, 17012, | 17284, 17318, | 17590, 17624, | 10890 | 17896, 17930, |
| | | 17046 | 17352 | 17658 | | 17964 |
| 7781 | 8032, | 9837, 9871, | 10109, 10143, | 10381, 10415, | 10653, | 10925, 10959, |
| | 8283, | 9905, 9939, | 10177, 10211, | 10449, 10483, | 10687, | 10993, 11027, |
| | 8534, | 9973, 10007, | 10245, 10279, | 10517, 10551, | 10721, | 11061, 11095, |
| | 8785, | 10041, 10075, | 10313, 10347, | 10585, 10619, | 10755, | 11129, 11163, |
| | 9036, | 16775, 16809, | 17081, 17115, | 17387, 17421, | 10789, | 17693, 17727, |
| | 9287, | 16843, 16877, | 17149, 17183, | 17455, 17489, | 10823, | 17761, 17795, |
| | 9538, | 16911, 16945, | 17217, 17251, | 17523, 17557, | 10857, | 17829, 17863, |
| | 9789 | 16979, 17013, | 17285, 17319, | 17591, 17625, | 10891 | 17897, 17931, |
| | | 17047 | 17353 | 17659 | | 17965 |
| 7782 | 8033, | 9838, 9872, | 10110, 10144, | 10382, 10416, | 10654, | 10926, 10960, |
| | 8284, | 9906, 9940, | 10178, 10212, | 10450, 10484, | 10688, | 10994, 11028, |
| | 8535, | 9974, 10008, | 10246, 10280, | 10518, 10552, | 10722, | 11062, 11096, |
| | 8786, | 10042, 10076, | 10314, 10348, | 10586, 10620, | 10756, | 11130, 11164, |
| | 9037, | 16776, 16810, | 17082, 17116, | 17388, 17422, | 10790, | 17694, 17728, |
| | 9288, | 16844, 16878, | 17150, 17184, | 17456, 17490, | 10824, | 17762, 17796, |
| | 9539, | 16912, 16946, | 17218, 17252, | 17524, 17558, | 10858, | 17830, 17864, |
| | 9790 | 16980, 17014, | 17286, 17320, | 17592, 17626, | 10892 | 17898, 17932, |
| | | 17048 | 17354 | 17660 | | 17966 |
| 7788 | 8039, | 9839, 9873, | 10111, 10145, | 10383, 10417, | 10655, | 10927, 10961, |
| | 8290, | 9907, 9941, | 10179, 10213, | 10451, 10485, | 10689, | 10995, 11029, |
| | 8541, | 9975, 10009, | 10247, 10281, | 10519, 10553, | 10723, | 11063, 11097, |
| | 8792, | 10043, 10077, | 10315, 10349, | 10587, 10621, | 10757, | 11131, 11165, |
| | 9043, | 16777, 16811, | 17083, 17117, | 17389, 17423, | 10791, | 17695, 17729, |
| | 9294, | 16845, 16879, | 17151, 17185, | 17457, 17491, | 10825, | 17763, 17797, |
| | 9545, | 16913, 16947, | 17219, 17253, | 17525, 17559, | 10859, | 17831, 17865, |
| | 9796 | 16981, 17015, | 17287, 17321, | 17593, 17627, | 10893 | 17899, 17933, |
| | | 17049 | 17355 | 17661 | | 17967 |

TABLE 4.1
Preferred LASV Nucleoprotein (SP-HsPLAT NP) constructs

| | | RNA designs and SEQ ID NOs | | | | |
|---|---|---|---|---|---|---|
| PRT | CDS | a-1 | a-2 | b-4 | i-2 | i-3 |
| 17968 | 18002, | 18104, 18138, | 18410, 18444, | 18716, 18750, | | 19022, 19056, |
| | 18036, | 18172, 18206, | 18478, 18512, | 18784, 18818, | | 19090, 19124, |
| | 18070 | 18240, 18274, | 18546, 18580, | 18852, 18886, | | 19158, 19192, |
| | | 18308, 18342, | 18614, 18648, | 18920, 18954, | | 19226, 19260, |
| | | 18376 | 18682 | 18988 | | 19294 |
| 17969 | 18003, | 18105, 18139, | 18411, 18445, | 18717, 18751, | | 19023, 19057, |
| | 18037, | 18173, 18207, | 18479, 18513, | 18785, 18819, | | 19091, 19125, |
| | 18071 | 18241, 18275, | 18547, 18581, | 18853, 18887, | | 19159, 19193, |
| | | 18309, 18343, | 18615, 18649, | 18921, 18955, | | 19227, 19261, |
| | | 18377 | 18683 | 18989 | | 19295 |
| 17970 | 18004, | 18106, 18140, | 18412, 18446, | 18718, 18752, | | 19024, 19058, |
| | 18038, | 18174, 18208, | 18480, 18514, | 18786, 18820, | | 19092, 19126, |
| | 18072 | 18242, 18276, | 18548, 18582, | 18854, 18888, | | 19160, 19194, |
| | | 18310, 18344, | 18616, 18650, | 18922, 18956, | | 19228, 19262, |
| | | 18378 | 18684 | 18990 | | 19296 |
| 17971 | 18005, | 18107, 18141, | 18413, 18447, | 18719, 18753, | | 19025, 19059, |
| | 18039, | 18175, 18209, | 18481, 18515, | 18787, 18821, | | 19093, 19127, |
| | 18073 | 18243, 18277, | 18549, 18583, | 18855, 18889, | | 19161, 19195, |
| | | 18311, 18345, | 18617, 18651, | 18923, 18957, | | 19229, 19263, |
| | | 18379 | 18685 | 18991 | | 19297 |
| 17972 | 18006, | 18108, 18142, | 18414, 18448, | 18720, 18754, | | 19026, 19060, |
| | 18040, | 18176, 18210, | 18482, 18516, | 18788, 18822, | | 19094, 19128, |
| | 18074 | 18244, 18278, | 18550, 18584, | 18856, 18890, | | 19162, 19196, |
| | | 18312, 18346, | 18618, 18652, | 18924, 18958, | | 19230, 19264, |
| | | 18380 | 18686 | 18992 | | 19298 |
| 17973 | 18007, | 18109, 18143, | 18415, 18449, | 18721, 18755, | | 19027, 19061, |
| | 18041, | 18177, 18211, | 18483, 18517, | 18789, 18823, | | 19095, 19129, |
| | 18075 | 18245, 18279, | 18551, 18585, | 18857, 18891, | | 19163, 19197, |
| | | 18313, 18347, | 18619, 18653, | 18925, 18959, | | 19231, 19265, |
| | | 18381 | 18687 | 18993 | | 19299 |
| 17974 | 18008, | 18110, 18144, | 18416, 18450, | 18722, 18756, | | 19028, 19062, |
| | 18042, | 18178, 18212, | 18484, 18518, | 18790, 18824, | | 19096, 19130, |
| | 18076 | 18246, 18280, | 18552, 18586, | 18858, 18892, | | 19164, 19198, |
| | | 18314, 18348, | 18620, 18654, | 18926, 18960, | | 19232, 19266, |
| | | 18382 | 18688 | 18994 | | 19300 |
| 17975 | 18009, | 18111, 18145, | 18417, 18451, | 18723, 18757, | | 19029, 19063, |
| | 18043, | 18179, 18213, | 18485, 18519, | 18791, 18825, | | 19097, 19131, |
| | 18077 | 18247, 18281, | 18553, 18587, | 18859, 18893, | | 19165, 19199, |
| | | 18315, 18349, | 18621, 18655, | 18927, 18961, | | 19233, 19267, |
| | | 18383 | 18689 | 18995 | | 19301 |
| 17976 | 18010, | 18112, 18146, | 18418, 18452, | 18724, 18758, | | 19030, 19064, |
| | 18044, | 18180, 18214, | 18486, 18520, | 18792, 18826, | | 19098, 19132, |
| | 18078 | 18248, 18282, | 18554, 18588, | 18860, 18894, | | 19166, 19200, |
| | | 18316, 18350, | 18622, 18656, | 18928, 18962, | | 19234, 19268, |
| | | 18384 | 18690 | 18996 | | 19302 |
| 17977 | 18011, | 18113, 18147, | 18419, 18453, | 18725, 18759, | | 19031, 19065, |
| | 18045, | 18181, 18215, | 18487, 18521, | 18793, 18827, | | 19099, 19133, |
| | 18079 | 18249, 18283, | 18555, 18589, | 18861, 18895, | | 19167, 19201, |
| | | 18317, 18351, | 18623, 18657, | 18929, 18963, | | 19235, 19269, |
| | | 18385 | 18691 | 18997 | | 19303 |
| 17978 | 18012, | 18114, 18148, | 18420, 18454, | 18726, 18760, | | 19032, 19066, |
| | 18046, | 18182, 18216, | 18488, 18522, | 18794, 18828, | | 19100, 19134, |
| | 18080 | 18250, 18284, | 18556, 18590, | 18862, 18896, | | 19168, 19202, |
| | | 18318, 18352, | 18624, 18658, | 18930, 18964, | | 19236, 19270, |
| | | 18386 | 18692 | 18998 | | 19304 |
| 17979 | 18013, | 18115, 18149, | 18421, 18455, | 18727, 18761, | | 19033, 19067, |
| | 18047, | 18183, 18217, | 18489, 18523, | 18795, 18829, | | 19101, 19135, |
| | 18081 | 18251, 18285, | 18557, 18591, | 18863, 18897, | | 19169, 19203, |
| | | 18319, 18353, | 18625, 18659, | 18931, 18965, | | 19237, 19271, |
| | | 18387 | 18693 | 18999 | | 19305 |
| 17980 | 18014, | 18116, 18150, | 18422, 18456, | 18728, 18762, | | 19034, 19068, |
| | 18048, | 18184, 18218, | 18490, 18524, | 18796, 18830, | | 19102, 19136, |
| | 18082 | 18252, 18286, | 18558, 18592, | 18864, 18898, | | 19170, 19204, |
| | | 18320, 18354, | 18626, 18660, | 18932, 18966, | | 19238, 19272, |
| | | 18388 | 18694 | 19000 | | 19306 |
| 17981 | 18015, | 18117, 18151, | 18423, 18457, | 18729, 18763, | | 19035, 19069, |
| | 18049, | 18185, 18219, | 18491, 18525, | 18797, 18831, | | 19103, 19137, |
| | 18083 | 18253, 18287, | 18559, 18593, | 18865, 18899, | | 19171, 19205, |
| | | 18321, 18355, | 18627, 18661, | 18933, 18967, | | 19239, 19273, |
| | | 18389 | 18695 | 19001 | | 19307 |
| 17982 | 18016, | 18118, 18152, | 18424, 18458, | 18730, 18764, | | 19036, 19070, |
| | 18050, | 18186, 18220, | 18492, 18526, | 18798, 18832, | | 19104, 19138, |
| | 18084 | 18254, 18288, | 18560, 18594, | 18866, 18900, | | 19172, 19206, |
| | | 18322, 18356, | 18628, 18662, | 18934, 18968, | | 19240, 19274, |
| | | 18390 | 18696 | 19002 | | 19308 |
| 17983 | 18017, | 18119, 18153, | 18425, 18459, | 18731, 18765, | | 19037, 19071, |
| | 18051, | 18187, 18221, | 18493, 18527, | 18799, 18833, | | 19105, 19139, |
| | 18085 | 18255, 18289, | 18561, 18595, | 18867, 18901, | | 19173, 19207, |
| | | 18323, 18357, | 18629, 18663, | 18935, 18969, | | 19241, 19275, |
| | | 18391 | 18697 | 19003 | | 19309 |
| 17984 | 18018, | 18120, 18154, | 18426, 18460, | 18732, 18766, | | 19038, 19072, |
| | 18052, | 18188, 18222, | 18494, 18528, | 18800, 18834, | | 19106, 19140, |
| | 18086 | 18256, 18290, | 18562, 18596, | 18868, 18902, | | 19174, 19208, |
| | | 18324, 18358, | 18630, 18664, | 18936, 18970, | | 19242, 19276, |
| | | 18392 | 18698 | 19004 | | 19310 |
| 17985 | 18019, | 18121, 18155, | 18427, 18461, | 18733, 18767, | | 19039, 19073, |
| | 18053, | 18189, 18223, | 18495, 18529, | 18801, 18835, | | 19107, 19141, |
| | 18087 | 18257, 18291, | 18563, 18597, | 18869, 18903, | | 19175, 19209, |
| | | 18325, 18359, | 18631, 18665, | 18937, 18971, | | 19243, 19277, |
| | | 18393 | 18699 | 19005 | | 19311 |
| 17986 | 18020, | 18122, 18156, | 18428, 18462, | 18734, 18768, | | 19040, 19074, |
| | 18054, | 18190, 18224, | 18496, 18530, | 18802, 18836, | | 19108, 19142, |
| | 18088 | 18258, 18292, | 18564, 18598, | 18870, 18904, | | 19176, 19210, |
| | | 18326, 18360, | 18632, 18666, | 18938, 18972, | | 19244, 19278, |
| | | 18394 | 18700 | 19006 | | 19312 |
| 17987 | 18021, | 18123, 18157, | 18429, 18463, | 18735, 18769, | | 19041, 19075, |
| | 18055, | 18191, 18225, | 18497, 18531, | 18803, 18837, | | 19109, 19143, |
| | 18089 | 18259, 18293, | 18565, 18599, | 18871, 18905, | | 19177, 19211, |
| | | 18327, 18361, | 18633, 18667, | 18939, 18973, | | 19245, 19279, |
| | | 18395 | 18701 | 19007 | | 19313 |
| 17988 | 18022, | 18124, 18158, | 18430, 18464, | 18736, 18770, | | 19042, 19076, |
| | 18056, | 18192, 18226, | 18498, 18532, | 18804, 18838, | | 19110, 19144, |
| | 18090 | 18260, 18294, | 18566, 18600, | 18872, 18906, | | 19178, 19212, |
| | | 18328, 18362, | 18634, 18668, | 18940, 18974, | | 19246, 19280, |
| | | 18396 | 18702 | 19008 | | 19314 |
| 17989 | 18023, | 18125, 18159, | 18431, 18465, | 18737, 18771, | | 19043, 19077, |
| | 18057, | 18193, 18227, | 18499, 18533, | 18805, 18839, | | 19111, 19145, |
| | 18091 | 18261, 18295, | 18567, 18601, | 18873, 18907, | | 19179, 19213, |
| | | 18329, 18363, | 18635, 18669, | 18941, 18975, | | 19247, 19281, |
| | | 18397 | 18703 | 19009 | | 19315 |
| 17990 | 18024, | 18126, 18160, | 18432, 18466, | 18738, 18772, | | 19044, 19078, |
| | 18058, | 18194, 18228, | 18500, 18534, | 18806, 18840, | | 19112, 19146, |
| | 18092 | 18262, 18296, | 18568, 18602, | 18874, 18908, | | 19180, 19214, |
| | | 18330, 18364, | 18636, 18670, | 18942, 18976, | | 19248, 19282, |
| | | 18398 | 18704 | 19010 | | 19316 |
| 17991 | 18025, | 18127, 18161, | 18433, 18467, | 18739, 18773, | | 19045, 19079, |
| | 18059, | 18195, 18229, | 18501, 18535, | 18807, 18841, | | 19113, 19147, |
| | 18093 | 18263, 18297, | 18569, 18603, | 18875, 18909, | | 19181, 19215, |
| | | 18331, 18365, | 18637, 18671, | 18943, 18977, | | 19249, 19283, |
| | | 18399 | 18705 | 19011 | | 19317 |
| 17992 | 18026, | 18128, 18162, | 18434, 18468, | 18740, 18774, | | 19046, 19080, |
| | 18060, | 18196, 18230, | 18502, 18536, | 18808, 18842, | | 19114, 19148, |
| | 18094 | 18264, 18298, | 18570, 18604, | 18876, 18910, | | 19182, 19216, |
| | | 18332, 18366, | 18638, 18672, | 18944, 18978, | | 19250, 19284, |
| | | 18400 | 18706 | 19012 | | 19318 |
| 17993 | 18027, | 18129, 18163, | 18435, 18469, | 18741, 18775, | | 19047, 19081, |
| | 18061, | 18197, 18231, | 18503, 18537, | 18809, 18843, | | 19115, 19149, |
| | 18095 | 18265, 18299, | 18571, 18605, | 18877, 18911, | | 19183, 19217, |
| | | 18333, 18367, | 18639, 18673, | 18945, 18979, | | 19251, 19285, |
| | | 18401 | 18707 | 19013 | | 19319 |
| 17994 | 18028, | 18130, 18164, | 18436, 18470, | 18742, 18776, | | 19048, 19082, |
| | 18062, | 18198, 18232, | 18504, 18538, | 18810, 18844, | | 19116, 19150, |
| | 18096 | 18266, 18300, | 18572, 18606, | 18878, 18912, | | 19184, 19218, |
| | | 18334, 18368, | 18640, 18674, | 18946, 18980, | | 19252, 19286, |
| | | 18402 | 18708 | 19014 | | 19320 |
| 17995 | 18029, | 18131, 18165, | 18437, 18471, | 18743, 18777, | | 19049, 19083, |
| | 18063, | 18199, 18233, | 18505, 18539, | 18811, 18845, | | 19117, 19151, |
| | 18097 | 18267, 18301, | 18573, 18607, | 18879, 18913, | | 19185, 19219, |
| | | 18335, 18369, | 18641, 18675, | 18947, 18981, | | 19253, 19287, |
| | | 18403 | 18709 | 19015 | | 19321 |
| 17996 | 18030, | 18132, 18166, | 18438, 18472, | 18744, 18778, | | 19050, 19084, |
| | 18064, | 18200, 18234, | 18506, 18540, | 18812, 18846, | | 19118, 19152, |
| | 18098 | 18268, 18302, | 18574, 18608, | 18880, 18914, | | 19186, 19220, |
| | | 18336, 18370, | 18642, 18676, | 18948, 18982, | | 19254, 19288, |
| | | 18404 | 18710 | 19016 | | 19322 |
| 17997 | 18031, | 18133, 18167, | 18439, 18473, | 18745, 18779, | | 19051, 19085, |
| | 18065, | 18201, 18235, | 18507, 18541, | 18813, 18847, | | 19119, 19153, |
| | 18099 | 18269, 18303, | 18575, 18609, | 18881, 18915, | | 19187, 19221, |
| | | 18337, 18371, | 18643, 18677, | 18949, 18983, | | 19255, 19289, |
| | | 18405 | 18711 | 19017 | | 19323 |
| 17998 | 18032, | 18134, 18168, | 18440, 18474, | 18746, 18780, | | 19052, 19086, |
| | 18066, | 18202, 18236, | 18508, 18542, | 18814, 18848, | | 19120, 19154, |
| | 18100 | 18270, 18304, | 18576, 18610, | 18882, 18916, | | 19188, 19222, |
| | | 18338, 18372, | 18644, 18678, | 18950, 18984, | | 19256, 19290, |
| | | 18406 | 18712 | 19018 | | 19324 |
| 17999 | 18033, | 18135, 18169, | 18441, 18475, | 18747, 18781, | | 19053, 19087, |
| | 18067, | 18203, 18237, | 18509, 18543, | 18815, 18849, | | 19121, 19155, |
| | 18101 | 18271, 18305, | 18577, 18611, | 18883, 18917, | | 19189, 19223, |
| | | 18339, 18373, | 18645, 18679, | 18951, 18985, | | 19257, 19291, |
| | | 18407 | 18713 | 19019 | | 19325 |
| 18000 | 18034, | 18136, 18170, | 18442, 18476, | 18748, 18782, | | 19054, 19088, |
| | 18068, | 18204, 18238, | 18510, 18544, | 18816, 18850, | | 19122, 19156, |
| | 18102 | 18272, 18306, | 18578, 18612, | 18884, 18918, | | 19190, 19224, |
| | | 18340, 18374, | 18646, 18680, | 18952, 18986, | | 19258, 19292, |
| | | 18408 | 18714 | 19020 | | 19326 |
| 18001 | 18035, | 18137, 18171, | 18443, 18477, | 18749, 18783, | | 19055, 19089, |
| | 18069, | 18205, 18239, | 18511, 18545, | 18817, 18851, | | 19123, 19157, |
| | 18103 | 18273, 18307, | 18579, 18613, | 18885, 18919, | | 19191, 19225, |
| | | 18341, 18375, | 18647, 18681, | 18953, 18987, | | 19259, 19293, |
| | | 18409 | 18715 | 19021 | | 19327 |

TABLE 4.2
Preferred LASV Nucleoprotein (SP-HsALB NP) constructs

| | | RNA designs and SEQ ID NOs | | | | |
|---|---|---|---|---|---|---|
| PRT | CDS | a-1 | a-2 | b-4 | i-2 | i-3 |
| 19328 | 19362, | 19464, 19498, | 19770, 19804, | 20076, 20110, | | 20382, 20416, |
| | 19396, | 19532, 19566, | 19838, 19872, | 20144, 20178, | | 20450, 20484, |
| | 19430 | 19600, 19634, | 19906, 19940, | 20212, 20246, | | 20518, 20552, |
| | | 19668, 19702, | 19974, 20008, | 20280, 20314, | | 20586, 20620, |
| | | 19736 | 20042 | 20348 | | 20654 |
| 19329 | 19363, | 19465, 19499, | 19771, 19805, | 20077, 20111, | | 20383, 20417, |
| | 19397, | 19533, 19567, | 19839, 19873, | 20145, 20179, | | 20451, 20485, |
| | 19431 | 19601, 19635, | 19907, 19941, | 20213, 20247, | | 20519, 20553, |
| | | 19669, 19703, | 19975, 20009, | 20281, 20315, | | 20587, 20621, |
| | | 19737 | 20043 | 20349 | | 20655 |
| 19330 | 19364, | 19466, 19500, | 19772, 19806, | 20078, 20112, | | 20384, 20418, |
| | 19398, | 19534, 19568, | 19840, 19874, | 20146, 20180, | | 20452, 20486, |
| | 19432 | 19602, 19636, | 19908, 19942, | 20214, 20248, | | 20520, 20554, |
| | | 19670, 19704, | 19976, 20010, | 20282, 20316, | | 20588, 20622, |
| | | 19738 | 20044 | 20350 | | 20656 |
| 19331 | 19365, | 19467, 19501, | 19773, 19807, | 20079, 20113, | | 20385, 20419, |
| | 19399, | 19535, 19569, | 19841, 19875, | 20147, 20181, | | 20453, 20487, |
| | 19433 | 19603, 19637, | 19909, 19943, | 20215, 20249, | | 20521, 20555, |
| | | 19671, 19705, | 19977, 20011, | 20283, 20317, | | 20589, 20623, |
| | | 19739 | 20045 | 20351 | | 20657 |
| 19332 | 19366, | 19468, 19502, | 19774, 19808, | 20080, 20114, | | 20386, 20420, |
| | 19400, | 19536, 19570, | 19842, 19876, | 20148, 20182, | | 20454, 20488, |
| | 19434 | 19604, 19638, | 19910, 19944, | 20216, 20250, | | 20522, 20556, |
| | | 19672, 19706, | 19978, 20012, | 20284, 20318, | | 20590, 20624, |
| | | 19740 | 20046 | 20352 | | 20658 |
| 19333 | 19367, | 19469, 19503, | 19775, 19809, | 20081, 20115, | | 20387, 20421, |
| | 19401, | 19537, 19571, | 19843, 19877, | 20149, 20183, | | 20455, 20489, |
| | 19435 | 19605, 19639, | 19911, 19945, | 20217, 20251, | | 20523, 20557, |
| | | 19673, 19707, | 19979, 20013, | 20285, 20319, | | 20591, 20625, |
| | | 19741 | 20047 | 20353 | | 20659 |
| 19334 | 19368, | 19470, 19504, | 19776, 19810, | 20082, 20116, | | 20388, 20422, |
| | 19402, | 19538, 19572, | 19844, 19878, | 20150, 20184, | | 20456, 20490, |
| | 19436 | 19606, 19640, | 19912, 19946, | 20218, 20252, | | 20524, 20558, |
| | | 19674, 19708, | 19980, 20014, | 20286, 20320, | | 20592, 20626, |
| | | 19742 | 20048 | 20354 | | 20660 |
| 19335 | 19369, | 19471, 19505, | 19777, 19811, | 20083, 20117, | | 20389, 20423, |
| | 19403, | 19539, 19573, | 19845, 19879, | 20151, 20185, | | 20457, 20491, |
| | 19437 | 19607, 19641, | 19913, 19947, | 20219, 20253, | | 20525, 20559, |
| | | 19675, 19709, | 19981, 20015, | 20287, 20321, | | 20593, 20627, |
| | | 19743 | 20049 | 20355 | | 20661 |
| 19336 | 19370, | 19472, 19506, | 19778, 19812, | 20084, 20118, | | 20390, 20424, |
| | 19404, | 19540, 19574, | 19846, 19880, | 20152, 20186, | | 20458, 20492, |
| | 19438 | 19608, 19642, | 19914, 19948, | 20220, 20254, | | 20526, 20560, |
| | | 19676, 19710, | 19982, 20016, | 20288, 20322, | | 20594, 20628, |
| | | 19744 | 20050 | 20356 | | 20662 |
| 19337 | 19371, | 19473, 19507, | 19779, 19813, | 20085, 20119, | | 20391, 20425, |
| | 19405, | 19541, 19575, | 19847, 19881, | 20153, 20187, | | 20459, 20493, |
| | 19439 | 19609, 19643, | 19915, 19949, | 20221, 20255, | | 20527, 20561, |
| | | 19677, 19711, | 19983, 20017, | 20289, 20323, | | 20595, 20629, |
| | | 19745 | 20051 | 20357 | | 20663 |
| 19338 | 19372, | 19474, 19508, | 19780, 19814, | 20086, 20120, | | 20392, 20426, |
| | 19406, | 19542, 19576, | 19848, 19882, | 20154, 20188, | | 20460, 20494, |
| | 19440 | 19610, 19644, | 19916, 19950, | 20222, 20256, | | 20528, 20562, |
| | | 19678, 19712, | 19984, 20018, | 20290, 20324, | | 20596, 20630, |
| | | 19746 | 20052 | 20358 | | 20664 |
| 19339 | 19373, | 19475, 19509, | 19781, 19815, | 20087, 20121, | | 20393, 20427, |
| | 19407, | 19543, 19577, | 19849, 19883, | 20155, 20189, | | 20461, 20495, |
| | 19441 | 19611, 19645, | 19917, 19951, | 20223, 20257, | | 20529, 20563, |
| | | 19679, 19713, | 19985, 20019, | 20291, 20325, | | 20597, 20631, |
| | | 19747 | 20053 | 20359 | | 20665 |
| 19340 | 19374, | 19476, 19510, | 19782, 19816, | 20088, 20122, | | 20394, 20428, |
| | 19408, | 19544, 19578, | 19850, 19884, | 20156, 20190, | | 20462, 20496, |
| | 19442 | 19612, 19646, | 19918, 19952, | 20224, 20258, | | 20530, 20564, |
| | | 19680, 19714, | 19986, 20020, | 20292, 20326, | | 20598, 20632, |
| | | 19748 | 20054 | 20360 | | 20666 |
| 19341 | 19375, | 19477, 19511, | 19783, 19817, | 20089, 20123, | | 20395, 20429, |
| | 19409, | 19545, 19579, | 19851, 19885, | 20157, 20191, | | 20463, 20497, |
| | 19443 | 19613, 19647, | 19919, 19953, | 20225, 20259, | | 20531, 20565, |
| | | 19681, 19715, | 19987, 20021, | 20293, 20327, | | 20599, 20633, |
| | | 19749 | 20055 | 20361 | | 20667 |
| 19342 | 19376, | 19478, 19512, | 19784, 19818, | 20090, 20124, | | 20396, 20430, |
| | 19410, | 19546, 19580, | 19852, 19886, | 20158, 20192, | | 20464, 20498, |
| | 19444 | 19614, 19648, | 19920, 19954, | 20226, 20260, | | 20532, 20566, |
| | | 19682, 19716, | 19988, 20022, | 20294, 20328, | | 20600, 20634, |
| | | 19750 | 20056 | 20362 | | 20668 |
| 19343 | 19377, | 19479, 19513, | 19785, 19819, | 20091, 20125, | | 20397, 20431, |
| | 19411, | 19547, 19581, | 19853, 19887, | 20159, 20193, | | 20465, 20499, |
| | 19445 | 19615, 19649, | 19921, 19955, | 20227, 20261, | | 20533, 20567, |
| | | 19683, 19717, | 19989, 20023, | 20295, 20329, | | 20601, 20635, |
| | | 19751 | 20057 | 20363 | | 20669 |
| 19344 | 19378, | 19480, 19514, | 19786, 19820, | 20092, 20126, | | 20398, 20432, |
| | 19412, | 19548, 19582, | 19854, 19888, | 20160, 20194, | | 20466, 20500, |
| | 19446 | 19616, 19650, | 19922, 19956, | 20228, 20262, | | 20534, 20568, |
| | | 19684, 19718, | 19990, 20024, | 20296, 20330, | | 20602, 20636, |
| | | 19752 | 20058 | 20364 | | 20670 |
| 19345 | 19379, | 19481, 19515, | 19787, 19821, | 20093, 20127, | | 20399, 20433, |
| | 19413, | 19549, 19583, | 19855, 19889, | 20161, 20195, | | 20467, 20501, |
| | 19447 | 19617, 19651, | 19923, 19957, | 20229, 20263, | | 20535, 20569, |
| | | 19685, 19719, | 19991, 20025, | 20297, 20331, | | 20603, 20637, |
| | | 19753 | 20059 | 20365 | | 20671 |
| 19346 | 19380, | 19482, 19516, | 19788, 19822, | 20094, 20128, | | 20400, 20434, |
| | 19414, | 19550, 19584, | 19856, 19890, | 20162, 20196, | | 20468, 20502, |
| | 19448 | 19618, 19652, | 19924, 19958, | 20230, 20264, | | 20536, 20570, |
| | | 19686, 19720, | 19992, 20026, | 20298, 20332, | | 20604, 20638, |
| | | 19754 | 20060 | 20366 | | 20672 |
| 19347 | 19381, | 19483, 19517, | 19789, 19823, | 20095, 20129, | | 20401, 20435, |
| | 19415, | 19551, 19585, | 19857, 19891, | 20163, 20197, | | 20469, 20503, |
| | 19449 | 19619, 19653, | 19925, 19959, | 20231, 20265, | | 20537, 20571, |
| | | 19687, 19721, | 19993, 20027, | 20299, 20333, | | 20605, 20639, |
| | | 19755 | 20061 | 20367 | | 20673 |
| 19348 | 19382, | 19484, 19518, | 19790, 19824, | 20096, 20130, | | 20402, 20436, |
| | 19416, | 19552, 19586, | 19858, 19892, | 20164, 20198, | | 20470, 20504, |
| | 19450 | 19620, 19654, | 19926, 19960, | 20232, 20266, | | 20538, 20572, |
| | | 19688, 19722, | 19994, 20028, | 20300, 20334, | | 20606, 20640, |
| | | 19756 | 20062 | 20368 | | 20674 |
| 19349 | 19383, | 19485, 19519, | 19791, 19825, | 20097, 20131, | | 20403, 20437, |
| | 19417, | 19553, 19587, | 19859, 19893, | 20165, 20199, | | 20471, 20505, |
| | 19451 | 19621, 19655, | 19927, 19961, | 20233, 20267, | | 20539, 20573, |
| | | 19689, 19723, | 19995, 20029, | 20301, 20335, | | 20607, 20641, |
| | | 19757 | 20063 | 20369 | | 20675 |
| 19350 | 19384, | 19486, 19520, | 19792, 19826, | 20098, 20132, | | 20404, 20438, |
| | 19418, | 19554, 19588, | 19860, 19894, | 20166, 20200, | | 20472, 20506, |
| | 19452 | 19622, 19656, | 19928, 19962, | 20234, 20268, | | 20540, 20574, |
| | | 19690, 19724, | 19996, 20030, | 20302, 20336, | | 20608, 20642, |
| | | 19758 | 20064 | 20370 | | 20676 |
| 19351 | 19385, | 19487, 19521, | 19793, 19827, | 20099, 20133, | | 20405, 20439, |
| | 19419, | 19555, 19589, | 19861, 19895, | 20167, 20201, | | 20473, 20507, |
| | 19453 | 19623, 19657, | 19929, 19963, | 20235, 20269, | | 20541, 20575, |
| | | 19691, 19725, | 19997, 20031, | 20303, 20337, | | 20609, 20643, |
| | | 19759 | 20065 | 20371 | | 20677 |
| 19352 | 19386, | 19488, 19522, | 19794, 19828, | 20100, 20134, | | 20406, 20440, |
| | 19420, | 19556, 19590, | 19862, 19896, | 20168, 20202, | | 20474, 20508, |
| | 19454 | 19624, 19658, | 19930, 19964, | 20236, 20270, | | 20542, 20576, |
| | | 19692, 19726, | 19998, 20032, | 20304, 20338, | | 20610, 20644, |
| | | 19760 | 20066 | 20372 | | 20678 |
| 19353 | 19387, | 19489, 19523, | 19795, 19829, | 20101, 20135, | | 20407, 20441, |
| | 19421, | 19557, 19591, | 19863, 19897, | 20169, 20203, | | 20475, 20509, |
| | 19455 | 19625, 19659, | 19931, 19965, | 20237, 20271, | | 20543, 20577, |
| | | 19693, 19727, | 19999, 20033, | 20305, 20339, | | 20611, 20645, |
| | | 19761 | 20067 | 20373 | | 20679 |
| 19354 | 19388, | 19490, 19524, | 19796, 19830, | 20102, 20136, | | 20408, 20442, |
| | 19422, | 19558, 19592, | 19864, 19898, | 20170, 20204, | | 20476, 20510, |
| | 19456 | 19626, 19660, | 19932, 19966, | 20238, 20272, | | 20544, 20578, |
| | | 19694, 19728, | 20000, 20034, | 20306, 20340, | | 20612, 20646, |
| | | 19762 | 20068 | 20374 | | 20680 |
| 19355 | 19389, | 19491, 19525, | 19797, 19831, | 20103, 20137, | | 20409, 20443, |
| | 19423, | 19559, 19593, | 19865, 19899, | 20171, 20205, | | 20477, 20511, |
| | 19457 | 19627, 19661, | 19933, 19967, | 20239, 20273, | | 20545, 20579, |
| | | 19695, 19729, | 20001, 20035, | 20307, 20341, | | 20613, 20647, |
| | | 19763 | 20069 | 20375 | | 20681 |
| 19356 | 19390, | 19492, 19526, | 19798, 19832, | 20104, 20138, | | 20410, 20444, |
| | 19424, | 19560, 19594, | 19866, 19900, | 20172, 20206, | | 20478, 20512, |
| | 19458 | 19628, 19662, | 19934, 19968, | 20240, 20274, | | 20546, 20580, |
| | | 19696, 19730, | 20002, 20036, | 20308, 20342, | | 20614, 20648, |
| | | 19764 | 20070 | 20376 | | 20682 |
| 19357 | 19391, | 19493, 19527, | 19799, 19833, | 20105, 20139, | | 20411, 20445, |
| | 19425, | 19561, 19595, | 19867, 19901, | 20173, 20207, | | 20479, 20513, |
| | 19459 | 19629, 19663, | 19935, 19969, | 20241, 20275, | | 20547, 20581, |
| | | 19697, 19731, | 20003, 20037, | 20309, 20343, | | 20615, 20649, |
| | | 19765 | 20071 | 20377 | | 20683 |
| 19358 | 19392, | 19494, 19528, | 19800, 19834, | 20106, 20140, | | 20412, 20446, |
| | 19426, | 19562, 19596, | 19868, 19902, | 20174, 20208, | | 20480, 20514, |
| | 19460 | 19630, 19664, | 19936, 19970, | 20242, 20276, | | 20548, 20582, |
| | | 19698, 19732, | 20004, 20038, | 20310, 20344, | | 20616, 20650, |
| | | 19766 | 20072 | 20378 | | 20684 |
| 19359 | 19393, | 19495, 19529, | 19801, 19835, | 20107, 20141, | | 20413, 20447, |
| | 19427, | 19563, 19597, | 19869, 19903, | 20175, 20209, | | 20481, 20515, |
| | 19461 | 19631, 19665, | 19937, 19971, | 20243, 20277, | | 20549, 20583, |
| | | 19699, 19733, | 20005, 20039, | 20311, 20345, | | 20617, 20651, |
| | | 19767 | 20073 | 20379 | | 20685 |
| 19360 | 19394, | 19496, 19530, | 19802, 19836, | 20108, 20142, | | 20414, 20448, |
| | 19428, | 19564, 19598, | 19870, 19904, | 20176, 20210, | | 20482, 20516, |
| | 19462 | 19632, 19666, | 19938, 19972, | 20244, 20278, | | 20550, 20584, |
| | | 19700, 19734, | 20006, 20040, | 20312, 20346, | | 20618, 20652, |
| | | 19768 | 20074 | 20380 | | 20686 |
| 19361 | 19395, | 19497, 19531, | 19803, 19837, | 20109, 20143, | | 20415, 20449, |
| | 19429, | 19565, 19599, | 19871, 19905, | 20177, 20211, | | 20483, 20517, |
| | 19463 | 19633, 19667, | 19939, 19973, | 20245, 20279, | | 20551, 20585, |
| | | 19701, 19735, | 20007, 20041, | 20313, 20347, | | 20619, 20653, |
| | | 19769 | 20075 | 20381 | | 20687 |

TABLE 4.3
Preferred LASV Nucleoprotein (SP-IgE NP) constructs

| | | RNA designs and SEQ ID NOs | | | | |
|---|---|---|---|---|---|---|
| PRT | CDS | a-1 | a-2 | b-4 | i-2 | i-3 |
| 20689 | 20723, | 20825, 20859, | 21131, 21165, | 21437, 21471, | | 21743, 21777, |
| | 20757, | 20893, 20927, | 21199, 21233, | 21505, 21539, | | 21811, 21845, |
| | 20791 | 20961, 20995, | 21267, 21301, | 21573, 21607, | | 21879, 21913, |
| | | 21029, 21063, | 21335, 21369, | 21641, 21675, | | 21947, 21981, |
| | | 21097 | 21403 | 21709 | | 22015 |
| 20690 | 20724, | 20826, 20860, | 21132, 21166, | 21438, 21472, | | 21744, 21778, |
| | 20758, | 20894, 20928, | 21200, 21234, | 21506, 21540, | | 21812, 21846, |
| | 20792 | 20962, 20996, | 21268, 21302, | 21574, 21608, | | 21880, 21914, |
| | | 21030, 21064, | 21336, 21370, | 21642, 21676, | | 21948, 21982, |
| | | 21098 | 21404 | 21710 | | 22016 |
| 20691 | 20725, | 20827, 20861, | 21133, 21167, | 21439, 21473, | | 21745, 21779, |
| | 20759, | 20895, 20929, | 21201, 21235, | 21507, 21541, | | 21813, 21847, |
| | 20793 | 20963, 20997, | 21269, 21303, | 21575, 21609, | | 21881, 21915, |
| | | 21031, 21065, | 21337, 21371, | 21643, 21677, | | 21949, 21983, |
| | | 21099 | 21405 | 21711 | | 22017 |
| 20692 | 20726, | 20828, 20862, | 21134, 21168, | 21440, 21474, | | 21746, 21780, |
| | 20760, | 20896, 20930, | 21202, 21236, | 21508, 21542, | | 21814, 21848, |
| | 20794 | 20964, 20998, | 21270, 21304, | 21576, 21610, | | 21882, 21916, |
| | | 21032, 21066, | 21338, 21372, | 21644, 21678, | | 21950, 21984, |
| | | 21100 | 21406 | 21712 | | 22018 |
| 20693 | 20727, | 20829, 20863, | 21135, 21169, | 21441, 21475, | | 21747, 21781, |
| | 20761, | 20897, 20931, | 21203, 21237, | 21509, 21543, | | 21815, 21849, |
| | 20795 | 20965, 20999, | 21271, 21305, | 21577, 21611, | | 21883, 21917, |
| | | 21033, 21067, | 21339, 21373, | 21645, 21679, | | 21951, 21985, |
| | | 21101 | 21407 | 21713 | | 22019 |
| 20694 | 20728, | 20830, 20864, | 21136, 21170, | 21442, 21476, | | 21748, 21782, |
| | 20762, | 20898, 20932, | 21204, 21238, | 21510, 21544, | | 21816, 21850, |
| | 20796 | 20966, 21000, | 21272, 21306, | 21578, 21612, | | 21884, 21918, |
| | | 21034, 21068, | 21340, 21374, | 21646, 21680, | | 21952, 21986, |
| | | 21102 | 21408 | 21714 | | 22020 |
| 20695 | 20729, | 20831, 20865, | 21137, 21171, | 21443, 21477, | | 21749, 21783, |
| | 20763, | 20899, 20933, | 21205, 21239, | 21511, 21545, | | 21817, 21851, |
| | 20797 | 20967, 21001, | 21273, 21307, | 21579, 21613, | | 21885, 21919, |
| | | 21035, 21069, | 21341, 21375, | 21647, 21681, | | 21953, 21987, |
| | | 21103 | 21409 | 21715 | | 22021 |
| 20696 | 20730, | 20832, 20866, | 21138, 21172, | 21444, 21478, | | 21750, 21784, |
| | 20764, | 20900, 20934, | 21206, 21240, | 21512, 21546, | | 21818, 21852, |
| | 20798 | 20968, 21002, | 21274, 21308, | 21580, 21614, | | 21886, 21920, |
| | | 21036, 21070, | 21342, 21376, | 21648, 21682, | | 21954, 21988, |
| | | 21104 | 21410 | 21716 | | 22022 |
| 20697 | 20731, | 20833, 20867, | 21139, 21173, | 21445, 21479, | | 21751, 21785, |
| | 20765, | 20901, 20935, | 21207, 21241, | 21513, 21547, | | 21819, 21853, |
| | 20799 | 20969, 21003, | 21275, 21309, | 21581, 21615, | | 21887, 21921, |
| | | 21037, 21071, | 21343, 21377, | 21649, 21683, | | 21955, 21989, |
| | | 21105 | 21411 | 21717 | | 22023 |
| 20698 | 20732, | 20834, 20868, | 21140, 21174, | 21446, 21480, | | 21752, 21786, |
| | 20766, | 20902, 20936, | 21208, 21242, | 21514, 21548, | | 21820, 21854, |
| | 20800 | 20970, 21004, | 21276, 21310, | 21582, 21616, | | 21888, 21922, |
| | | 21038, 21072, | 21344, 21378, | 21650, 21684, | | 21956, 21990, |
| | | 21106 | 21412 | 21718 | | 22024 |
| 20699 | 20733, | 20835, 20869, | 21141, 21175, | 21447, 21481, | | 21753, 21787, |
| | 20767, | 20903, 20937, | 21209, 21243, | 21515, 21549, | | 21821, 21855, |
| | 20801 | 20971, 21005, | 21277, 21311, | 21583, 21617, | | 21889, 21923, |
| | | 21039, 21073, | 21345, 21379, | 21651, 21685, | | 21957, 21991, |
| | | 21107 | 21413 | 21719 | | 22025 |
| 20700 | 20734, | 20836, 20870, | 21142, 21176, | 21448, 21482, | | 21754, 21788, |
| | 20768, | 20904, 20938, | 21210, 21244, | 21516, 21550, | | 21822, 21856, |
| | 20802 | 20972, 21006, | 21278, 21312, | 21584, 21618, | | 21890, 21924, |
| | | 21040, 21074, | 21346, 21380, | 21652, 21686, | | 21958, 21992, |
| | | 21108 | 21414 | 21720 | | 22026 |
| 20701 | 20735, | 20837, 20871, | 21143, 21177, | 21449, 21483, | | 21755, 21789, |
| | 20769, | 20905, 20939, | 21211, 21245, | 21517, 21551, | | 21823, 21857, |
| | 20803 | 20973, 21007, | 21279, 21313, | 21585, 21619, | | 21891, 21925, |
| | | 21041, 21075, | 21347, 21381, | 21653, 21687, | | 21959, 21993, |
| | | 21109 | 21415 | 21721 | | 22027 |
| 20702 | 20736, | 20838, 20872, | 21144, 21178, | 21450, 21484, | | 21756, 21790, |
| | 20770, | 20906, 20940, | 21212, 21246, | 21518, 21552, | | 21824, 21858, |
| | 20804 | 20974, 21008, | 21280, 21314, | 21586, 21620, | | 21892, 21926, |
| | | 21042, 21076, | 21348, 21382, | 21654, 21688, | | 21960, 21994, |
| | | 21110 | 21416 | 21722 | | 22028 |
| 20703 | 20737, | 20839, 20873, | 21145, 21179, | 21451, 21485, | | 21757, 21791, |
| | 20771, | 20907, 20941, | 21213, 21247, | 21519, 21553, | | 21825, 21859, |
| | 20805 | 20975, 21009, | 21281, 21315, | 21587, 21621, | | 21893, 21927, |
| | | 21043, 21077, | 21349, 21383, | 21655, 21689, | | 21961, 21995, |
| | | 21111 | 21417 | 21723 | | 22029 |
| 20704 | 20738, | 20840, 20874, | 21146, 21180, | 21452, 21486, | | 21758, 21792, |
| | 20772, | 20908, 20942, | 21214, 21248, | 21520, 21554, | | 21826, 21860, |
| | 20806 | 20976, 21010, | 21282, 21316, | 21588, 21622, | | 21894, 21928, |
| | | 21044, 21078, | 21350, 21384, | 21656, 21690, | | 21962, 21996, |
| | | 21112 | 21418 | 21724 | | 22030 |
| 20705 | 20739, | 20841, 20875, | 21147, 21181, | 21453, 21487, | | 21759, 21793, |
| | 20773, | 20909, 20943, | 21215, 21249, | 21521, 21555, | | 21827, 21861, |
| | 20807 | 20977, 21011, | 21283, 21317, | 21589, 21623, | | 21895, 21929, |
| | | 21045, 21079, | 21351, 21385, | 21657, 21691, | | 21963, 21997, |
| | | 21113 | 21419 | 21725 | | 22031 |
| 20706 | 20740, | 20842, 20876, | 21148, 21182, | 21454, 21488, | | 21760, 21794, |
| | 20774, | 20910, 20944, | 21216, 21250, | 21522, 21556, | | 21828, 21862, |
| | 20808 | 20978, 21012, | 21284, 21318, | 21590, 21624, | | 21896, 21930, |
| | | 21046, 21080, | 21352, 21386, | 21658, 21692, | | 21964, 21998, |
| | | 21114 | 21420 | 21726 | | 22032 |
| 20707 | 20741, | 20843, 20877, | 21149, 21183, | 21455, 21489, | | 21761, 21795, |
| | 20775, | 20911, 20945, | 21217, 21251, | 21523, 21557, | | 21829, 21863, |
| | 20809 | 20979, 21013, | 21285, 21319, | 21591, 21625, | | 21897, 21931, |
| | | 21047, 21081, | 21353, 21387, | 21659, 21693, | | 21965, 21999, |
| | | 21115 | 21421 | 21727 | | 22033 |
| 20708 | 20742, | 20844, 20878, | 21150, 21184, | 21456, 21490, | | 21762, 21796, |
| | 20776, | 20912, 20946, | 21218, 21252, | 21524, 21558, | | 21830, 21864, |
| | 20810 | 20980, 21014, | 21286, 21320, | 21592, 21626, | | 21898, 21932, |
| | | 21048, 21082, | 21354, 21388, | 21660, 21694, | | 21966, 22000, |
| | | 21116 | 21422 | 21728 | | 22034 |
| 20709 | 20743, | 20845, 20879, | 21151, 21185, | 21457, 21491, | | 21763, 21797, |
| | 20777, | 20913, 20947, | 21219, 21253, | 21525, 21559, | | 21831, 21865, |
| | 20811 | 20981, 21015, | 21287, 21321, | 21593, 21627, | | 21899, 21933, |
| | | 21049, 21083, | 21355, 21389, | 21661, 21695, | | 21967, 22001, |
| | | 21117 | 21423 | 21729 | | 22035 |
| 20710 | 20744, | 20846, 20880, | 21152, 21186, | 21458, 21492, | | 21764, 21798, |
| | 20778, | 20914, 20948, | 21220, 21254, | 21526, 21560, | | 21832, 21866, |
| | 20812 | 20982, 21016, | 21288, 21322, | 21594, 21628, | | 21900, 21934, |
| | | 21050, 21084, | 21356, 21390, | 21662, 21696, | | 21968, 22002, |
| | | 21118 | 21424 | 21730 | | 22036 |
| 20711 | 20745, | 20847, 20881, | 21153, 21187, | 21459, 21493, | | 21765, 21799, |
| | 20779, | 20915, 20949, | 21221, 21255, | 21527, 21561, | | 21833, 21867, |
| | 20813 | 20983, 21017, | 21289, 21323, | 21595, 21629, | | 21901, 21935, |
| | | 21051, 21085, | 21357, 21391, | 21663, 21697, | | 21969, 22003, |
| | | 21119 | 21425 | 21731 | | 22037 |
| 20712 | 20746, | 20848, 20882, | 21154, 21188, | 21460, 21494, | | 21766, 21800, |
| | 20780, | 20916, 20950, | 21222, 21256, | 21528, 21562, | | 21834, 21868, |
| | 20814 | 20984, 21018, | 21290, 21324, | 21596, 21630, | | 21902, 21936, |
| | | 21052, 21086, | 21358, 21392, | 21664, 21698, | | 21970, 22004, |
| | | 21120 | 21426 | 21732 | | 22038 |
| 20713 | 20747, | 20849, 20883, | 21155, 21189, | 21461, 21495, | | 21767, 21801, |
| | 20781, | 20917, 20951, | 21223, 21257, | 21529, 21563, | | 21835, 21869, |
| | 20815 | 20985, 21019, | 21291, 21325, | 21597, 21631, | | 21903, 21937, |
| | | 21053, 21087, | 21359, 21393, | 21665, 21699, | | 21971, 22005, |
| | | 21121 | 21427 | 21733 | | 22039 |
| 20714 | 20748, | 20850, 20884, | 21156, 21190, | 21462, 21496, | | 21768, 21802, |
| | 20782, | 20918, 20952, | 21224, 21258, | 21530, 21564, | | 21836, 21870, |
| | 20816 | 20986, 21020, | 21292, 21326, | 21598, 21632, | | 21904, 21938, |
| | | 21054, 21088, | 21360, 21394, | 21666, 21700, | | 21972, 22006, |
| | | 21122 | 21428 | 21734 | | 22040 |
| 20715 | 20749, | 20851, 20885, | 21157, 21191, | 21463, 21497, | | 21769, 21803, |
| | 20783, | 20919, 20953, | 21225, 21259, | 21531, 21565, | | 21837, 21871, |
| | 20817 | 20987, 21021, | 21293, 21327, | 21599, 21633, | | 21905, 21939, |
| | | 21055, 21089, | 21361, 21395, | 21667, 21701, | | 21973, 22007, |
| | | 21123 | 21429 | 21735 | | 22041 |
| 20716 | 20750, | 20852, 20886, | 21158, 21192, | 21464, 21498, | | 21770, 21804, |
| | 20784, | 20920, 20954, | 21226, 21260, | 21532, 21566, | | 21838, 21872, |
| | 20818 | 20988, 21022, | 21294, 21328, | 21600, 21634, | | 21906, 21940, |
| | | 21056, 21090, | 21362, 21396, | 21668, 21702, | | 21974, 22008, |
| | | 21124 | 21430 | 21736 | | 22042 |
| 20717 | 20751, | 20853, 20887, | 21159, 21193, | 21465, 21499, | | 21771, 21805, |
| | 20785, | 20921, 20955, | 21227, 21261, | 21533, 21567, | | 21839, 21873, |
| | 20819 | 20989, 21023, | 21295, 21329, | 21601, 21635, | | 21907, 21941, |
| | | 21057, 21091, | 21363, 21397, | 21669, 21703, | | 21975, 22009, |
| | | 21125 | 21431 | 21737 | | 22043 |
| 20718 | 20752, | 20854, 20888, | 21160, 21194, | 21466, 21500, | | 21772, 21806, |
| | 20786, | 20922, 20956, | 21228, 21262, | 21534, 21568, | | 21840, 21874, |
| | 20820 | 20990, 21024, | 21296, 21330, | 21602, 21636, | | 21908, 21942, |
| | | 21058, 21092, | 21364, 21398, | 21670, 21704, | | 21976, 22010, |
| | | 21126 | 21432 | 21738 | | 22044 |
| 20719 | 20753, | 20855, 20889, | 21161, 21195, | 21467, 21501, | | 21773, 21807, |
| | 20787, | 20923, 20957, | 21229, 21263, | 21535, 21569, | | 21841, 21875, |
| | 20821 | 20991, 21025, | 21297, 21331, | 21603, 21637, | | 21909, 21943, |
| | | 21059, 21093, | 21365, 21399, | 21671, 21705, | | 21977, 22011, |
| | | 21127 | 21433 | 21739 | | 22045 |
| 20720 | 20754, | 20856, 20890, | 21162, 21196, | 21468, 21502, | | 21774, 21808, |
| | 20788, | 20924, 20958, | 21230, 21264, | 21536, 21570, | | 21842, 21876, |
| | 20822 | 20992, 21026, | 21298, 21332, | 21604, 21638, | | 21910, 21944, |
| | | 21060, 21094, | 21366, 21400, | 21672, 21706, | | 21978, 22012, |
| | | 21128 | 21434 | 21740 | | 22046 |
| 20721 | 20755, | 20857, 20891, | 21163, 21197, | 21469, 21503, | | 21775, 21809, |
| | 20789, | 20925, 20959, | 21231, 21265, | 21537, 21571, | | 21843, 21877, |
| | 20823 | 20993, 21027, | 21299, 21333, | 21605, 21639, | | 21911, 21945, |
| | | 21061, 21095, | 21367, 21401, | 21673, 21707, | | 21979, 22013, |
| | | 21129 | 21435 | 21741 | | 22047 |
| 20722 | 20756, | 20858, 20892, | 21164, 21198, | 21470, 21504, | | 21776, 21810, |
| | 20790, | 20926, 20960, | 21232, 21266, | 21538, 21572, | | 21844, 21878, |
| | 20824 | 20994, 21028, | 21300, 21334, | 21606, 21640, | | 21912, 21946, |
| | | 21062, 21096, | 21368, 21402, | 21674, 21708, | | 21980, 22014, |
| | | 21130 | 21436 | 21742 | | 22048 |

TABLE 5
Preferred LASV zinc-binding matrix protein (Z) constructs

| | | RNA designs and SEQ ID NOs | | | | |
|---|---|---|---|---|---|---|
| PRT | CDS | a-1 | a-2 | b-4 | i-2 | i-3 |
| 11166 | 11348, | 12804, 12829, | 13004, 13029, | 13204, 13229, | 13404, | 13604, 13629, |
| | 11530, | 12854, 12879, | 13054, 13079, | 13254, 13279, | 13429, | 13654, 13679, |
| | 11712, | 12904, 12929, | 13104, 13129, | 13304, 13329, | 13454, | 13704, 13729, |
| | 11894, | 12954, 12979, | 13154, 13179, | 13354, 13379, | 13479, | 13754, 13779, |
| | 12076, | 22049, 22074, | 22274, 22299, | 22499, 22524, | 13504, | 22724, 22749, |
| | 12258, | 22099, 22124, | 22324, 22349, | 22549, 22574, | 13529, | 22774, 22799, |
| | 12440, | 22149, 22174, | 22374, 22399, | 22599, 22624, | 13554, | 22824, 22849, |
| | 12622 | 22199, 22224, | 22424, 22449, | 22649, 22674, | 13579 | 22874, 22899, |
| | | 22249 | 22474 | 22699 | | 22924 |
| 11167 | 11349, | 12805, 12830, | 13005, 13030, | 13205, 13230, | 13405, | 13605, 13630, |
| | 11531, | 12855, 12880, | 13055, 13080, | 13255, 13280, | 13430, | 13655, 13680, |
| | 11713, | 12905, 12930, | 13105, 13130, | 13305, 13330, | 13455, | 13705, 13730, |
| | 11895, | 12955, 12980, | 13155, 13180, | 13355, 13380, | 13480, | 13755, 13780, |
| | 12077, | 22050, 22075, | 22275, 22300, | 22500, 22525, | 13505, | 22725, 22750, |
| | 12259, | 22100, 22125, | 22325, 22350, | 22550, 22575, | 13530, | 22775, 22800, |
| | 12441, | 22150, 22175, | 22375, 22400, | 22600, 22625, | 13555, | 22825, 22850, |
| | 12623 | 22200, 22225, | 22425, 22450, | 22650, 22675, | 13580 | 22875, 22900, |
| | | 22250 | 22475 | 22700 | | 22925 |
| 11168 | 11350, | 12806, 12831, | 13006, 13031, | 13206, 13231, | 13406, | 13606, 13631, |
| | 11532, | 12856, 12881, | 13056, 13081, | 13256, 13281, | 13431, | 13656, 13681, |
| | 11714, | 12906, 12931, | 13106, 13131, | 13306, 13331, | 13456, | 13706, 13731, |
| | 11896, | 12956, 12981, | 13156, 13181, | 13356, 13381, | 13481, | 13756, 13781, |
| | 12078, | 22051, 22076, | 22276, 22301, | 22501, 22526, | 13506, | 22726, 22751, |
| | 12260, | 22101, 22126, | 22326, 22351, | 22551, 22576, | 13531, | 22776, 22801, |
| | 12442, | 22151, 22176, | 22376, 22401, | 22601, 22626, | 13556, | 22826, 22851, |
| | 12624 | 22201, 22226, | 22426, 22451, | 22651, 22676, | 13581 | 22876, 22901, |
| | | 22251 | 22476 | 22701 | | 22926 |
| 11169 | 11351, | 12807, 12832, | 13007, 13032, | 13207, 13232, | 13407, | 13607, 13632, |
| | 11533, | 12857, 12882, | 13057, 13082, | 13257, 13282, | 13432, | 13657, 13682, |
| | 11715, | 12907, 12932, | 13107, 13132, | 13307, 13332, | 13457, | 13707, 13732, |
| | 11897, | 12957, 12982, | 13157, 13182, | 13357, 13382, | 13482, | 13757, 13782, |
| | 12079, | 22052, 22077, | 22277, 22302, | 22502, 22527, | 13507, | 22727, 22752, |
| | 12261, | 22102, 22127, | 22327, 22352, | 22552, 22577, | 13532, | 22777, 22802, |
| | 12443, | 22152, 22177, | 22377, 22402, | 22602, 22627, | 13557, | 22827, 22852, |
| | 12625 | 22202, 22227, | 22427, 22452, | 22652, 22677, | 13582 | 22877, 22902, |
| | | 22252 | 22477 | 22702 | | 22927 |
| 11170 | 11352, | 12808, 12833, | 13008, 13033, | 13208, 13233, | 13408, | 13608, 13633, |
| | 11534, | 12858, 12883, | 13058, 13083, | 13258, 13283, | 13433, | 13658, 13683, |
| | 11716, | 12908, 12933, | 13108, 13133, | 13308, 13333, | 13458, | 13708, 13733, |
| | 11898, | 12958, 12983, | 13158, 13183, | 13358, 13383, | 13483, | 13758, 13783, |
| | 12080, | 22053, 22078, | 22278, 22303, | 22503, 22528, | 13508, | 22728, 22753, |
| | 12262, | 22103, 22128, | 22328, 22353, | 22553, 22578, | 13533, | 22778, 22803, |
| | 12444, | 22153, 22178, | 22378, 22403, | 22603, 22628, | 13558, | 22828, 22853, |
| | 12626 | 22203, 22228, | 22428, 22453, | 22653, 22678, | 13583 | 22878, 22903, |
| | | 22253 | 22478 | 22703 | | 22928 |
| 11171 | 11353, | 12809, 12834, | 13009, 13034, | 13209, 13234, | 13409, | 13609, 13634, |
| | 11535, | 12859, 12884, | 13059, 13084, | 13259, 13284, | 13434, | 13659, 13684, |
| | 11717, | 12909, 12934, | 13109, 13134, | 13309, 13334, | 13459, | 13709, 13734, |
| | 11899, | 12959, 12984, | 13159, 13184, | 13359, 13384, | 13484, | 13759, 13784, |
| | 12081, | 22054, 22079, | 22279, 22304, | 22504, 22529, | 13509, | 22729, 22754, |
| | 12263, | 22104, 22129, | 22329, 22354, | 22554, 22579, | 13534, | 22779, 22804, |
| | 12445, | 22154, 22179, | 22379, 22404, | 22604, 22629, | 13559, | 22829, 22854, |
| | 12627 | 22204, 22229, | 22429, 22454, | 22654, 22679, | 13584 | 22879, 22904, |
| | | 22254 | 22479 | 22704 | | 22929 |
| 11172 | 11354, | 12810, 12835, | 13010, 13035, | 13210, 13235, | 13410, | 13610, 13635, |
| | 11536, | 12860, 12885, | 13060, 13085, | 13260, 13285, | 13435, | 13660, 13685, |
| | 11718, | 12910, 12935, | 13110, 13135, | 13310, 13335, | 13460, | 13710, 13735, |
| | 11900, | 12960, 12985, | 13160, 13185, | 13360, 13385, | 13485, | 13760, 13785, |
| | 12082, | 22055, 22080, | 22280, 22305, | 22505, 22530, | 13510, | 22730, 22755, |
| | 12264, | 22105, 22130, | 22330, 22355, | 22555, 22580, | 13535, | 22780, 22805, |
| | 12446, | 22155, 22180, | 22380, 22405, | 22605, 22630, | 13560, | 22830, 22855, |
| | 12628 | 22205, 22230, | 22430, 22455, | 22655, 22680, | 13585 | 22880, 22905, |
| | | 22255 | 22480 | 22705 | | 22930 |
| 11173 | 11355, | 12811, 12836, | 13011, 13036, | 13211, 13236, | 13411, | 13611, 13636, |
| | 11537, | 12861, 12886, | 13061, 13086, | 13261, 13286, | 13436, | 13661, 13686, |
| | 11719, | 12911, 12936, | 13111, 13136, | 13311, 13336, | 13461, | 13711, 13736, |
| | 11901, | 12961, 12986, | 13161, 13186, | 13361, 13386, | 13486, | 13761, 13786, |
| | 12083, | 22056, 22081, | 22281, 22306, | 22506, 22531, | 13511, | 22731, 22756, |
| | 12265, | 22106, 22131, | 22331, 22356, | 22556, 22581, | 13536, | 22781, 22806, |
| | 12447, | 22156, 22181, | 22381, 22406, | 22606, 22631, | 13561, | 22831, 22856, |
| | 12629 | 22206, 22231, | 22431, 22456, | 22656, 22681, | 13586 | 22881, 22906, |
| | | 22256 | 22481 | 22706 | | 22931 |
| 11190 | 11372, | 12812, 12837, | 13012, 13037, | 13212, 13237, | 13412, | 13612, 13637, |
| | 11554, | 12862, 12887, | 13062, 13087, | 13262, 13287, | 13437, | 13662, 13687, |
| | 11736, | 12912, 12937, | 13112, 13137, | 13312, 13337, | 13462, | 13712, 13737, |
| | 11918, | 12962, 12987, | 13162, 13187, | 13362, 13387, | 13487, | 13762, 13787, |
| | 12100, | 22057, 22082, | 22282, 22307, | 22507, 22532, | 13512, | 22732, 22757, |
| | 12282, | 22107, 22132, | 22332, 22357, | 22557, 22582, | 13537, | 22782, 22807, |
| | 12464, | 22157, 22182, | 22382, 22407, | 22607, 22632, | 13562, | 22832, 22857, |
| | 12646 | 22207, 22232, | 22432, 22457, | 22657, 22682, | 13587 | 22882, 22907, |
| | | 22257 | 22482 | 22707 | | 22932 |
| 11208 | 11390, | 12813, 12838, | 13013, 13038, | 13213, 13238, | 13413, | 13613, 13638, |
| | 11572, | 12863, 12888, | 13063, 13088, | 13263, 13288, | 13438, | 13663, 13688, |
| | 11754, | 12913, 12938, | 13113, 13138, | 13313, 13338, | 13463, | 13713, 13738, |
| | 11936, | 12963, 12988, | 13163, 13188, | 13363, 13388, | 13488, | 13763, 13788, |
| | 12118, | 22058, 22083, | 22283, 22308, | 22508, 22533, | 13513, | 22733, 22758, |
| | 12300, | 22108, 22133, | 22333, 22358, | 22558, 22583, | 13538, | 22783, 22808, |
| | 12482, | 22158, 22183, | 22383, 22408, | 22608, 22633, | 13563, | 22833, 22858, |
| | 12664 | 22208, 22233, | 22433, 22458, | 22658, 22683, | 13588 | 22883, 22908, |
| | | 22258 | 22483 | 22708 | | 22933 |
| 11229 | 11411, | 12814, 12839, | 13014, 13039, | 13214, 13239, | 13414, | 13614, 13639, |
| | 11593, | 12864, 12889, | 13064, 13089, | 13264, 13289, | 13439, | 13664, 13689, |
| | 11775, | 12914, 12939, | 13114, 13139, | 13314, 13339, | 13464, | 13714, 13739, |
| | 11957, | 12964, 12989, | 13164, 13189, | 13364, 13389, | 13489, | 13764, 13789, |
| | 12139, | 22059, 22084, | 22284, 22309, | 22509, 22534, | 13514, | 22734, 22759, |
| | 12321, | 22109, 22134, | 22334, 22359, | 22559, 22584, | 13539, | 22784, 22809, |
| | 12503, | 22159, 22184, | 22384, 22409, | 22609, 22634, | 13564, | 22834, 22859, |
| | 12685 | 22209, 22234, | 22434, 22459, | 22659, 22684, | 13589 | 22884, 22909, |
| | | 22259 | 22484 | 22709 | | 22934 |
| 11233 | 11415, | 12815, 12840, | 13015, 13040, | 13215, 13240, | 13415, | 13615, 13640, |
| | 11597, | 12865, 12890, | 13065, 13090, | 13265, 13290, | 13440, | 13665, 13690, |
| | 11779, | 12915, 12940, | 13115, 13140, | 13315, 13340, | 13465, | 13715, 13740, |
| | 11961, | 12965, 12990, | 13165, 13190, | 13365, 13390, | 13490, | 13765, 13790, |
| | 12143, | 22060, 22085, | 22285, 22310, | 22510, 22535, | 13515, | 22735, 22760, |
| | 12325, | 22110, 22135, | 22335, 22360, | 22560, 22585, | 13540, | 22785, 22810, |
| | 12507, | 22160, 22185, | 22385, 22410, | 22610, 22635, | 13565, | 22835, 22860, |
| | 12689 | 22210, 22235, | 22435, 22460, | 22660, 22685, | 13590 | 22885, 22910, |
| | | 22260 | 22485 | 22710 | | 22935 |
| 11234 | 11416, | 12816, 12841, | 13016, 13041, | 13216, 13241, | 13416, | 13616, 13641, |
| | 11598, | 12866, 12891, | 13066, 13091, | 13266, 13291, | 13441, | 13666, 13691, |
| | 11780, | 12916, 12941, | 13116, 13141, | 13316, 13341, | 13466, | 13716, 13741, |
| | 11962, | 12966, 12991, | 13166, 13191, | 13366, 13391, | 13491, | 13766, 13791, |
| | 12144, | 22061, 22086, | 22286, 22311, | 22511, 22536, | 13516, | 22736, 22761, |
| | 12326, | 22111, 22136, | 22336, 22361, | 22561, 22586, | 13541, | 22786, 22811, |
| | 12508, | 22161, 22186, | 22386, 22411, | 22611, 22636, | 13566, | 22836, 22861, |
| | 12690 | 22211, 22236, | 22436, 22461, | 22661, 22686, | 13591 | 22886, 22911, |
| | | 22261 | 22486 | 22711 | | 22936 |
| 11240 | 11422, | 12817, 12842, | 13017, 13042, | 13217, 13242, | 13417, | 13617, 13642, |
| | 11604, | 12867, 12892, | 13067, 13092, | 13267, 13292, | 13442, | 13667, 13692, |
| | 11786, | 12917, 12942, | 13117, 13142, | 13317, 13342, | 13467, | 13717, 13742, |
| | 11968, | 12967, 12992, | 13167, 13192, | 13367, 13392, | 13492, | 13767, 13792, |
| | 12150, | 22062, 22087, | 22287, 22312, | 22512, 22537, | 13517, | 22737, 22762, |
| | 12332, | 22112, 22137, | 22337, 22362, | 22562, 22587, | 13542, | 22787, 22812, |
| | 12514, | 22162, 22187, | 22387, 22412, | 22612, 22637, | 13567, | 22837, 22862, |
| | 12696 | 22212, 22237, | 22437, 22462, | 22662, 22687, | 13592 | 22887, 22912, |
| | | 22262 | 22487 | 22712 | | 22937 |
| 11245 | 11427, | 12818, 12843, | 13018, 13043, | 13218, 13243, | 13418, | 13618, 13643, |
| | 11609, | 12868, 12893, | 13068, 13093, | 13268, 13293, | 13443, | 13668, 13693, |
| | 11791, | 12918, 12943, | 13118, 13143, | 13318, 13343, | 13468, | 13718, 13743, |
| | 11973, | 12968, 12993, | 13168, 13193, | 13368, 13393, | 13493, | 13768, 13793, |
| | 12155, | 22063, 22088, | 22288, 22313, | 22513, 22538, | 13518, | 22738, 22763, |
| | 12337, | 22113, 22138, | 22338, 22363, | 22563, 22588, | 13543, | 22788, 22813, |
| | 12519, | 22163, 22188, | 22388, 22413, | 22613, 22638, | 13568, | 22838, 22863, |
| | 12701 | 22213, 22238, | 22438, 22463, | 22663, 22688, | 13593 | 22888, 22913, |
| | | 22263 | 22488 | 22713 | | 22938 |
| 11248 | 11430, | 12819, 12844, | 13019, 13044, | 13219, 13244, | 13419, | 13619, 13644, |
| | 11612, | 12869, 12894, | 13069, 13094, | 13269, 13294, | 13444, | 13669, 13694, |
| | 11794, | 12919, 12944, | 13119, 13144, | 13319, 13344, | 13469, | 13719, 13744, |
| | 11976, | 12969, 12994, | 13169, 13194, | 13369, 13394, | 13494, | 13769, 13794, |
| | 12158, | 22064, 22089, | 22289, 22314, | 22514, 22539, | 13519, | 22739, 22764, |
| | 12340, | 22114, 22139, | 22339, 22364, | 22564, 22589, | 13544, | 22789, 22814, |
| | 12522, | 22164, 22189, | 22389, 22414, | 22614, 22639, | 13569, | 22839, 22864, |
| | 12704 | 22214, 22239, | 22439, 22464, | 22664, 22689, | 13594 | 22889, 22914, |
| | | 22264 | 22489 | 22714 | | 22939 |
| 11255 | 11437, | 12820, 12845, | 13020, 13045, | 13220, 13245, | 13420, | 13620, 13645, |
| | 11619, | 12870, 12895, | 13070, 13095, | 13270, 13295, | 13445, | 13670, 13695, |
| | 11801, | 12920, 12945, | 13120, 13145, | 13320, 13345, | 13470, | 13720, 13745, |
| | 11983, | 12970, 12995, | 13170, 13195, | 13370, 13395, | 13495, | 13770, 13795, |
| | 12165, | 22065, 22090, | 22290, 22315, | 22515, 22540, | 13520, | 22740, 22765, |
| | 12347, | 22115, 22140, | 22340, 22365, | 22565, 22590, | 13545, | 22790, 22815, |
| | 12529, | 22165, 22190, | 22390, 22415, | 22615, 22640, | 13570, | 22840, 22865, |
| | 12711 | 22215, 22240, | 22440, 22465, | 22665, 22690, | 13595 | 22890, 22915, |
| | | 22265 | 22490 | 22715 | | 22940 |
| 11278 | 11460, | 12821, 12846, | 13021, 13046, | 13221, 13246, | 13421, | 13621, 13646, |
| | 11642, | 12871, 12896, | 13071, 13096, | 13271, 13296, | 13446, | 13671, 13696, |
| | 11824, | 12921, 12946, | 13121, 13146, | 13321, 13346, | 13471, | 13721, 13746, |
| | 12006, | 12971, 12996, | 13171, 13196, | 13371, 13396, | 13496, | 13771, 13796, |
| | 12188, | 22066, 22091, | 22291, 22316, | 22516, 22541, | 13521, | 22741, 22766, |
| | 12370, | 22116, 22141, | 22341, 22366, | 22566, 22591, | 13546, | 22791, 22816, |
| | 12552, | 22166, 22191, | 22391, 22416, | 22616, 22641, | 13571, | 22841, 22866, |
| | 12734 | 22216, 22241, | 22441, 22466, | 22666, 22691, | 13596 | 22891, 22916, |
| | | 22266 | 22491 | 22716 | | 22941 |
| 11281 | 11463, | 12822, 12847, | 13022, 13047, | 13222, 13247, | 13422, | 13622, 13647, |
| | 11645, | 12872, 12897, | 13072, 13097, | 13272, 13297, | 13447, | 13672, 13697, |
| | 11827, | 12922, 12947, | 13122, 13147, | 13322, 13347, | 13472, | 13722, 13747, |
| | 12009, | 12972, 12997, | 13172, 13197, | 13372, 13397, | 13497, | 13772, 13797, |
| | 12191, | 22067, 22092, | 22292, 22317, | 22517, 22542, | 13522, | 22742, 22767, |
| | 12373, | 22117, 22142, | 22342, 22367, | 22567, 22592, | 13547, | 22792, 22817, |
| | 12555, | 22167, 22192, | 22392, 22417, | 22617, 22642, | 13572, | 22842, 22867, |
| | 12737 | 22217, 22242, | 22442, 22467, | 22667, 22692, | 13597 | 22892, 22917, |
| | | 22267 | 22492 | 22717 | | 22942 |
| 11321 | 11503, | 12823, 12848, | 13023, 13048, | 13223, 13248, | 13423, | 13623, 13648, |
| | 11685, | 12873, 12898, | 13073, 13098, | 13273, 13298, | 13448, | 13673, 13698, |
| | 11867, | 12923, 12948, | 13123, 13148, | 13323, 13348, | 13473, | 13723, 13748, |
| | 12049, | 12973, 12998, | 13173, 13198, | 13373, 13398, | 13498, | 13773, 13798, |
| | 12231, | 22068, 22093, | 22293, 22318, | 22518, 22543, | 13523, | 22743, 22768, |
| | 12413, | 22118, 22143, | 22343, 22368, | 22568, 22593, | 13548, | 22793, 22818, |
| | 12595, | 22168, 22193, | 22393, 22418, | 22618, 22643, | 13573, | 22843, 22868, |
| | 12777 | 22218, 22243, | 22443, 22468, | 22668, 22693, | 13598 | 22893, 22918, |
| | | 22268 | 22493 | 22718 | | 22943 |
| 11326 | 11508, | 12824, 12849, | 13024, 13049, | 13224, 13249, | 13424, | 13624, 13649, |
| | 11690, | 12874, 12899, | 13074, 13099, | 13274, 13299, | 13449, | 13674, 13699, |
| | 11872, | 12924, 12949, | 13124, 13149, | 13324, 13349, | 13474, | 13724, 13749, |
| | 12054, | 12974, 12999, | 13174, 13199, | 13374, 13399, | 13499, | 13774, 13799, |
| | 12236, | 22069, 22094, | 22294, 22319, | 22519, 22544, | 13524, | 22744, 22769, |
| | 12418, | 22119, 22144, | 22344, 22369, | 22569, 22594, | 13549, | 22794, 22819, |
| | 12600, | 22169, 22194, | 22394, 22419, | 22619, 22644, | 13574, | 22844, 22869, |
| | 12782 | 22219, 22244, | 22444, 22469, | 22669, 22694, | 13599 | 22894, 22919, |
| | | 22269 | 22494 | 22719 | | 22944 |
| 11330 | 11512, | 12825, 12850, | 13025, 13050, | 13225, 13250, | 13425, | 13625, 13650, |
| | 11694, | 12875, 12900, | 13075, 13100, | 13275, 13300, | 13450, | 13675, 13700, |
| | 11876, | 12925, 12950, | 13125, 13150, | 13325, 13350, | 13475, | 13725, 13750, |
| | 12058, | 12975, 13000, | 13175, 13200, | 13375, 13400, | 13500, | 13775, 13800, |
| | 12240, | 22070, 22095, | 22295, 22320, | 22520, 22545, | 13525, | 22745, 22770, |
| | 12422, | 22120, 22145, | 22345, 22370, | 22570, 22595, | 13550, | 22795, 22820, |
| | 12604, | 22170, 22195, | 22395, 22420, | 22620, 22645, | 13575, | 22845, 22870, |
| | 12786 | 22220, 22245, | 22445, 22470, | 22670, 22695, | 13600 | 22895, 22920, |
| | | 22270 | 22495 | 22720 | | 22945 |
| 11334 | 11516, | 12826, 12851, | 13026, 13051, | 13226, 13251, | 13426, | 13626, 13651, |
| | 11698, | 12876, 12901, | 13076, 13101, | 13276, 13301, | 13451, | 13676, 13701, |
| | 11880, | 12926, 12951, | 13126, 13151, | 13326, 13351, | 13476, | 13726, 13751, |
| | 12062, | 12976, 13001, | 13176, 13201, | 13376, 13401, | 13501, | 13776, 13801, |
| | 12244, | 22071, 22096, | 22296, 22321, | 22521, 22546, | 13526, | 22746, 22771, |
| | 12426, | 22121, 22146, | 22346, 22371, | 22571, 22596, | 13551, | 22796, 22821, |
| | 12608, | 22171, 22196, | 22396, 22421, | 22621, 22646, | 13576, | 22846, 22871, |
| | 12790 | 22221, 22246, | 22446, 22471, | 22671, 22696, | 13601 | 22896, 22921, |
| | | 22271 | 22496 | 22721 | | 22946 |
| 11335 | 11517, | 12827, 12852, | 13027, 13052, | 13227, 13252, | 13427, | 13627, 13652, |
| | 11699, | 12877, 12902, | 13077, 13102, | 13277, 13302, | 13452, | 13677, 13702, |
| | 11881, | 12927, 12952, | 13127, 13152, | 13327, 13352, | 13477, | 13727, 13752, |
| | 12063, | 12977, 13002, | 13177, 13202, | 13377, 13402, | 13502, | 13777, 13802, |
| | 12245, | 22072, 22097, | 22297, 22322, | 22522, 22547, | 13527, | 22747, 22772, |
| | 12427, | 22122, 22147, | 22347, 22372, | 22572, 22597, | 13552, | 22797, 22822, |
| | 12609, | 22172, 22197, | 22397, 22422, | 22622, 22647, | 13577, | 22847, 22872, |
| | 12791 | 22222, 22247, | 22447, 22472, | 22672, 22697, | 13602 | 22897, 22922, |
| | | 22272 | 22497 | 22722 | | 22947 |
| 11341 | 11523, | 12828, 12853, | 13028, 13053, | 13228, 13253, | 13428, | 13628, 13653, |
| | 11705, | 12878, 12903, | 13078, 13103, | 13278, 13303, | 13453, | 13678, 13703, |
| | 11887, | 12928, 12953, | 13128, 13153, | 13328, 13353, | 13478, | 13728, 13753, |
| | 12069, | 12978, 13003, | 13178, 13203, | 13378, 13403, | 13503, | 13778, 13803, |
| | 12251, | 22073, 22098, | 22298, 22323, | 22523, 22548, | 13528, | 22748, 22773, |
| | 12433, | 22123, 22148, | 22348, 22373, | 22573, 22598, | 13553, | 22798, 22823, |
| | 12615, | 22173, 22198, | 22398, 22423, | 22623, 22648, | 13578, | 22848, 22873, |
| | 12797 | 22223, 22248, | 22448, 22473, | 22673, 22698, | 13603 | 22898, 22923, |
| | | 22273 | 22498 | 22723 | | 22948 |

[0461] In preferred embodiments, the RNA of the first aspect comprises or consists of an RNA sequence which is identical or at least 70%, 80%, 85%, 86%, 87%, 88%, 89%, 90%, 91%, 92%, 93%, 94%, 95%, 96%, 97%, 98%, or 99% identical to a nucleic acid sequence selected from the group consisting of SEQ ID NOs: 2287- 3566, 6107-7546, 9806-11165, 12804-13803, 14056-17967, 18104-19327, 19464-20687, 20825-22948, 23109-24644, 24805-26340, 26501-28036, 28197-29732, 29893-31428, 31589-33124, 33285-34820, 34981-36516, 36677-38212, 38373-39908, 41765-43300 or a fragment or variant of any of these sequences. Further information e.g. regarding the type of coding sequence (wt, opt1, opt2, opt3, opt4, opt5, opt6, opt11 etc.) comprised in the RNA constructs, the antigen, or the UTR sequences are provided under <223> identifier of the respective SEQ ID NO in the sequence listing.

[0462] In particularly preferred embodiments, the RNA of the first aspect comprises
[0463] (a) at least one heterologous 5′ untranslated region (5′-UTR) and/or at least one heterologous 3′ untranslated region (3′-UTR) and
[0464] (b) at least one coding sequence operably linked to said 3′-UTR and/or 5′-UTR encoding at least one antigenic peptide or protein derived from a LASV protein or a fragment or variant thereof, wherein
[0465] said RNA comprises or consists of an RNA sequence which is identical or at least 70%, 80%, 85%, 86%, 87%, 88%, 89%, 90%, 91%, 92%, 93%, 94%, 95%, 96%, 97%, 98%, or 99% identical to a nucleic acid sequence selected from the group consisting of SEQ ID NOs: 2287-3566, 14056-15207 (encoding GPC) or a fragment or variant of any of these sequences;
[0466] said RNA comprises or consists of an RNA sequence which is identical or at least 70%, 80%, 85%, 86%, 87%, 88%, 89%, 90%, 91%, 92%, 93%, 94%, 95%, 96%, 97%, 98%, or 99% identical to a nucleic acid sequence selected from the group consisting of SEQ ID NOs: 6107-7546, 15208-16743 (encoding GPCmut1) or a fragment or variant of any of these sequences;
[0467] said RNA comprises or consists of an RNA sequence which is identical or at least 70%, 80%, 85%, 86%, 87%, 88%, 89%, 90%, 91%, 92%, 93%, 94%, 95%, 96%, 97%, 98%, or 99% identical to a nucleic acid sequence selected from the group consisting of SEQ ID NOs: 23109-24644 (encoding GPCmut2) or a fragment or variant of any of these sequences;
[0468] said RNA comprises or consists of an RNA sequence which is identical or at least 70%, 80%, 85%, 86%, 87%, 88%, 89%, 90%, 91%, 92%, 93%, 94%, 95%, 96%, 97%, 98%, or 99% identical to a nucleic acid sequence selected from the group consisting of SEQ ID NOs: 24805-26340 (encoding GPCmut3) or a fragment or variant of any of these sequences;
[0469] said RNA comprises or consists of an RNA sequence which is identical or at least 70%, 80%, 85%, 86%, 87%, 88%, 89%, 90%, 91%, 92%, 93%, 94%, 95%, 96%, 97%, 98%, or 99% identical to a nucleic acid sequence selected from the group consisting of SEQ ID NOs: 26501-28036 (encoding GPCmut4) or a fragment or variant of any of these sequences;
[0470] said RNA comprises or consists of an RNA sequence which is identical or at least 70%, 80%, 85%, 86%, 87%, 88%, 89%, 90%, 91%, 92%, 93%, 94%, 95%, 96%, 97%, 98%, or 99% identical to a nucleic acid sequence selected from the group consisting of SEQ ID NOs: 28197-29732 (encoding GPCmut5) or a fragment or variant of any of these sequences;
[0471] said RNA comprises or consists of an RNA sequence which is identical or at least 70%, 80%, 85%, 86%, 87%, 88%, 89%, 90%, 91%, 92%, 93%, 94%, 95%, 96%, 97%, 98%, or 99% identical to a nucleic acid sequence selected from the group consisting of SEQ ID NOs: 29893-31428 (encoding GPCmut6) or a fragment or variant of any of these sequences;
[0472] said RNA comprises or consists of an RNA sequence which is identical or at least 70%, 80%, 85%, 86%, 87%, 88%, 89%, 90%, 91%, 92%, 93%, 94%, 95%, 96%, 97%, 98%, or 99% identical to a nucleic acid sequence selected from the group consisting of SEQ ID NOs: 31589-33124 (encoding GPCmut7) or a fragment or variant of any of these sequences;
[0473] said RNA comprises or consists of an RNA sequence which is identical or at least 70%, 80%, 85%, 86%, 87%, 88%, 89%, 90%, 91%, 92%, 93%, 94%, 95%, 96%, 97%, 98%, or 99% identical to a nucleic acid sequence selected from the group consisting of SEQ ID NOs: 33285-34820 (encoding GPCmut8) or a fragment or variant of any of these sequences;
[0474] said RNA comprises or consists of an RNA sequence which is identical or at least 70%, 80%, 85%, 86%, 87%, 88%, 89%, 90%, 91%, 92%, 93%, 94%, 95%, 96%, 97%, 98%, or 99% identical to a nucleic acid sequence selected from the group consisting of SEQ ID NOs: 34981-36516 (encoding GPCmut9) or a fragment or variant of any of these sequences;
[0475] said RNA comprises or consists of an RNA sequence which is identical or at least 70%, 80%, 85%, 86%, 87%, 88%, 89%, 90%, 91%, 92%, 93%, 94%, 95%, 96%, 97%, 98%, or 99% identical to a nucleic acid sequence selected from the group consisting of SEQ ID NOs: 36677-38212 (encoding GPCmut10) or a fragment or variant of any of these sequences;
[0476] said RNA comprises or consists of an RNA sequence which is identical or at least 70%, 80%, 85%, 86%, 87%, 88%, 89%, 90%, 91%, 92%, 93%, 94%, 95%, 96%, 97%, 98%, or 99% identical to a nucleic acid sequence selected from the group consisting of SEQ ID NOs: 38373-39908 (encoding GPCmut11) or a fragment or variant of any of these sequences;
[0477] said RNA comprises or consists of an RNA sequence which is identical or at least 70%, 80%, 85%, 86%, 87%, 88%, 89%, 90%, 91%, 92%, 93%, 94%, 95%, 96%, 97%, 98%, or 99% identical to a nucleic acid sequence selected from the group consisting of SEQ ID NOs: 40069-41604 (encoding GPCmut12) or a fragment or variant of any of these sequences;
[0478] said RNA comprises or consists of an RNA sequence which is identical or at least 70%, 80%, 85%, 86%, 87%, 88%, 89%, 90%, 91%, 92%, 93%, 94%, 95%, 96%, 97%, 98%, or 99% identical to a nucleic acid sequence selected from the group consisting of SEQ ID NOs: 41765-43300 (encoding GPCmut13) or a fragment or variant of any of these sequences;
[0479] said RNA comprises or consists of an RNA sequence which is identical or at least 70%, 80%, 85%, 86%, 87%, 88%, 89%, 90%, 91%, 92%, 93%, 94%, 95%, 96%, 97%, 98%, or 99% identical to a nucleic acid sequence selected from the group consisting of SEQ ID NOs: 9806-11165, 16744-17967 (encoding NP) or a fragment or variant of any of these sequences;
[0480] said RNA comprises or consists of an RNA sequence which is identical or at least 70%, 80%, 85%, 86%, 87%, 88%, 89%, 90%, 91%, 92%, 93%, 94%, 95%, 96%, 97%, 98%, or 99% identical to a nucleic acid sequence selected from the group consisting of SEQ ID NOs: 18104-19327, 19464-20687, 20825-22048 (encoding SP-NP) or a fragment or variant of any of these sequences;
[0481] said RNA comprises or consists of an RNA sequence which is identical or at least 70%, 80%, 85%, 86%, 87%, 88%, 89%, 90%, 91%, 92%, 93%, 94%, 95%, 96%, 97%, 98%, or 99% identical to a nucleic acid sequence selected from the group consisting of SEQ ID NOs: 12804-13803, 22049-22948 (encoding Z) or a fragment or variant of any of these sequences.

[0482] As outlined throughout the specification, additional information regarding suitable amino acid sequences or suitable nucleic acid sequences (coding sequences, mRNA sequences) may also be derived from the sequence listing, in particular from the details provided therein under identifier <223> as explained in the following. Therein, the skilled person can easily obtain additional information for each sequence type (amino acid sequence, nucleic acid sequence, e.g. coding sequence or mRNA sequence).

[0483] It has to be noted that throughout the sequence listing, information provided under numeric identifier <223> follows the same structure: “<SEQUENCE_DESCRIPTOR> from <CONSTRUCT_IDENTIFIER>”. The <SEQUENCE_DESCRIPTOR> relates to the type of sequence (e.g., “derived and/or modified protein sequence”, “derived and/or modified CDS sequence” “mRNA product Design a-1 comprising derived and/or modified sequence”, or “mRNA product Design a-2 comprising derived and/or modified sequence”, or “mRNA product Design i-2 comprising derived and/or modified sequence”, etc.) and whether the (coding) sequence comprises or consists of a wild type sequence (“wt”) or whether the sequence comprises or consists of a sequence-optimized sequence (e.g. “opt1”, “opt2”, “opt3”, “opt4”, “opt5”, “opt6”, “opt11”; sequence optimizations are described in further detail below).

[0484] For example, the <SEQUENCE_DESCRIPTOR> provided under numeric identifier <223> of SEQ ID NO: 8 reads as follows: “derived and/or modified protein sequence (wt)”. The <CONSTRUCT_IDENTIFIER> provided under numeric identifier <223> has the following structures: (“LASV(strain; clade)_construct name”, or “organism_accession number_construct name”) and is intended to help the person skilled in the art to explicitly derive suitable nucleic acid sequences (e.g., RNA, mRNA) encoding the same LASV protein according to the invention. For example, the <CONSTRUCT_IDENTIFIER> provided under numeric identifier <223> of SEQ ID NO: 8 reads as follows: “LASV(Acar 3080;Clade I)_AAT49014_GPC”. In that example, the respective protein sequence is derived from LASV Acar 3080, a member of Clade I, wherein the amino acid sequence comprises GPC. Moreover, the NCBI accession number is indicated “AAT49014”. If the skilled person uses the construct identifier of SEQ ID NO: 8, namely “LASV(Acar 3080;Clade I)_AAT49014_GPC” or the NCBI accession number “AAT49014” said person easily arrive at a list of suitable nucleic acid coding sequences, e.g. RNA coding sequences and mRNA sequences encoding said respective LASV antigenic protein, that can easily be retrieve from the sequence listing of the present invention.

[0485] Accordingly, the sequence listing of the invention provides additional information (under <223> identifier) that is explicitly included herein as part of the description. Moreover, said additional information enables the skilled person to obtain suitable sequences encoding the same antigenic peptide or protein.

[0486] Composition:

[0487] A second aspect relates to a composition comprising at least one RNA of the first aspect.

[0488] Notably, embodiments relating to the composition of the second aspect may likewise be read on and be understood as suitable embodiments of the vaccine of the third aspect. Also, embodiments relating to the vaccine of the third aspect may likewise be read on and be understood as suitable embodiments of the composition of the second aspect (comprising the RNA of the first aspect).

[0489] In preferred embodiments, said composition comprises at least one coding RNA encoding a LASV antigenic peptide or protein, preferably GPC or prefusion-stabilized GPC according to the first aspect, or an immunogenic fragment or immunogenic variant thereof, wherein said composition is to be, preferably, administered intramuscularly or intradermal.

[0490] Preferably, intramuscular or intradermal administration of said composition results in expression of the encoded LASV antigen construct in a subject. Preferably, the composition of the second aspect is suitable for a vaccine, in particular, suitable for a LASV vaccine.

[0491] In the context of the invention, a “composition” refers to any type of composition in which the specified ingredients (e.g. RNA encoding GPC e.g. in association with a polymeric carrier or LNP), may be incorporated, optionally along with any further constituents, usually with at least one pharmaceutically acceptable carrier or excipient. The composition may be a dry composition such as a powder or granules, or a solid unit such as a lyophilized form. Alternatively, the composition may be in liquid form, and each constituent may be independently incorporated in dissolved or dispersed (e.g. suspended or emulsified) form.

[0492] In a preferred embodiment of the second aspect, the composition comprises at least one RNA of the first aspect and, optionally, at least one pharmaceutically acceptable carrier.

[0493] In particularly preferred embodiments of the second aspect, the composition comprises at least one RNA, wherein the coding RNA comprises or consists of an RNA sequence which is identical or at least 70%, 80%, 85%, 86%, 87%, 88%, 89%, 90%, 91%, 92%, 93%, 94%, 95%, 96%, 97%, 98%, or 99% identical to a nucleic acid sequence selected from the group consisting of SEQ ID NOs 255-2286, 3821-6106, 7798-9805, 11348-12803, 18002-18103, 19362-19463, 20723-20824, 22981-23108, 24677-24804, 26373-26500, 28069-28196, 29765-29892, 31461-31588, 33157-33284, 34853-34980, 36549-36676, 38245-38372, 41637-41764, 14056-17967, 18104-19327, 19464-20687, 20825-22948, 23109-24644, 24805-26340, 26501-28036, 28197-29732, 29893-31428, 31589-33124, 33285-34820, 34981-36516, 36677-38212, 38373-39908, 41765-43300 and, optionally, at least one pharmaceutically acceptable carrier or excipient.

[0494] The term “pharmaceutically acceptable carrier” as used herein preferably includes the liquid or non-liquid basis of the composition. If the composition is provided in liquid form, the carrier may be water, e.g. pyrogen-free water; isotonic saline or buffered (aqueous) solutions, e.g. phosphate, citrate etc. buffered solutions. Water or preferably a buffer, more preferably an aqueous buffer, may be used, containing a sodium salt, preferably at least 50 mM of a sodium salt, a calcium salt, preferably at least 0.01 mM of a calcium salt, and optionally a potassium salt, preferably at least 3 mM of a potassium salt. According to preferred embodiments, the sodium, calcium and, optionally, potassium salts may occur in the form of their halogenides, e.g. chlorides, iodides, or bromides, in the form of their hydroxides, carbonates, hydrogen carbonates, or sulfates, etc. Examples of sodium salts include NaCl, NaI, NaBr, Na₂CO₃, NaHCO₃, Na₂SO₄, examples of the optional potassium salts include KCl, Kl, KBr, K₂CO₃, KHCO₃, K₂SO₄, and examples of calcium salts include CaCl₂, CaI₂, CaBr₂, CaCO₃, CaSO₄, Ca(OH)₂. Furthermore, organic anions of the aforementioned cations may be in the buffer.

[0495] In preferred embodiments, the composition comprises more than one or a plurality, e.g. 2, 3, 4, 5, 6, 7, 8, 9, 10, 11, 12, 13, 14, 15 of different RNAs each defined in the first aspect of the invention.

[0496] In embodiments, the at least one RNA comprised in the composition is a bi- or multicistronic nucleic acid, particularly a bi- or multicistronic nucleic acid as defined herein, which encodes the at least two, three, four, five, six, seven, eight, nine, ten, eleven or twelve distinct antigenic peptides or protein derived from the same LASV and/or a different LASV.

[0497] In embodiment, the composition may comprise at least 2, 3, 4, 5, 6, 7, 8, 9, 10 or even more different RNAs as defined in the context of the first aspect each encoding at least one antigenic peptide or protein derived from genetically the same LASV or a fragment or variant thereof. The term “same LASV” as used in the context of a virus, e.g. “same virus”, has to be understood as genetically the same. Particularly, said (genetically) same virus expresses essentially the same proteins or peptides, wherein all proteins or peptides have essentially the same amino acid sequence.

[0498] In embodiments, the composition may comprise at least 2, 3, 4, 5, 6, 7, 8, 9, 10 or even more different RNAs as defined in the context of the first aspect each encoding at least one antigenic peptide or protein derived from a genetically different LASV or a fragment or variant thereof. The term “different LASV” as used in the context of a virus, e.g. “different virus”, has to be understood as the difference manifested on the RNA genome of the respective different virus. Particularly, said (genetically) different LASV expresses at least one different protein, peptide or polyprotein, wherein the at least one different protein, peptide or polyprotein preferably differs in at least one amino acid.

[0499] In preferred embodiments, the composition of the second aspect may comprise at least 2, 3, 4, 5, 6, 7, 8, 9, 10 or even more different RNAs, wherein each of said RNAs encodes the same antigenic peptide or protein derived from GPC or prefusion-stabilized GPC of different LASV, preferably derived of different LASV clades.

[0500] In preferred embodiments, the composition of the second aspect comprises
[0501] (i) at least one coding RNA encoding at least one antigenic protein that is or is derived from GPC or prefusion-stabilized GPC of a LASV strain from clade I as specified herein; and
[0502] (ii) at least one coding RNA encoding at least one antigenic protein that is or is derived from GPC or prefusion-stabilized GPC of a LASV strain from clade II as specified herein; and
[0503] (iii) at least one coding RNA encoding at least one antigenic protein that is or is derived from GPC or prefusion-stabilized GPC of a LASV strain from clade III as specified herein; and
[0504] (iv) at least one coding RNA encoding at least one antigenic protein that is or is derived from GPC or prefusion-stabilized GPC of a LASV strain from clade IV as specified herein.

[0505] In particularly preferred embodiments, the composition of the second aspect comprises
[0506] (i) at least one coding RNA encoding at least one antigenic protein that is or is derived from GPC or prefusion-stabilized GPC of a LASV strain from clade I, preferably of strain LP,
[0507] (ii) at least one coding RNA encoding at least one antigenic protein that is or is derived from GPC or prefusion-stabilized GPC of a LASV strain from clade II, preferably of strain 803213 and
[0508] (iii) at least one coding RNA encoding at least one antigenic protein that is or is derived from GPC or prefusion-stabilized GPC of a LASV strain from clade III, preferably of strain GA391; and
[0509] (iv) at least one coding RNA encoding at least one antigenic protein that is or is derived from GPC or prefusion-stabilized GPC of a LASV strain from clade IV preferably of strain Josiah.

[0510] In particularly preferred embodiments, the composition of the second aspect comprises
[0511] (i) at least one coding RNA encoding at least one antigenic protein that is or is derived from GPC or prefusion-stabilized GPC of a LASV strain from clade I, preferably of strain LP, preferably encoding a protein according to SEQ ID NO: 2, 3568, 22950, 24646, 26342, 28038, 29734, 31430, 33126, 34822, 36518, 38214, 39910, 41606, 7548, 17969, 19329, 20690,
[0512] (ii) at least one coding RNA encoding at least one antigenic protein that is or is derived from GPC or prefusion-stabilized GPC of a LASV strain from clade II, preferably of strain 803213, preferably encoding a protein according to SEQ ID NO: 3, 3569, 22951, 24647, 26343, 28039, 29735, 31431, 33127, 34823, 36519, 38215, 39911, 41607, 7549, 17970, 19330, 20691,
[0513] (iii) at least one coding RNA encoding at least one antigenic protein that is or is derived from GPC or prefusion-stabilized GPC of a LASV strain from clade III, preferably of strain GA391, preferably encoding a protein according to SEQ ID NO: 4, 3570, 22952, 24648, 26344, 28040, 29736, 31432, 33128, 34824, 36520, 38216, 39912, 41608, 7550, 7692, 17971, 17990, 19331, 19350, 20692, 20711, and
[0514] (iv) at least one coding RNA encoding at least one antigenic protein that is or is derived from GPC or prefusion-stabilized GPC of a LASV strain from clade IV preferably of strain Josiah, preferably encoding a protein according to SEQ ID NO: 1, 3567, 22949, 24645, 26341, 28037, 29733, 31429, 33125, 34821, 36517, 38213, 39909, 41605, 7547, 17968, 19328, 20689, 11166.

[0515] In further preferred embodiments, the composition of the second aspect comprises
[0516] (i) at least one coding RNA encoding at least one antigenic protein that is or is derived from GPC or prefusion-stabilized GPC of a LASV strain from clade I, preferably of strain LP,
[0517] (ii) at least one coding RNA encoding at least one antigenic protein that is or is derived from GPC or prefusion-stabilized GPC of a LASV strain from clade II, preferably of strain 803213 ISTH0009-NIG-2011, ISTH2010-NIG-2012, Lassa virus/H.sapiens-wt/NGA/2015/ISTH_0543, Lassa virus/H.sapiens-wt/NGA/2016/ISTH_0009, Lassa virus/H.sapiens-wt/NGA/2016/ISTH_0017, Lassa virus/H.sapiens-wt/NGA/2018/ISTH0959, LASV003-NIG-2008, LASV035-NIG-2009, LASV1000-NIG-2009, LASV221-NIG-2010, LASV237-NIG-2010, LASV253-NIG-2011, LASV254-NIG-2011,or Nig08-04, and
[0518] (iii) at least one coding RNA encoding at least one antigenic protein that is or is derived from GPC or prefusion-stabilized GPC of a LASV strain from clade III, preferably of strain GA391 or Nig08-A19; and
[0519] (iv) at least one coding RNA encoding at least one antigenic protein that is or is derived from GPC or prefusion-stabilized GPC of a LASV strain from clade IV preferably of strain Josiah.

[0520] Accordingly, in embodiments, the composition of the second aspect may comprise at least 2, 3, 4, 5, 6, 7, 8, 9, 10 or even more different RNAs of the first aspect, wherein each of said RNAs encodes a different antigenic peptide or protein derived from the same LASV.

[0521] In other embodiments, the composition of the second aspect may comprise at least 2, 3, 4, 5, 6, 7, 8, 9, 10 or even more different RNAs of the first aspect, wherein each of said RNAs encodes a different antigenic peptide or protein derived from different proteins of the same LASV.

[0522] In other embodiments, the composition of the second aspect may comprise at least 2, 3, 4, 5, 6, 7, 8, 9, 10 or even more different RNAs of the first aspect, wherein each of said RNAs encodes a different antigenic peptide or protein derived from different proteins of different LASV.

[0523] In embodiments of the second aspect, the composition comprises at least one RNA encoding at least one antigenic peptide or protein derived from GPC or a variant or fragment thereof and at least one additional RNA encoding at least one antigenic peptide or protein derived from NP (or SP-NP) or a variant or fragment thereof, wherein NP (or SP-NP) may suitably promote T-cell responses (when administered to a subject), wherein GPC and NP (or SP-NP) are derived from the same LASV or from different LASV or combinations thereof.

[0524] Preferably, the different LASV belong to different LASV clades or different LASV lineages, preferably to the LASV clades I, II, III, IV, V, and VI or to the LASV lineages I, II, III, IV, V, and VI.

[0525] In further embodiments of the second aspect, the composition comprises at least one RNA encoding at least one antigenic peptide or protein derived from GPC or a variant or fragment thereof and at least one additional RNA encoding at least one antigenic peptide or protein derived from SP-NP, preferably from SP-HsPLAT_NP, SP-HsALB_NP, or SP-IgE_NP, or a variant or fragment thereof, wherein SP-NP may suitably promote T-cell responses (when administered to a subject), wherein GPC and SP-NP are derived from the same LASV or from different LASV or combinations thereof. Preferably, the different LASV belong to different LASV clades or different LASV lineages, preferably to the LASV clades or lineages I, II, III, and IV or to the LASV clades or lineages I, II, III, IV, V, and VI.

[0526] In particularly preferred embodiments of the second aspect, the composition of the second aspect comprises
[0527] at least one artificial RNA which is identical or at least 70%, 80%, 85%, 86%, 87%, 88%, 89%, 90%, 91%, 92%, 93%, 94%, 95%, 96%, 97%, 98%, or 99% identical to a nucleic acid sequence selected from SEQ ID NOs: 2287-3566, 14056-15207 (encoding GPC as defined in the first aspect) and a further artificial RNA which is identical or at least 70%, 80%, 85%, 86%, 87%, 88%, 89%, 90%, 91%, 92%, 93%, 94%, 95%, 96%, 97%, 98%, or 99% identical to a nucleic acid sequence selected from the group consisting of SEQ ID NOs: 9806-11165, 16744-17967, 18104-19327, 19464-20687, 20825-22048 (encoding NP or SP-NP); or
[0528] at least one artificial RNA which is identical or at least 70%, 80%, 85%, 86%, 87%, 88%, 89%, 90%, 91%, 92%, 93%, 94%, 95%, 96%, 97%, 98%, or 99% identical to a nucleic acid sequence selected from SEQ ID NOs: 6107-7546, 15208-16743, 23109-24644,24805-26340,26501-28036, 28197-29732, 29893-31428, 31589-33124, 33285-34820, 34981-36516, 36677-38212, 38373-39908, 40069-41604 (encoding prefusion stabilized GPC as defined in the first aspect) and a further artificial RNA which is identical or at least 70%, 80%, 85%, 86%, 87%, 88%, 89%, 90%, 91%, 92%, 93%, 94%, 95%, 96%, 97%, 98%, or 99% identical to a nucleic acid sequence selected from the group consisting of SEQ ID NOs: 9806-11165, 16744-17967, 18104- 19327, 19464-20687, 20825-22048 (encoding NP or SP-NP); or
[0529] at least one artificial RNA which is identical or at least 70%, 80%, 85%, 86%, 87%, 88%, 89%, 90%, 91%, 92%, 93%, 94%, 95%, 96%, 97%, 98%, or 99% identical to a nucleic acid sequence selected from SEQ ID NOs: 41765-43300 (encoding GPCmut13) as defined in the first aspect) and a further artificial RNA which is identical or at least 70%, 80%, 85%, 86%, 87%, 88%, 89%, 90%, 91%, 92%, 93%, 94%, 95%, 96%, 97%, 98%, or 99% identical to a nucleic acid sequence selected from the group consisting of SEQ ID NOs: 9806- 11165, 16744-17967, 18104-19327, 19464-20687, 20825-22048 (encoding NP or SP-NP).

[0530] In various embodiments, different combinations of GPC or prefusion-stabilized GPC (GPC, GPCmut1, GPCmut1, GPCmut1, GPCmut1, GPCmut1, GPCmut1, GPCmut1, GPCmut1, GPCmut1, GPCmut1, GPCmut1, GPCmut1) RNA constructs and NP (NP, SP-NP) are suitably comprised in the composition.

[0531] In preferred embodiments, the composition of the second aspect comprises
[0532] (i) at least one coding RNA encoding at least one antigenic protein that is or is derived from GPC or prefusion-stabilized GPC and NP (or SP-NP) of a LASV strain from clade I as specified herein; and
[0533] (ii) at least one coding RNA encoding at least one antigenic protein that is or is derived from GPC or prefusion-stabilized GPC and NP (or SP-NP) of a LASV strain from clade II as specified herein; and
[0534] (iii) at least one coding RNA encoding at least one antigenic protein that is or is derived from GPC or prefusion-stabilized GPC and NP (or SP-NP) of a LASV strain from clade III as specified herein; and
[0535] (iv) at least one coding RNA encoding at least one antigenic protein that is or is derived from GPC or prefusion-stabilized GPC and NP (or SP-NP) of a LASV strain from clade IV as specified herein.

[0536] LASV clade members may be derived from Lists 1-6. Moreover, each suitable amino acid sequence or nucleic acid sequence provided herein is provided with information regarding virus strain, clade etc. that can be found under <223> identifier in the sequence listing of the invention. Particularly suitable clade members are provided in Table A below.

TABLE A
Suitable LSAV clade members

| LASV Strain/Isolate | Clade |
|---|---|
| LP | I |
| Pinneo-NIG-1969 | I |
| 803213 | II |
| ISTH0009-NIG-2011 | II |
| ISTH2010-NIG-2012 | II |
| Lassa virus/H. sapiens-wt/NGA/2015/ISTH_0543 | II |
| Lassa virus/H. sapiens-wt/NGA/2016/ISTH_0009 | II |
| Lassa virus/H. sapiens-wt/NGA/2016/ISTH_0017 | II |
| Lassa virus/H. sapiens-wt/NGA/2018/ISTH_0959 | II |
| LASV003-NIG-2008 | II |
| LASV035-NIG-2009 | II |
| LASV1000-NIG-2009 | II |
| LASV221-NIG-2010 | II |
| LASV237-NIG-2010 | II |
| LASV253-NIG-2011 | II |
| LASV254-NIG-2011 | II |
| Nig08-04 | II |
| GA391 | III |
| Nig08-A19 | III |
| Josiah | IV |
| G1180-SLE-2010 | IV |
| G1442-SLE-2011 | IV |
| G3010-SLE-2013 | IV |
| G502-SLE-2009 | IV |
| G733-SLE-2010 | IV |
| MOPV/LASV reassortant IGS-1 | IV |
| LM765-SLE-2012 | IV |
| LM776-SLE-2012 | IV |
| Mad39 | IV |
| Z0947-SLE-2011 | IV |
| AV | V |
| Togo/2016/7082 | VI |
| KAK-428 | n.d. (VII) |

[0537] In embodiments of the second aspect, the composition comprises at least one RNA encoding at least one antigenic peptide or protein derived from prefusion-stabilized GPC or a variant or fragment thereof and at least one additional RNA encoding at least one antigenic peptide or protein derived from NP (or SP-NP) or a variant or fragment thereof, wherein NP (or SP-NP) may suitably promote T-cell responses (when administered to a subject), wherein prefusion-stabilized GPC and NP (or SP-NP) are derived from the same LASV or from different LASV or combinations thereof. Preferably, the different LASV belong to different LASV clades or different LASV lineages, preferably to the LASV clades I, II, III, IV, V, and VI or to the LASV lineages I, II, III, IV, V, and VI.

[0538] In embodiments of the second aspect, the composition comprises at least one RNA encoding at least one antigenic peptide or protein derived from GPC or a variant or fragment thereof and at least one additional RNA encoding at least one antigenic peptide or protein derived from NP (or SP-NP) or a variant or fragment thereof, and at least one additional RNA encoding at least one antigenic peptide or protein derived from Z or a variant or fragment thereof, wherein GPC, NP (or SP-NP) and Z may suitably promote the formation of VLPs (when administered to a subject), wherein GPC, NP (or SP-NP) and Z are derived from the same LASV or from different LASV or combinations thereof. Preferably, the different LASV belong to different LASV clades or different LASV lineages, preferably to the LASV clades I, II, III, IV, V, and VI or to the LASV lineages I, II, III, IV, V, and VI.

[0539] In embodiments of the second aspect, the composition comprises at least one RNA encoding at least one antigenic peptide or protein derived from prefusion-stabilized GPC or a variant or fragment thereof and at least one additional RNA encoding at least one antigenic peptide or protein derived from NP (or SP-NP) or a variant or fragment thereof, and at least one additional RNA encoding at least one antigenic peptide or protein derived from Z or a variant or fragment thereof, wherein GPC, NP (or SP-NP) and Z may suitably promote the formation of VLPs (when administered to a subject), wherein prefusion-stabilized GPC, NP (or SP-NP) and Z are derived from the same LASV or from different LASV or combinations thereof. Preferably, the different LASV belong to different LASV clades or different LASV lineages, preferably to the LASV clades I, II, III, IV, V, and VI or to the LASV lineages I, II, III, IV, V, and VI.

[0540] As outlined above, the antigenic peptide(s) or protein(s) may be derived from different LASV clades, in particular from clade I, II, III, IV, V, and VI and/or from a LASV of lineage I, II, III, IV, V, and VI. Such embodiments may have the advantage that the composition, when administered to the subject, provides broad protection against different LASV clades which is important in the context of an effective LASV vaccine. Different suitable LASV clade members are provided in Lists 1-6, and in particular in Table A, showing particularly preferred LASV strains. Further particularly preferred strains are LP (clade I), 803213 (clade II), GA391 (clade III) and Josiah (clade IV).

[0541] For the production of a composition comprising at least 2, 3, 4, 5, 6, 7, 8, 9, 10 RNA constructs of the first aspect, methods as disclosed in published patent application WO2017/1090134 are preferably used and adapted accordingly.

[0542] It has to be understood that in the context of the invention, certain combinations of coding sequences may be generated by any combination of monocistronic, bicistronic and multicistronic nucleic acids and/or multi- antigen-constructs/nucleic acid to obtain a nucleic acid composition encoding multiple antigenic peptides or proteins as defined herein.

[0543] In embodiments, one or more compatible solid or liquid fillers or diluents or encapsulating compounds may be used as well, which are suitable for administration to a subject. The term “compatible” as used herein means that the constituents of the composition are capable of being mixed with the at least one RNA and, optionally, a plurality of RNAs of the composition, in such a manner that no interaction occurs, which would substantially reduce the biological activity or the pharmaceutical effectiveness of the composition under typical use conditions. Pharmaceutically acceptable carriers, fillers and diluents must have sufficiently high purity and sufficiently low toxicity to make them suitable for administration to a subject to be treated. Compounds which may be used as pharmaceutically acceptable carriers, fillers or constituents thereof are sugars, such as, for example, lactose, glucose, trehalose and sucrose; starches, such as, for example, corn starch or potato starch; dextrose; cellulose and its derivatives, such as, for example, sodium carboxymethylcellulose, ethylcellulose, cellulose acetate; powdered tragacanth; malt; gelatin; tallow; solid glidants, such as, for example, stearic acid, magnesium stearate; calcium sulfate; vegetable oils, such as, for example, groundnut oil, cottonseed oil, sesame oil, olive oil, corn oil and oil from theobroma; polyols, such as, for example, polypropylene glycol, glycerol, sorbitol, mannitol and polyethylene glycol; alginic acid.

[0544] Complexation:

[0545] In a preferred embodiment of the second aspect, at least one RNA is complexed or associated with or at least partially complexed or partially associated with one or more cationic or polycationic compound, preferably cationic or polycationic polymer, cationic or polycationic polysaccharide, cationic or polycationic lipid, cationic or polycationic protein, cationic or polycationic peptide, or any combinations thereof. In embodiments where more than one or a plurality, e.g. 2, 3, 4, 5, 6, 7, 8, 9, 10, 11, 12, 13, 14, 15 of the RNAs are comprised in the composition, said more than one or a plurality, e.g. 2, 3, 4, 5, 6, 7, 8, 9, 10, 11, 12, 13, 14, 15 of the RNAs may be complexed or associated with or at least partially complexed or partially associated with one or more cationic or polycationic compound, preferably cationic or polycationic polymer, cationic or polycationic polysaccharide, cationic or polycationic lipid, cationic or polycationic protein, cationic or polycationic peptide, or any combinations thereof as described in the following.

[0546] Accordingly, embodiments relating to “at least one RNA” may likewise be read on and be understood as suitable embodiments of more than one or a plurality, e.g. 2, 3, 4, 5, 6, 7, 8, 9, 10, 11, 12, 13, 14, 15 of the RNAs as specified herein.

[0547] The term “cationic or polycationic compound” as used herein will be recognized and understood by the person of ordinary skill in the art, and are e.g. intended to refer to a charged molecule, which is positively charged at a pH value ranging from about 1 to 9, at a pH value ranging from about 3 to 8, at a pH value ranging from about 4 to 8, at a pH value ranging from about 5 to 8, more preferably at a pH value ranging from about 6 to 8, even more preferably at a pH value ranging from about 7 to 8, most preferably at a physiological pH, e.g. ranging from about 7.2 to about 7.5. Accordingly, a cationic component, e.g. a cationic peptide, cationic protein, cationic polymer, cationic polysaccharide, cationic lipid may be any positively charged compound or polymer which is positively charged under physiological conditions. A “cationic or polycationic peptide or protein” may contain at least one positively charged amino acid, or more than one positively charged amino acid, e.g. selected from Arg, His, Lys or Orn. Accordingly, “polycationic” components are also within the scope exhibiting more than one positive charge under the given conditions.

[0548] Cationic or polycationic compounds, being particularly preferred in this context may be selected from the following list of cationic or polycationic peptides or proteins of fragments thereof: protamine, nucleoline, spermine or spermidine, or other cationic peptides or proteins, such as poly-L-lysine (PLL), poly-arginine, basic polypeptides, cell penetrating peptides (CPPs), including HIV-binding peptides, HIV-1 Tat (HIV), Tat-derived peptides, Penetratin, VP22 derived or analog peptides, HSV VP22 (Herpes simplex), MAP, KALA or protein transduction domains (PTDs), PpT620, prolin-rich peptides, arginine-rich peptides, lysine-rich peptides, MPG-peptide(s), Pep-1, L-oligomers, Calcitonin peptide(s), Antennapedia-derived peptides, pAntp, p151, FGF, Lactoferrin, Transportan, Buforin-2, Bac715-24, SynB, SynB(1), pVEC, hCT-derived peptides, SAP, or histones. More preferably, the nucleic acid as defined herein, preferably the mRNA as defined herein, is complexed with one or more polycations, preferably with protamine or oligofectamine, most preferably with protamine.

[0549] In a preferred embodiment of the second aspect, the at least one RNA is complexed with protamine.

[0550] Further preferred cationic or polycationic compounds, which can be used as complexation agent may include cationic polysaccharides, e.g. chitosan, polybrene etc.; cationic lipids, e.g. DOTMA, DMRIE, di-C14-amidine, DOTIM, SAINT, DC-Chol, BGTC, CTAP, DOPC, DODAP, DOPE: Dioleyl phosphatidylethanol-amine, DOSPA, DODAB, DOIC, DMEPC, DOGS, DIMRI, DOTAP, DC-6-14, CLIP1, CLIP6, CLIP9, oligofectamine; or cationic or polycationic polymers, e.g. modified polyaminoacids, such as beta-aminoacid-polymers or reversed polyamides, etc., modified polyethylenes, such as PVP etc., modified acrylates, such as pDMAEMA etc., modified amidoamines such as pAMAM etc., modified polybetaaminoester (PBAE), such as diamine end modified 1,4 butanediol diacrylate-co-5-amino-1-pentanol polymers, etc., dendrimers, such as polypropylamine dendrimers or pAMAM based dendrimers, etc., polyimine(s), such as PEI, poly(propyleneimine), etc., polyallylamine, sugar backbone based polymers, such as cyclodextrin based polymers, dextran based polymers, etc., silan backbone based polymers, such as PMOXA-PDMS copolymers, etc., blockpolymers consisting of a combination of one or more cationic blocks (e.g. selected from a cationic polymer as mentioned above) and of one or more hydrophilic or hydrophobic blocks (e.g. polyethyleneglycole); etc.

[0551] In this context it is particularly preferred that the at least one RNA is complexed or at least partially complexed with a cationic or polycationic compound and/or a polymeric carrier, preferably cationic proteins or peptides. In this context, the disclosure of WO2010/037539 and WO2012/113513 is incorporated herewith by reference. Partially means that only a part of the nucleic acid is complexed with a cationic compound and that the rest of the nucleic acid is (comprised in the inventive (pharmaceutical) composition) in uncomplexed form (“free”).

[0552] In a preferred embodiment of the second aspect, the at least one RNA is complexed with one or more cationic or polycationic compounds, preferably protamine, and at least one free RNA.

[0553] In this context it is particularly preferred that the at least one RNA is complexed, or at least partially complexed with protamine. Preferably, the molar ratio of the nucleic acid, particularly the RNA of the protamine-complexed RNA to the free RNA may be selected from a molar ratio of about 0.001:1 to about 1:0.001, including a ratio of about 1:1. Suitably, the complexed RNA is complexed with protamine by addition of protamine-trehalose solution to the RNA sample at a RNA:protamine weight to weight ratio (w/w) of 2:1.

[0554] Further preferred cationic or polycationic proteins or peptides that may be used for complexation can be derived from formula (Arg)I;(Lys)m;(His)n;(Orn)o;(Xaa)x of the patent application WO2009/030481 or WO2011/026641, the disclosure of WO2009/030481 or WO2011/026641 relating thereto incorporated herewith by reference.

[0555] In a preferred embodiment of the second aspect, the at least one RNA is complexed or at least partially complexed with at least one cationic or polycationic proteins or peptides preferably selected from SEQ ID NOs: 13868-13872, or any combinations thereof.

[0556] According to embodiments, the composition of the present invention comprises at least one RNA as defined herein, and a polymeric carrier.

[0557] The term “polymeric carrier” as used herein will be recognized and understood by the person of ordinary skill in the art, and are e.g. intended to refer to a compound that facilitates transport and/or complexation of another compound (cargo). A polymeric carrier is typically a carrier that is formed of a polymer. A polymeric carrier may be associated to its cargo (e.g. RNA) by covalent or non-covalent interaction.

[0558] A suitable polymeric carrier may be a polymeric carrier formed by disulfide-crosslinked cationic compounds. The disulfide-crosslinked cationic compounds may be the same or different from each other. The polymeric carrier can also contain further components. The polymeric carrier used according to the present invention may comprise mixtures of cationic peptides, proteins or polymers and optionally further components as defined herein, which are crosslinked by disulfide bonds (via -SH groups).

[0559] In this context, polymeric carriers according to formula {(Arg)I;(Lys)m;(His)n;(Orn)o;(Xaa′)x(Cys)y} and formula Cys,{(Arg)I;(Lys)m;(His)n;(Orn)o;(Xaa)x}Cys₂ of WO2012/013326 are preferred, the disclosure of WO2012/013326 relating thereto incorporated herewith by reference.

[0560] In embodiments, the polymeric carrier used to complex the at least one RNA as defined herein may be derived from a polymeric carrier molecule according formula (L-P¹-S—[S—P²—S]ₙ—S—P³-L) of WO2011/026641, the disclosure of WO2011/026641 relating thereto incorporated herewith by reference.

[0561] In embodiments, the polymeric carrier compound is formed by, or comprises or consists of the peptide elements CysArg12Cys (SEQ ID NO: 13868) or CysArg12 (SEQ ID NO: 13869) or TrpArg12Cys (SEQ ID NO: 13870). In particularly preferred embodiments, the polymeric carrier compound consists of a (R₁₂C)-(R₁₂C) dimer, a (WR₁₂C)-(WR₁₂C) dimer, or a (CR12)-(CR12C)-(CR12) trimer, wherein the individual peptide elements in the dimer (e.g. (WR12C)), or the trimer (e.g. (CR12)), are connected via —SH groups.

[0562] In a preferred embodiment of the second aspect, the at least one RNA is complexed or associated with a polyethylene glycol/peptide polymer comprising HO-PEG5000-S—(S—CHHHHHHRRRRHHHHHHC—S-)7-S-PEG5000-OH (SEQ ID NO: 13871 as peptide monomer).

[0563] In a further preferred embodiment of the second aspect, the at least one artificial RNA of the first aspect and, optionally, the further artificial RNA of the second aspect, is complexed or associated with a polyethylene glycol/peptide polymer comprising HO-PEG5000-S—(S—CHHHHHHRRRRHHHHHHC—S-)4-S-PEG5000-OH (SEQ ID NO: 13871 as peptide monomer).

[0564] In a further preferred embodiment of the second aspect, the at least one artificial RNA of the first aspect and, optionally, the further artificial RNA of the second aspect, is complexed or associated with a polyethylene glycol/peptide polymer comprising HO-PEG5000-S—(S—CGHHHHHRRRRHHHHHGC—S-)7-S-PEG5000-OH (SEQ ID NO: 13872 as peptide monomer).

[0565] In a further preferred embodiment of the second aspect, the at least one artificial RNA of the first aspect and, optionally, the further artificial RNA of the second aspect, is complexed or associated with a polyethylene glycol/peptide polymer comprising HO-PEG5000-S—(S—CGHHHHHRRRRHHHHHGC-S-)4-S-PEG5000-OH (SEQ ID NO: 13872 as peptide monomer).

[0566] In other embodiments, the composition comprises at least one RNA, wherein the at least one RNA is complexed or associated with polymeric carriers and, optionally, with at least one lipid component as described in WO2017/212008A1, WO2017/212006A1, WO2017/212007A1, and WO2017/212009A1. In this context, the disclosures of WO2017/212008A1, WO2017/212006A1, WO2017/212007A1, and WO2017/212009A1 are herewith incorporated by reference.

[0567] In a particularly preferred embodiment, the polymeric carrier is a peptide polymer, preferably a polyethylene glycol/peptide polymer as defined above, and a lipid component, preferably a lipidoid component, more preferably lipidoid component.

[0568] A lipidoid compound, also simply referred to as lipidoid, is a lipid-like compound, i.e. an amphiphilic compound with lipid-like physical properties. In the context of the present invention the term lipid is considered to also encompass lipidoid compounds.

[0569] In preferred embodiment of the second aspect, the at least one RNA is complexed or associated with a polymeric carrier, preferably with a polyethylene glycol/peptide polymer as defined above, and a lipidoid component, wherein the lipidoid component is a compound according to formula A

[chemical structure]

[0570] wherein
[0571] R_{A} is independently selected for each occurrence an unsubstituted, cyclic or acyclic, branched or unbranched C₁₋₂₀ aliphatic group; a substituted or unsubstituted, cyclic or acyclic, branched or unbranched C₁₋₂₀ heteroaliphatic group; a substituted or unsubstituted aryl; a substituted or unsubstituted heteroaryl;

[chemical structure]

[0572] wherein at least one R_{A} is

[chemical structure]

[0573] R₅ is independently selected for each occurrence of from an unsubstituted, cyclic or acyclic, branched or unbranched C₈₋₁₆ aliphatic; a substituted or unsubstituted aryl; or a substituted or unsubstituted heteroaryl;
[0574] each occurrence of x is an integer from 1 to 10;
[0575] each occurrence of y is an integer from 1 to 10;
[0576] or a pharmaceutically acceptable salt thereof.

[0577] In a preferred embodiment, the lipidoid component is 3-C12-OH according to formula B

[chemical structure]

[0578] In preferred embodiments, the peptide polymer comprising lipidoid 3-C12-OH as specified above is used to complex the at least one RNA of the first aspect to form complexes having an N/P ratio from about 0.1 to about 20, or from about 0.2 to about 15, or from about 2 to about 15, or from about 2 to about 12, wherein the N/P ratio is defined as the mole ratio of the nitrogen atoms of the basic groups of the cationic peptide or polymer to the phosphate groups of the nucleic acid. In that context, the disclosure of WO2017/212009A1, in particular claims 1 to 10 of W02017/212009A1, and the specific disclosure relating thereto is herewith incorporated by reference.

[0579] Encapsulation/Complexation in LNPs:

[0580] In preferred embodiments of the second aspect, the at least one RNA is complexed or associated with one or more lipids (e.g. cationic lipids and/or neutral lipids), thereby forming liposomes, lipid nanoparticles (LNPs), lipoplexes, and/or nanoliposomes.

[0581] For compositions comprising more than one artificial RNA construct as defined herein (e,g, GPC and NP; or e.g. at least 2 GPCs or 2 prefusion-stbilized GPCs of different strains), said constructs may be co-formulated in e.g. LNPs to form the respective composition.

[0582] Alternatively, said more than one RNA constructs may be formulated separately, and may subsequently be combined, to form the respective composition.

[0583] In this context, the terms “complexed” or “associated” refer to the essentially stable combination of RNA of the first aspect with one or more lipids into larger complexes or assemblies without covalent binding.

[0584] The term “lipid nanoparticle”, also referred to as “LNP”, is not restricted to any particular morphology, and include any morphology generated when a cationic lipid and optionally one or more further lipids are combined, e.g. in an aqueous environment and/or in the presence of RNA. E.g., a liposome, a lipid complex, a lipoplex and the like are within the scope of an LNP.

[0585] Accordingly, in preferred embodiments of the second aspect, the at least one RNA is complexed with one or more lipids thereby forming lipid nanoparticles (LNP).

[0586] LNPs typically comprise a cationic lipid and one or more excipient selected from neutral lipids, charged lipids, steroids and polymer conjugated lipids (e.g. PEGylated lipid). The at least one RNA, or the plurality of RNAs may be encapsulated in the lipid portion of the LNP or an aqueous space enveloped by some or the entire lipid portion of the LNP. The at least one RNA or a portion thereof may also be associated and complexed with the LNP. An LNP may comprise any lipid capable of forming a particle to which the nucleic acids are attached, or in which the one or more nucleic acids are encapsulated. Preferably, the LNP comprising nucleic acids comprises one or more cationic lipids, and one or more stabilizing lipids. Stabilizing lipids include neutral lipids and PEGylated lipids.

[0587] The cationic lipid of an LNP may be cationisable, i.e. it becomes protonated as the pH is lowered below the pK of the ionizable group of the lipid, but is progressively more neutral at higher pH values. At pH values below the pK, the lipid is then able to associate with negatively charged nucleic acids. In certain embodiments, the cationic lipid comprises a zwitterionic lipid that assumes a positive charge on pH decrease.

[0588] The LNP may comprise any further cationic or cationisable lipid, i.e. any of a number of lipid species which carry a net positive charge at a selective pH, such as physiological pH.

[0589] Such lipids include, but are not limited to, N,N-dioleyl-N,N-dimethylammonium chloride (DODAC), N,N-distearyl-N,N-dimethylammonium bromide (DDAB), 1,2-dioleoyltrimethyl ammonium propane chloride (DOTAP) (also known as N-(2,3-dioleoyloxy)propyl)-N,N,N-trimethylammonium chloride and 1,2-Dioleyloxy-3-trimethylaminopropane chloride salt), N-(1-(2,3-dioleyloxy)propyl)-N,N,N-trimethylammonium chloride (DOTMA), N,N-dimethyl-2,3-dioleyloxy)propylamine (DODMA), 1,2-DiLinoleyloxy-N,N-dimethylaminopropane (DLinDMA), 1,2-Dilinolenyloxy-N,N-dimethylaminopropane (DLenDMA), 1,2-di-y-linolenyloxy-N,N-dimethylaminopropane (γ-DLenDMA), 1,2-Dilinoleylcarbamoyloxy-3-dimethylaminopropane (DLin-C-DAP), 1,2-Dilinoleyoxy-3-(dimethylamino)acetoxypropane (DLin-DAC), 1,2-Dilinoleyoxy-3-morpholinopropane (DLin-MA), 1,2-Dilinoleoyl-3-dimethylaminopropane (DLinDAP), 1,2-Dilinoleylthio-3-dimethylaminopropane (DLin-S-DMA), 1-Linoleoyl-2-linoleyloxy-3-dimethylaminopropane (DLin-2-DMAP), 1,2-Dilinoleyloxy-3-trimethylaminopropane chloride salt (DLin-TMA.CI), ICE (Imidazol-based), HGT5000, HGT5001, DMDMA, CLinDMA, CpLinDMA, DMOBA, DOcarbDAP, DLincarbDAP, DLinCDAP, KLin-K-DMA, DLin-K-XTC2-DMA, HGT4003, 1,2-Dilinoleoyl-3-trimethylaminopropane chloride salt (DLin-TAP.CI), 1,2-Dilinoleyloxy-3-(N-methylpiperazino)propane (DLin-MPZ), or 3-(N,N-Dilinoleylamino)-1,2-propanediol (DLinAP), 3-(N,N-Dioleylamino)-1,2-propanedio (DOAP), 1,2-Dilinoleyloxo-3-(2-N,N-dimethylamino)ethoxypropane (DLin-EG-DM A), 2,2-Dilinoleyl-4-dimethylaminomethyl[1,3]-dioxolane (DLin-K-DMA) or analogs thereof, (3aR,5s,6aS)-N,N-dimethyl-2,2-di((9Z,12Z)-octadeca-9,12-dienyl)tetrahydro-3aH-cyclopenta[d][1,3]dioxol-5-amine, (6Z,9Z,28Z,31Z)-heptatriaconta-6,9,28,31-tetraen-19-yl-4-(dimethylamino)butanoate (MC3), 1,1′-(2-(4-(2-((2-(bis(2-hydroxydodecyl)amino)ethyl)(2-hydroxydodecyl)amino)ethyl)piperazin-1-yl)ethylazanediyl)didodecan-2-ol (C12-200), 2,2-dilinoleyl-4-(2-dimethylaminoethyl)[1,3]-dioxolane (DLin-K-C2-DMA), 2,2-dilinoleyl-4-dimethylaminomethyl-[1,3]-dioxolane (DLin-K-DMA), (6Z,9Z,28Z,31Z)-heptatriaconta-6,9,28,31-tetraen-19-yl 4-(dimethylamino) butanoate (DLin-M-C3-DMA), 3-((6Z,9Z,28Z,31Z)-heptatriaconta-6,9,28,31-tetraen-19-yloxy)-N,N-dimethylpropan-1-amine (MC3 Ether), 4-((6Z,9Z,28Z,31Z)-heptatriaconta-6,9,28,31-tetraen-19-yloxy)-N,N-dimethylbutan-1-amine (MC4 Ether), LIPOFECTIN® (commercially available cationic liposomes comprising DOTMA and 1,2-dioleoyl-sn-3phosphoethanolamine (DOPE), from GIBCO/BRL, Grand Island, N.Y.); LIPOFECTAMINE® (commercially available cationic liposomes comprising N-(1-(2,3dioleyloxy)propyl)-N-(2-(sperminecarboxamido)ethyl)-N,N-dimethylammonium trifluoroacetate (DOSPA) and (DOPE), from GIBCO/BRL); and TRANSFECTAM® (commercially available cationic lipids comprising dioctadecylamidoglycyl carboxyspermine (DOGS) in ethanol from Promega Corp., Madison, Wis.) or any combination of any of the foregoing.

[0590] In some embodiments, the lipid is selected from the group consisting of 98N12-5, C12-200, and ckk-E12.

[0591] In one embodiment, the further cationic lipid is an amino lipid.

[0592] Representative amino lipids include, but are not limited to, 1,2-dilinoleyoxy-3-(dimethylamino)acetoxypropane (DLin-DAC), 1,2-dilinoleyoxy-3morpholinopropane (DLin-MA), 1,2-dilinoleoyl-3-dimethylaminopropane (DLinDAP), 1,2-dilinoleylthio-3-dimethylaminopropane (DLin-S-DMA), 1-linoleoyl-2-linoleyloxy-3dimethylaminopropane (DLin-2-DMAP), 1,2-dilinoleyloxy-3-trimethylaminopropane chloride salt (DLin-TMA.CI), 1,2-dilinoleoyl-3-trimethylaminopropane chloride salt (DLin-TAP.CI), 1,2-dilinoleyloxy-3-(N-methylpiperazino)propane (DLin-MPZ), 3-(N,Ndilinoleylamino)-1,2-propanediol (DLinAP), 3-(N,N-dioleylamino)-1,2-propanediol (DOAP), 1,2-dilinoleyloxo-3-(2-N,N-dimethylamino)ethoxypropane (DLin-EG-DMA), and 2,2-dilinoleyl-4-dimethylaminomethyl[1,3]-dioxolane (DLin-K-DMA), 2,2-dilinoleyl-4-(2-dimethylaminoethyl)-[1,3]-dioxolane (DLin-KC2-DMA); dilinoleyl-methyl-4-dimethylaminobutyrate (DLin-MC3-DMA); MC3 (US20100324120).

[0593] In one embodiment, the at least one RNA may be formulated in an aminoalcohol lipidoid. Aminoalcohol lipidoids which may be used in the present invention may be prepared by the methods described in U.S. Pat. No. 8,450,298, herein incorporated by reference in its entirety. Suitable (ionizable) lipids can also be the compounds as disclosed in Tables 1, 2 and 3 and as defined in claims 1-24 of WO2017/075531A1, hereby incorporated by reference.

[0594] In another embodiment, ionizable lipids can also be the compounds as disclosed in WO2015/074085A1 (i.e. ATX-001 to ATX-032 or the compounds as specified in claims 1-26), U.S. Appl. No. 61/905,724 and Ser. No. 15/614,499 or U.S. Pat. Nos. 9,593,077 and 9,567,296 hereby incorporated by reference in their entirety.

[0595] In that context, any lipid derived from generic formula (X1)

[chemical structure]

[0596] wherein, Ri and R2 are the same or different, each a linear or branched alkyl consisting of 1 to 9 carbons, an alkenyl or alkynyl consisting of 2 to 11carbons, Li and L2 are the same or different, each a linear alkylene or alkenylene consisting of 5 to 18 carbons, or forming a heterocycle with N, Xi is a bond, or is —CO—O— whereby -L2-CO—O—R2 is formed, X2 is S or O, L3 is a bond or a linear or branched alkylene consisting of 1 to 6 carbons, or forming a heterocycle with N, R3 is a linear or branched alkylene consisting of 1 to 6 carbons, and R4 and R 5 are the same or different, each hydrogen or a linear or branched alkyl consisting of 1 to 6 carbons; or a pharmaceutically acceptable salt thereof may be suitably used.

[0597] In other embodiments, suitable cationic lipids can also be the compounds as disclosed in WO2017/117530A1 (i.e. lipids 13, 14, 15, 16, 17, 18, 19, 20, or the compounds as specified in the claims), hereby incorporated by reference in its entirety.

[0598] In that context, any lipid derived from generic formula (X2)

[chemical structure]

[0599] wherein

[0600] X is a linear or branched alkylene or alkenylene, monocyclic, bicyclic, or tricyclic arene or heteroarene;

[0601] Y is a bond, an ethene, or an unsubstituted or substituted aromatic or heteroaromatic ring; Z is S or 0;

[0602] L is a linear or branched alkylene of 1 to 6 carbons;

[0603] R-3 and R4 are independently a linear or branched alkyl of 1 to 6 carbons;

[0604] Ri and R2 are independently a linear or branched alkyl or alkenyl of 1 to 20 carbons; r is 0 to 6; and

[0605] m, n, p, and q are independently 1 to 18;

[0606] wherein when n=q, m=p, and Ri=R2, then X and Y differ;

[0607] wherein when X=Y, n=q, m=p, then Ri and R2 differ;

[0608] wherein when X=Y, n=q, and Ri=R2, then m and p differ; and

[0609] wherein when X=Y, m=p, and Ri=R2, then n and q differ;

[0610] or a pharmaceutically acceptable salt thereof.

[0611] In preferred embodiments, a lipid may be used derived from formula (X2), wherein, X is a bond, linear or branched alkylene, alkenylene, or monocyclic, bicyclic, or tricyclic arene or heteroarene; Y is a monocyclic, bicyclic, or tricyclic arene or heteroarene; Z is S or O; L is a linear or branched alkylene of 1 to 6 carbons; R3 and R4 are independently a linear or branched alkyl of 1 to 6 carbons; Ri and R2 are independently a linear or branched alkyl or alkenyl of 1 to 20 carbons; r is 0 to 6; and m, n, p, and q are independently 1 to 18; or a pharmaceutically acceptable salt thereof may be suitably used.

[0612] In preferred embodiments, ionizable lipids may also be selected from the lipids disclosed in WO2018078053A1 (i.e. lipids derived form formula I, II, and III of WO2018078053A1, or lipids as specified in claims 1 to 12 of WO2018078053A1), the disclosure of WO2018078053A1 hereby incorporated by reference in its entirety. In that context, lipids disclosed in Table 7 of WO2018078053A1 (e.g. lipids derived from formula I-1 to 1-41) and lipids disclosed in Table 8 of WO2018078053A1 (e.g. lipids derived from formula 11-1 to 11-36) may be suitably used in the context of the invention. Accordingly, formula I-1 to formula 1-41 and formula 11-1 to formula 11-36 of WO2018078053A1, and the specific disclosure relating thereto, are herewith incorporated by reference.

[0613] In particularly preferred embodiments of the second aspect, a suitable lipid may be a cationic lipid according to formula (III)

[chemical structure]

or a pharmaceutically acceptable salt, tautomer, prodrug or stereoisomer thereof, wherein, R1 , R2 , R3, L1, L2, G1, G2, and G3 are as below.

[0614] Formula (III) is further defined in that: one of L¹ or L² is —O(C═O)—, —(C═O)O—, —C(═O)—, —O—, —S(O)ₓ—, —S—S—, —C(═O)S—, SC(═O)—, —NR^{a}C(═O)—, —C(═O)NR^{a}—, —NR^{a}C(═O)NR^{a}—, —OC(═O)NR^{a}—or —NR^{a}C(═O)O—, and the other of L¹ or L² is —O(C═O)—, —(C═O)O—, —C(═O)—, —O—, —S(O)ₓ—, —S—S—, —C(═O)S—, SC(═O)—, —NR^{a}C(═O)—, —C(═O)NR^{a}—, —NR^{a}C(═O)NR^{a}—, —OC(═O)NR^{a}— or —NR^{a}C(═O)O—or a direct bond;
[0615] G¹ and G² are each independently unsubstituted C₁-C₁₂ alkylene or C₁-C₁₂ alkenylene;
[0616] G³ is C₁-C₂₄ alkylene, alkenylene, C₃-C₈ cycloalkylene, C₃-C₈ cycloalkenylene;
[0617] R^{a} is H or C₁-C₁₂ alkyl;
[0618] R¹ and R² are each independently C₆-C₂₄ alkyl or C₆-C₂₄ alkenyl;
[0619] R³ is H, OR⁵, CN, —C(═O)OR⁴, —OC(═O)R⁴ or —NR⁵C(═O)R⁴;
[0620] R⁴ is C₁-C₁₂ alkyl;
[0621] R⁵ is H or C₁-C₆ alkyl; and
[0622] x is 0, 1 or 2.

[0623] In some of the foregoing embodiments of formula (III), the lipid has one of the following structures (IIIA) or (IIIB):

[chemical structure]

[0624] wherein:

[0625] A is a 3 to 8-membered cycloalkyl or cycloalkylene ring; R⁶ is, at each occurrence, independently H, OH or C₁-C₂₄ alkyl; n is an integer ranging from 1 to 15.

[0626] In some of the foregoing embodiments of formula (III), the lipid has structure (IIIA), and in other embodiments, the lipid has structure (IIIB).

[0627] In other embodiments of formula (III), the lipid has one of the following structures (IIIC) or (IIID):

[chemical structure]

[0628] wherein y and z are each independently integers ranging from 1 to 12.

[0629] In any of the foregoing embodiments of formula (III), one of L¹ or L² is —O(C═O)—. E.g., in some embodiments each of L¹ and L² are —O(C═O)—. In some different embodiments of any of the foregoing, Land L² are each independently —(C═O)O— or —O(C═O)—. E.g., in some embodiments each of L¹ and L² is —(C═O)O—.

[0630] In preferred embodiments of the second aspect, the cationic lipid of the LNP is a compound of formula III, wherein:

[0631] L¹ and L² are each independently —O(C═O)— or (C═O)—O—;

[0632] G³ is C₁-C₂₄ alkylene or C₁-C₂₄ alkenylene; and

[0633] R³ is H or OR⁵.

[0634] In some different embodiments of formula (III), the lipid has one of the following structures (IIIE) or (IIIF):

[chemical structure]

[0635] In some of the foregoing embodiments of formula (III), the lipid has one of the following structures (IIIG), (IIIH), (IIII), or (IIIJ):

[chemical structure]

[0636] In some of the foregoing embodiments of formula (III), n is an integer ranging from 2 to 12, e.g. from 2 to 8 or from 2 to 4. In some embodiments, n is 3, 4, 5 or 6. In some embodiments, n is 3. In some embodiments, n is 4. In some embodiments, n is 5. In some embodiments, n is 6. In some other of the foregoing embodiments of formula (III), y and z are each independently an integer ranging from 2 to 10. E.g., in some embodiments, y and z are each independently an integer ranging from 4 to 9 or from 4 to 6. In some of the foregoing embodiments of formula (III), R⁶ is H. In other of the foregoing embodiments, R⁶ is C₁-C₂₄ alkyl. In other embodiments, R⁶ is OH. In some embodiments of formula (III), G³ is unsubstituted. In other embodiments, G3 is substituted. In various different embodiments, G³ is linear C₁-C₂₄ alkylene or linear C₁-C₂₄ alkenylene. In some other foregoing embodiments of formula (III), R¹ or R², or both, is C₆-C₂₄ alkenyl. E.g., in some embodiments, R¹ and R² each, independently have the following structure:

[chemical structure]

[0637] wherein:

[0638] R⁷¹ and R^{7b} are, at each occurrence, independently H or C₁-C₁₂ alkyl; and a is an integer from 2 to 12, wherein

[0639] R^{7a}, R^{7b} and a are each selected such that R¹ and R² each independently comprise from 6 to 20 carbon atoms. E.g., in some embodiments a is an integer ranging from 5 to 9 or from 8 to 12. In some of the foregoing embodiments of formula (III), at least one occurrence of R^{7a} is H. In some embodiments, R^{7a} is H at each occurrence. In other different embodiments of the foregoing, at least one occurrence of R^{7b} is C₁-C₈ alkyl. E.g., in some embodiments, C₁-C₈ alkyl is methyl, ethyl, n-propyl, iso-propyl, n-butyl, iso-butyl, tert-butyl, n-hexyl or n-octyl.

[0640] In different embodiments of formula (III), R¹ or R², or both, has one of the following structures:

[chemical structure]

[0641] In preferred embodiments of the second aspect, the cationic lipid of the LNP is a compound of formula III, wherein:
[0642] L¹ and L² are each independently —O(C═O)— or (C═O)—O—; and
[0643] R¹ and R² each independently have one of the following structures:

[chemical structure]

[0644] In some of the foregoing embodiments of formula (III), R³ is OH, CN, —C(═O)OR⁴, —OC(═O)R⁴ or —NHC(═O)R⁴.

[0645] In some embodiments, R⁴ is methyl or ethyl.

[0646] In preferred embodiments of the second aspect, the cationic lipid of the LNP is a compound of formula III, wherein R³ is OH.

[0647] In particularly preferred embodiment of the second aspect, the at least one RNA is complexed with one or more lipids thereby forming LNPs, wherein the cationic lipid of the LNP is selected from structures III-1 to III-36 (see Table 6).

TABLE 6
Representative lipid compounds derived from formula (III)

| No. | Structure |
|---|---|
| III-1 | [chemical structure] |
| III-2 | [chemical structure] |
| III-3 | [chemical structure] |
| III-4 | [chemical structure] |
| III-5 | [chemical structure] |
| III-6 | [chemical structure] |
| III-7 | [chemical structure] |
| III-8 | [chemical structure] |
| III-9 | [chemical structure] |
| III-10 | [chemical structure] |
| III-11 | [chemical structure] |
| III-12 | [chemical structure] |
| III-13 | [chemical structure] |
| III-14 | [chemical structure] |
| III-15 | [chemical structure] |
| III-16 | [chemical structure] |
| III-17 | [chemical structure] |
| III-18 | [chemical structure] |
| III-19 | [chemical structure] |
| III-20 | [chemical structure] |
| III-21 | [chemical structure] |
| III-22 | [chemical structure] |
| III-23 | [chemical structure] |
| III-24 | [chemical structure] |
| III-25 | [chemical structure] |
| III-26 | [chemical structure] |
| III-27 | [chemical structure] |
| III-28 | [chemical structure] |
| III-29 | [chemical structure] |
| III-30 | [chemical structure] |
| III-31 | [chemical structure] |
| III-32 | [chemical structure] |
| III-33 | [chemical structure] |
| III-34 | [chemical structure] |
| III-35 | [chemical structure] |
| III-36 | [chemical structure] |

[0648] In some embodiments, the LNP comprises a lipid of formula (III), at least one RNA of the first aspect, and one or more excipient selected from neutral lipids, steroids and PEGylated lipids. In some embodiments the lipid of formula (III) is compound III-3. In some embodiments the lipid of formula (III) is compound III-7.

[0649] In preferred embodiments, the LNP comprises a cationic lipid selected from:

[chemical structure]

[0650] In particularly preferred embodiment of the second aspect, the at least one RNA is complexed with one or more lipids thereby forming LNPs, wherein the LNP comprises the following cationic lipid (lipid according to formula III-3 of Table 6):

[chemical structure]

[0651] In certain embodiments, the cationic lipid as defined herein, preferably as disclosed in Table 6, more preferably cationic lipid compound III-3, is present in the LNP in an amount from about 30 to about 95 mole percent, relative to the total lipid content of the LNP. If more than one cationic lipid is incorporated within the LNP, such percentages apply to the combined cationic lipids.

[0652] In one embodiment, the cationic lipid is present in the LNP in an amount from about 30 to about 70 mole percent. In one embodiment, the cationic lipid is present in the LNP in an amount from about 40 to about 60 mole percent, such as about 40, 41, 42, 43, 44, 45, 46, 47, 48, 49, 50, 51, 52, 53, 54, 55, 56, 57, 58, 59 or 60 mole percent, respectively. In embodiments, the cationic lipid is present in the LNP in an amount from about 47 to about 48 mole percent, such as about 47.0, 47.1, 47.2, 47.3, 47.4, 47.5, 47.6, 47.7, 47.8, 47.9, 50.0 mole percent, respectively, wherein 47.7 mole percent are particularly preferred.

[0653] In some embodiments, the cationic lipid is present in a ratio of from about 20 mol % to about 70 or 75 mol % or from about 45 to about 65 mol % or about 20, 25, 30, 35, 40, 45, 50, 55, 60, 65, or about 70 mol % of the total lipid present in the LNP. In further embodiments, the LNPs comprise from about 25% to about 75% on a molar basis of cationic lipid, e.g., from about 20 to about 70%, from about 35 to about 65%, from about 45 to about 65%, about 60%, about 57.5%, about 57.1%, about 50% or about 40% on a molar basis (based upon 100% total moles of lipid in the LNP). In some embodiments, the ratio of cationic lipid to RNA is from about 3 to about 15, such as from about 5 to about 13 or from about 7 to about 11.

[0654] In some embodiments of the invention the LNP comprises a combination or mixture of any the lipids described above.

[0655] Other suitable (cationic) lipids are disclosed in WO2009/086558, WO2009/127060, WO2010/048536, WO2010/054406, WO2010/088537, WO2010/129709, WO2011/153493, US2011/0256175, US2012/0128760, US2012/0027803, US8158601, WO2016/118724, WO2016/118725, WO2017/070613, WO2017/070620, WO2017/099823, and WO2017/112865. In that context, the disclosures of WO2009/086558, WO2009/127060, WO2010/048536, WO2010/054406, WO2010/088537, WO2010/129709, WO2011/153493, US2011/0256175, US2012/0128760, US2012/0027803, US8158601, WO2016/118724, WO2016/118725, WO2017/070613, WO2017/070620, WO2017/099823, and WO2017/112865 specifically relating to (cationic) lipids suitable for LNPs are incorporated herewith by reference.

[0656] In some embodiments, the lipid is selected from the group consisting of 98N12-5, C12-200, and ckk-E12.

[0657] In some embodiments, amino or cationic lipids as defined herein have at least one protonatable or deprotonatable group, such that the lipid is positively charged at a pH at or below physiological pH (e.g. pH 7.4), and neutral at a second pH, preferably at or above physiological pH. It will, of course, be understood that the addition or removal of protons as a function of pH is an equilibrium process, and that the reference to a charged or a neutral lipid refers to the nature of the predominant species and does not require that all of lipids have to be present in the charged or neutral form. Lipids having more than one protonatable or deprotonatable group, or which are zwitterionic, are not excluded and may likewise suitable in the context of the present invention.

[0658] In some embodiments, the protonatable lipids have a pKa of the protonatable group in the range of about 4 to about 11, e.g., a pKa of about 5 to about 7.

[0659] LNPs can comprise two or more (different) cationic lipids. The cationic lipids may be selected to contribute different advantageous properties. E.g., cationic lipids that differ in properties such as amine pKa, chemical stability, half-life in circulation, half-life in tissue, net accumulation in tissue, or toxicity can be used in the LNP. In particular, the cationic lipids can be chosen so that the properties of the mixed-LNP are more desirable than the properties of a single-LNP of individual lipids.

[0660] The amount of the permanently cationic lipid or lipidoid may be selected taking the amount of the nucleic acid cargo into account. In one embodiment, these amounts are selected such as to result in an N/P ratio of the nanoparticle(s) or of the composition in the range from about 0.1 to about 20. In this context, the N/P ratio is defined as the mole ratio of the nitrogen atoms (“N”) of the basic nitrogen-containing groups of the lipid or lipidoid to the phosphate groups (“P”) of the RNA which is used as cargo. The N/P ratio may be calculated on the basis that e.g. lug RNA typically contains about 3 nmo1 phosphate residues, provided that the RNA exhibits a statistical distribution of bases. The “N”-value of the lipid or lipidoid may be calculated on the basis of its molecular weight and the relative content of permanently cationic and—if present—cationisable groups.

[0661] LNP in vivo characteristics and behavior can be modified by addition of a hydrophilic polymer coating, e.g. polyethylene glycol (PEG), to the LNP surface to confer steric stabilization. Furthermore, LNPs can be used for specific targeting by attaching ligands (e.g. antibodies, peptides, and carbohydrates) to its surface or to the terminal end of the attached PEG chains (e.g. via PEGylated lipids or PEGylated cholesterol).

[0662] In some embodiments, the LNPs comprise a polymer conjugated lipid. The term “polymer conjugated lipid” refers to a molecule comprising both a lipid portion and a polymer portion. An example of a polymer conjugated lipid is a PEGylated lipid. The term “PEGylated lipid” refers to a molecule comprising both a lipid portion and a polyethylene glycol portion. PEGylated lipids are known in the art and include 1-(monomethoxy-polyethyleneglycol)-2,3-dimyristoylglycerol (PEG-s-DMG) and the like.

[0663] In certain embodiments, the LNP comprises an additional, stabilizing-lipid which is a polyethylene glycol-lipid (PEGylated lipid). Suitable polyethylene glycol-lipids include PEG-modified phosphatidylethanolamine, PEG-modified phosphatidic acid, PEG-modified ceramides (e.g. PEG-CerC14 or PEG-CerC20), PEG-modified dialkylamines, PEG-modified diacylglycerols, PEG-modified dialkylglycerols. Representative polyethylene glycol-lipids include PEG-c-DOMG, PEG-c-DMA, and PEG-s-DMG. In one embodiment, the polyethylene glycol-lipid is N-[(methoxy poly(ethylene glycol)2000)carbamyI]-1,2-dimyristyloxlpropyl-3-amine (PEG-c-DMA). In a preferred embodiment, the polyethylene glycol-lipid is PEG-2000-DMG. In one embodiment, the polyethylene glycol-lipid is PEG-c-DOMG). In other embodiments, the LNPs comprise a PEGylated diacylglycerol (PEG-DAG) such as 1-(monomethoxy-polyethyleneglycol)-2,3-dimyristoylglycerol (PEG-DMG), a PEGylated phosphatidylethanoloamine (PEG-PE), a PEG succinate diacylglycerol (PEG-S-DAG) such as 4-O-(2′,3′-di(tetradecanoyloxy)propyl-1-O-(ω-methoxy(polyethoxy)ethyl)butanedioate (PEG-S-DMG), a PEGylated ceramide (PEG-cer), or a PEG dialkoxypropylcarbamate such as w-methoxy(polyethoxy)ethyl-N-(2,3di(tetradecanoxy)propyl)carbamate or 2,3-di(tetradecanoxy)propyl-N-(ω-methoxy(polyethoxy)ethyl)carbamate.

[0664] In preferred embodiments of the second aspect, the at least one RNA is complexed with one or more lipids thereby forming LNPs, wherein the LNP additionally comprises a PEGylated lipid with the formula (IV):

[chemical structure]

or a pharmaceutically acceptable salt, tautomer or stereoisomer thereof, wherein R⁸ and R⁹ are each independently a straight or branched, saturated or unsaturated alkyl chain containing from 10 to 30 carbon atoms, wherein the alkyl chain is optionally interrupted by one or more ester bonds; and w has mean value ranging from 30 to 60.

[0665] In some of the foregoing embodiments of the PEGylated lipid according to formula (IV), R⁸ and R⁹ are not both n-octadecyl when w is 42. In some other embodiments, R⁸ and R⁹ are each independently a straight or branched, saturated or unsaturated alkyl chain containing from 10 to 18 carbon atoms. In some embodiments, R⁸ and R⁹ are each independently a straight or branched, saturated or unsaturated alkyl chain containing from 12 to 16 carbon atoms. In some embodiments, R⁸ and R⁹ are each independently a straight or branched, saturated or unsaturated alkyl chain containing 12 carbon atoms. In some embodiments, R⁸ and R⁹ are each independently a straight or branched, saturated or unsaturated alkyl chain containing 14 carbon atoms. In other embodiments, R⁸ and R⁹ are each independently a straight or branched, saturated or unsaturated alkyl chain containing 16 carbon atoms. In still more embodiments, R⁸ and R⁹ are each independently a straight or branched, saturated or unsaturated alkyl chain containing 18 carbon atoms. In still other embodiments, R⁸ is a straight or branched, saturated or unsaturated alkyl chain containing 12 carbon atoms and R⁹ is a straight or branched, saturated or unsaturated alkyl chain containing 14 carbon atoms.

[0666] In various embodiments, w spans a range that is selected such that the PEG portion of the PEGylated lipid according to formula (IV) has an average molecular weight of about 400 to about 6000 g/mol. In some embodiments, the average w is about 50.

[0667] In preferred embodiments of the second aspect, R⁸ and R⁹ of the PEGylated lipid according to formula (IV) are saturated alkyl chains.

[0668] In a particularly preferred embodiment of the second aspect, the at least one RNA is complexed with one or more lipids thereby forming LNPs, wherein the LNP additionally comprises a PEGylated lipid, wherein the PEG lipid is of formula (IVa)

[chemical structure]

[0669] wherein n has a mean value ranging from 30 to 60, such as about 28 to about 32, about 30 to about 34, 32 to about 36, about 34 to about 38, 36 to about 40, about 38 to about 42, 40 to about 44, about 42 to about 46, 44 to about 48, about 46 to about 50, 48 to about 52, about 50 to about 54, 52 to about 56, about 54 to about 58, 56 to about 60, about 58 to about 62. In preferred embodiments, n is about 45, 46, 47, 48, 49, 50, 51, 52, 53, 54. In a most preferred embodiment n has a mean value of 49.

[0670] In other embodiments, the PEGylated lipid has one of the following structures:

[chemical structure]

[0671] wherein n is an integer selected such that the average molecular weight of the PEGylated lipid is about 2500g/mol, most preferably n is about 49.

[0672] Further examples of PEG-lipids suitable in that context are provided in US2015/0376115A1 and WO2015/199952, each of which is incorporated by reference in its entirety.

[0673] In some embodiments, LNPs include less than about 3, 2, or 1 mole percent of PEG or PEG-modified lipid, based on the total moles of lipid in the LNP. In further embodiments, LNPs comprise from about 0.1% to about 20% of the PEG-modified lipid on a molar basis, e.g., about 0.5 to about 10%, about 0.5 to about 5%, about 10%, about 5%, about 3.5%, about 3%, about 2,5%, about 2%, about 1.5%, about 1%, about 0.5%, or about 0.3% on a molar basis (based on 100% total moles of lipids in the LNP). In preferred embodiments, LNPs comprise from about 1.0% to about 2.0% of the PEG-modified lipid on a molar basis, e.g., about 1.2 to about 1.9%, about 1.2 to about 1.8%, about 1.3 to about 1.8%, about 1.4 to about 1.8%, about 1.5 to about 1.8%, about 1.6 to about 1.8%, in particular about 1.4%, about 1.5%, about 1.6%, about 1.7%, about 1.8%, about 1.9%, most preferably 1.7% (based on 100% total moles of lipids in the LNP). In various embodiments, the molar ratio of the cationic lipid to the PEGylated lipid ranges from about 100:1 to about 25:1.

[0674] In preferred embodiments, the LNP additionally comprises one or more additional lipids which stabilize the formation of particles during their formation (e.g. neutral lipid and/or one or more steroid or steroid analogue).

[0675] In preferred embodiments of the second aspect, the RNA is complexed with one or more lipids thereby forming LNPs, wherein the LNP additionally comprises one or more neutral lipid and/or one or more steroid or steroid analogue.

[0676] Suitable stabilizing lipids include neutral lipids and anionic lipids. The term “neutral lipid” refers to any one of a number of lipid species that exist in either an uncharged or neutral zwitterionic form at physiological pH. Representative neutral lipids include diacylphosphatidylcholines, diacylphosphatidylethanolamines, ceram ides, sphingomyelins, dihydro sphingomyelins, cephalins, and cerebrosides.

[0677] In embodiments of the second aspect, the LNP additionally comprises one or more neutral lipids, wherein the neutral lipid is selected from the group comprising distearoylphosphatidylcholine (DSPC), dioleoylphosphatidylcholine (DOPC), dipalmitoylphosphatidylcholine (DPPC), dioleoylphosphatidylglycerol (DOPG), dipalmitoylphosphatidylglycerol (DPPG), dioleoyl-phosphatidylethanolamine (DOPE), palmitoyloleoylphosphatidylcholine (POPC), palmitoyloleoyl-phosphatidylethanolamine (POPE) and dioleoyl- phosphatidylethanolamine 4-(N-maleimidomethyl)-cyclohexane-1carboxylate (DOPE-mal), dipalmitoyl phosphatidyl ethanolamine (DPPE), dimyristoylphosphoethanolamine (DMPE), distearoyl-phosphatidylethanolamine (DSPE), 16-O-monomethyl PE, 16-O-dimethyl PE, 18-1-trans PE, 1-stearioyl-2-oleoylphosphatidyethanol amine (SOPE), and 1,2-dielaidoyl-sn-glycero-3-phophoethanolamine (transDOPE).

[0678] In some embodiments, the LNPs comprise a neutral lipid selected from DSPC, DPPC, DMPC, DOPC, POPC, DOPE and SM. In various embodiments, the molar ratio of the cationic lipid to the neutral lipid ranges from about 2:1 to about 8:1.

[0679] In preferred embodiments of the second aspect, the neutral lipid is 1,2-distearoyl-sn-glycero-3-phosphocholine (DSPC). The molar ratio of the cationic lipid to DSPC may be in the range from about 2:1 to 8:1.

[0680] In preferred embodiments of the second aspect, the steroid is cholesterol. The molar ratio of the cationic lipid to cholesterol may be in the range from about 2:1 to 1:1.

[0681] In some embodiments, the cholesterol may be PEGylated.

[0682] The sterol can be about 10 mol % to about 60 mol % or about 25 mol % to about 40 mol % of the lipid particle.

[0683] In one embodiment, the sterol is about 10, 15, 20, 25, 30, 35, 40, 45, 50, 55, or about 60 mol % of the total lipid present in the lipid particle. In another embodiment, the LNPs include from about 5% to about 50% on a molar basis of the sterol, e.g., about 15% to about 45%, about 20% to about 40%, about 48%, about 40%, about 38.5%, about 35%, about 34.4%, about 31.5% or about 31% on a molar basis (based upon 100% total moles of lipid in the LNP).

[0684] Preferably, LNPs comprise: (a) at least one RNA, (b) a cationic lipid, (c) an aggregation reducing agent (such as polyethylene glycol (PEG) lipid or PEG-modified lipid), (d) optionally a non-cationic lipid (such as a neutral lipid), and (e) optionally, a sterol.

[0685] In some embodiments, the LNPs comprise a lipid of formula (III), at least one RNA as defined herein, a neutral lipid, a steroid and a PEGylated lipid. In preferred embodiments, the lipid of formula (III) is lipid compound III-3, the neutral lipid is DSPC, the steroid is cholesterol, and the PEGylated lipid is the compound of formula (IVa).

[0686] In a preferred embodiment of the second aspect, the LNP consists essentially of (i) at least one cationic lipid; (ii) a neutral lipid; (iii) a sterol, e.g. , cholesterol; and (iv) a PEG-lipid, e.g. PEG-DMG or PEG-cDMA, in a molar ratio of about 20-60% cationic lipid: 5-25% neutral lipid: 25-55% sterol; 0.5-15% PEG-lipid.

[0687] In particularly preferred embodiments of the second aspect, the at least one RNA is complexed with one or more lipids thereby forming LNPs, wherein the LNP essentially consists of
[0688] (i) at least one cationic lipid as defined herein, preferably a lipid of formula (III), more preferably lipid III-3;
[0689] (ii) a neutral lipid as defined herein, preferably 1,2-distearoyl-sn-glycero-3-phosphocholine (DSPC);
[0690] (iii) a steroid or steroid analogue as defined herein, preferably cholesterol; and
[0691] (iv) a PEG-lipid as defined herein, e.g. PEG-DMG or PEG-cDMA, preferably a PEGylated lipid of formula (IVa),
[0692] wherein (i) to (iv) are in a molar ratio of about 20-60% cationic lipid: 5-25% neutral lipid: 25-55% sterol; 0.5-15% PEG-lipid.

[0693] In one preferred embodiment, the LNP comprises: a cationic lipid with formula (III) and/or PEG lipid with formula (IV), optionally a neutral lipid, preferably 1,2-distearoyl-sn-glycero-3-phosphocholine (DSPC) and optionally a steroid, preferably cholesterol, wherein the molar ratio of the cationic lipid to DSPC is optionally in the range from about 2:1 to 8:1, wherein the molar ratio of the cationic lipid to cholesterol is optionally in the range from about 2:1 to 1:1.

[0694] In a particular preferred embodiment, the composition of the second aspect comprising at least one RNA of the first aspect comprises LNPs, which have a molar ratio of approximately 50:10:38.5:1.5, preferably 47.5:10:40.8:1.7 or more preferably 47.4:10:40.9:1.7 (i.e. proportion (mol%) of cationic lipid (preferably lipid III-3), DSPC, cholesterol and PEG-lipid ((preferably PEG-lipid of formula (IVa) with n =49); solubilized in ethanol).

[0695] The total amount of RNA in the LNPs may vary and is defined depending on the e.g. RNA to total lipid w/w ratio. In one embodiment of the invention the RNA to total lipid ratio is less than 0.06 w/w, preferably between 0.03 w/w and 0.04 w/w.

[0696] In various embodiments, the LNP as defined herein have a mean diameter of from about 50 nm to about 200 nm, from about 60 nm to about 200 nm, from about 70 nm to about 200 nm, from about 80 nm to about 200 nm, from about 90 nm to about 200 nm, from about 90 nm to about 190 nm, from about 90 nm to about 180 nm, from about 90 nm to about 170 nm, from about 90 nm to about 160 nm, from about 90 nm to about 150 nm, from about 90 nm to about 140 nm, from about 90 nm to about 130 nm, from about 90 nm to about 120 nm, from about 90 nm to about 100 nm, from about 70 nm to about 90 nm, from about 80 nm to about 90 nm, from about 70 nm to about 80 nm, or about 30 nm, 35 nm, 40 nm, 45 nm, 50 nm, 55 nm, 60 nm, 65 nm, 70 nm, 75 nm, 80 nm, 85 nm, 90 nm, 95 nm, 100 nm, 105 nm, 110 nm, 115 nm, 120 nm, 125 nm, 130 nm, 135 nm, 140 nm, 145 nm, 150 nm, 160 nm, 170 nm, 180 nm, 190 nm, or 200 nm and are substantially non-toxic. As used herein, the mean diameter may be represented by the z-average as determined by dynamic light scattering as commonly known in the art.

[0697] In another preferred embodiment of the invention the lipid nanoparticles have a hydrodynamic diameter in the range from about 50 nm to about 300 nm, or from about 60 nm to about 250 nm, from about 60 nm to about 150 nm, or from about 60 nm to about 120 nm, respectively.

[0698] In embodiments where more than one or a plurality, e.g. 2, 3, 4, 5, 6, 7, 8, 9, 10, 11, 12, 13, 14, 15 of the RNAs of the first aspect are comprised in the composition, said more than one or said plurality e.g. 2, 3, 4, 5, 6, 7, 8, 9, 10, 11, 12, 13, 14, 15 of the RNAs may be complexed within one or more lipids thereby forming LNPs comprising more than one or a plurality, e.g. 2, 3, 4, 5, 6, 7, 8, 9, 10, 11, 12, 13, 14, 15 of different RNAs.

[0699] According to further embodiments, the composition of the second aspect may comprise at least one adjuvant. Suitably, the adjuvant is preferably added to enhance the immunostimulatory properties of the composition.

[0700] The term “adjuvant” as used herein will be recognized and understood by the person of ordinary skill in the art, and is e.g. intended to refer to an agent that may modify, e.g. enhance, the effect of other agents (herein: the effect of the RNA) or that may be suitable to support administration and delivery of the composition. The term “adjuvant” refers to a broad spectrum of substances. Typically, these substances are able to increase the immunogenicity of antigens (herein: antigen is a product of translation provided by the RNA). For example, adjuvants may be recognized by the innate immune systems and, e.g., may elicit an innate immune response. “Adjuvants” typically do not elicit an adaptive immune response. In the context of the invention, adjuvants may enhance the effect of the antigenic peptide or protein provided by the RNA as defined herein. In that context, the at least one adjuvant may be selected from any adjuvant known to a skilled person and suitable for the present case, i.e. supporting the induction of an immune response in a subject.

[0701] Accordingly, the composition of the second aspect may comprise at least one adjuvant, wherein the at least one adjuvant may be suitably selected from any adjuvant provided in WO2016/203025. Adjuvants disclosed in any of the claims 2 to 17 of WO2016/203025, preferably adjuvants disclosed in claim 17 of W02016/203025 are particularly suitable, the specific content relating thereto herewith incorporated by reference.

[0702] The composition of the second aspect may comprise, besides the components specified herein, at least one further component which may be selected from the group consisting of further antigens (e.g. in the form of a peptide or protein) or further antigen-encoding nucleic acids; a further immunotherapeutic agent; one or more auxiliary substances (cytokines, such as monokines, lymphokines, interleukins or chemokines); or any further compound, which is known to be immune stimulating due to its binding affinity (as ligands) to human Toll-like receptors; and/or an adjuvant nucleic acid, preferably an immunostimulatory RNA (isRNA), e.g. CpG-RNA etc.

[0703] Vaccine:

[0704] In a third aspect, the present invention provides a vaccine comprising the RNA of the first aspect or the composition of the second aspect.

[0705] Notably, embodiments relating to the composition of the second aspect may likewise be read on and be understood as suitable embodiments of the vaccine of the third aspect. Also, embodiments relating to the vaccine of the third aspect may likewise be read on and be understood as suitable embodiments of the composition of the second aspect.

[0706] The term “vaccine” will be recognized and understood by the person of ordinary skill in the art, and is e.g. intended to be a prophylactic or therapeutic material providing at least one epitope or antigen, preferably an immunogen. In the context of the invention the antigen or antigenic function is provided by the inventive RNA of the first aspect, or the composition of the second aspect (comprising at least one RNA of the first aspect)

[0707] In preferred embodiments of the third aspect, the vaccine comprises the RNA of the first aspect, the composition of the second aspect wherein said RNA or said composition elicits an adaptive immune response.

[0708] In particularly preferred embodiments, the vaccine comprises the RNA of the first aspect or the composition of the second aspect wherein said RNA or said composition elicits an adaptive immune response, preferably an adaptive immune response against LASV.

[0709] According to a preferred embodiment of the third aspect, the vaccine as defined herein may further comprise a pharmaceutically acceptable carrier and optionally at least one adjuvant as specified in the context of the second aspect.

[0710] Suitable adjuvants in that context may be selected from adjuvants disclosed in claim 17 of WO2016/203025.

[0711] In a preferred embodiment, the vaccine is a monovalent vaccine.

[0712] In embodiments the vaccine is a polyvalent vaccine comprising a plurality or at least more than one of the RNAs as defined in the context of the first aspect. Embodiments relating to a polyvalent composition as disclosed in the context of the second aspect may likewise be read on and be understood as suitable embodiments of the polyvalent vaccine of the third aspect. In a preferred embodiment, the vaccine is a tetravalent vaccine

[0713] Said tetravalent vaccine may suitably comprise one RNA species encoding a GPC or prefusion-stabilized GPC construct, wherein the GPC or prefusion-stabilized GPC is or is derived from a clade I LASV; one RNA species encoding a GPC or prefusion-stabilized GPC construct, wherein the GPC or prefusion-stabilized GPC is or is derived from a clade II LASV, one RNA species encoding a GPC or prefusion-stabilized GPC construct, wherein the GPC or prefusion-stabilized GPC is or is derived from a clade III LASV, and one RNA species encoding a GPC or prefusion-stabilized GPC construct, wherein the GPC or prefusion-stabilized GPC is or is derived from a clade IV LASV.

[0714] Embodiments relating to a tetravalent composition as described in the context of the second aspect may likewise be read on and be understood as suitable embodiments of the tetravalent vaccine.

[0715] The vaccine of the third aspect typically comprises a safe and effective amount of the RNA as specified herein. As used herein, “safe and effective amount” means an amount of the RNA that is sufficient to significantly induce a positive modification of a disease or disorder related to an infection with a LASV. At the same time, a “safe and effective amount” is small enough to avoid serious side-effects. In relation to the vaccine or composition of the present invention, the expression “safe and effective amount” preferably means an amount of the RNA that is suitable for stimulating the adaptive immune system in such a manner that no excessive or damaging immune reactions are achieved but, preferably, also no such immune reactions below a measurable level.

[0716] A “safe and effective amount” of the RNA of the composition or vaccine as defined above will furthermore vary in connection with the particular condition to be treated and also with the age and physical condition of the patient to be treated, the severity of the condition, the duration of the treatment, the nature of the accompanying therapy, of the particular pharmaceutically acceptable carrier used, and similar factors, within the knowledge and experience of the accompanying medical doctor. Moreover, the “safe and effective amount” of the RNA, the composition, the vaccine may depend from application route (intradermal, intramuscular), application device (jet injection, needle injection, microneedle patch) and/or complexation (protamine complexation or LNP encapsulation). Moreover, the “safe and effective amount” of the RNA, the composition, the vaccine may depend from the condition of the treated subject (infant, pregnant women, immunocompromised human subject etc.). Accordingly, the suitable “safe and effective amount” has to be adapted accordingly and will be chosen and defined by the skilled person.

[0717] The vaccine can be used according to the invention for human medical purposes and also for veterinary medical purposes (mammals, vertebrates, avian species), as a pharmaceutical composition, or as a vaccine.

[0718] In a preferred embodiment, the RNA, the composition, or the vaccine is provided in lyophilized form (using e.g. lyophilisation methods as described in WO2016/165831, WO2011/069586, WO2016/184575 or WO2016/184576). Preferably, the lyophilized RNA, the lyophilized composition, or the lyophilized vaccine is reconstituted in a suitable buffer, advantageously based on an aqueous carrier, prior to administration, e.g. Ringer-Lactate solution or a phosphate buffer solution.

[0719] Accordingly, the pharmaceutically acceptable carrier as used herein preferably includes the liquid or non-liquid basis of the inventive vaccine. If the inventive vaccine is provided in liquid form, the carrier will be water, typically pyrogen-free water; isotonic saline or buffered (aqueous) solutions, e.g. phosphate, citrate etc. buffered solutions. Preferably, Ringer-Lactate solution is used as a liquid basis for the vaccine or the composition according to the invention as described in WO2006/122828, the disclosure relating to suitable buffered solutions incorporated herewith by reference.

[0720] The choice of a pharmaceutically acceptable carrier as defined herein may be determined by the manner in which the vaccine is administered. The vaccine or composition may be administered, e.g., systemically or locally. Routes for systemic administration in general include, e.g., transdermal, oral, parenteral routes, including subcutaneous, intravenous, intramuscular, intra-arterial, intradermal and intraperitoneal injections and/or intranasal administration routes. Routes for local administration in general include, e.g., topical administration routes but also intradermal, transdermal, subcutaneous, or intramuscular injections or intralesional, intracranial, intrapulmonal, intracardial, intraarticular and sublingual injections. More preferably, compositions or vaccines according to the present invention may be administered by an intradermal, subcutaneous, or intramuscular route, preferably by injection, which may be needle-free and/or needle injection. Compositions/vaccines are therefore preferably formulated in liquid or solid form. The suitable amount of the vaccine or composition according to the invention to be administered can be determined by routine experiments, e.g. by using animal models (e.g. rabbit, ferret, sheep, mouse, rat, dog and non-human primate). Preferred unit dose forms for injection include sterile solutions of water, physiological saline or mixtures thereof. The pH of such solutions should be adjusted to about 7.4. Suitable carriers for injection include hydrogels, devices for controlled or delayed release, polylactic acid and collagen matrices. Suitable pharmaceutically acceptable carriers for topical application include those which are suitable for use in lotions, creams, gels and the like. If the inventive composition or vaccine is to be administered perorally, tablets, capsules and the like are the preferred unit dose form. The pharmaceutically acceptable carriers for the preparation of unit dose forms which can be used for oral administration are well known in the prior art.

[0721] The inventive vaccine or composition as defined herein can additionally comprise one or more auxiliary substances as defined above in order to further increase the immunogenicity. A synergistic action of the RNA contained in the vaccine or compositionand of an auxiliary substance, which may be optionally be co- formulated (or separately formulated) with the inventive vaccine or composition as described above, is preferably achieved thereby. Such immunogenicity increasing agents or compounds may be provided separately (not co-formulated with the inventive vaccine or composition) and administered individually.

[0722] Further additives which may be included in the vaccine or composition are emulsifiers, such as for example, tween; wetting agents, such as, for example, sodium lauryl sulfate; colouring agents; taste-imparting agents, pharmaceutical carriers; tablet-forming agents; stabilizers; antioxidants; preservatives.

[0723] Kit or Kit of Parts, Application, Medical Uses, Method of Treatment:

[0724] In a fourth aspect, the present invention provides a kit or kit of parts, wherein the kit or kit of parts comprises the RNA of the first aspect, the composition of the second aspect, and/or the vaccine of the third aspect, optionally comprising a liquid vehicle for solubilising, and optionally technical instructions providing information on administration and dosage of the components.

[0725] In a preferred embodiment, the kit or kit of parts of the fourth aspect comprises at least the following components
[0726] a) at least one RNA of the first aspect, preferably encoding at least one antigenic peptide or protein derived from a LASV GPC, most preferably an RNA selected from Table 2 or Table 3.13, wherein said RNA is preferably complexed with one or more lipids thereby forming lipid nanoparticles (LNP); and
[0727] b) at least one, two, or three further RNA encoding an antigenic peptide or protein derived from LASV NP or LASV Z, most preferably an RNA selected from Table 4, 4.1-4.3 or 5, wherein said further RNA is preferably complexed with one or more lipids thereby forming lipid nanoparticles (LNP),
[0728] wherein components a) and b) are provided as separate entities or as a single entity.

[0729] In a preferred embodiment, the kit or kit of parts of the fourth aspect comprises at least the following components
[0730] c) at least one RNA of the first aspect, preferably encoding at least one antigenic peptide or protein derived from a LASV prefusion-stabilized GPC, most preferably an RNA selected from Table 3.1-3.12, wherein said RNA is preferably complexed with one or more lipids thereby forming lipid nanoparticles (LNP); and
[0731] d) at least one, two, or three further RNA encoding an antigenic peptide or protein derived from LASV NP or LASV Z, most preferably an RNA selected from Table 4, 4.1-4.3 or 5, wherein said further RNA is preferably complexed with one or more lipids thereby forming lipid nanoparticles (LNP), wherein components a) and b) are provided as separate entities or as a single entity.

[0732] In a preferred embodiment, the kit or kit of parts of the fourth aspect comprises at least the following components
[0733] a) at least one RNA of the first aspect, preferably encoding at least one antigenic peptide or protein derived from a LASV GPC or prefusion-stabilized GPC, wherein said RNA is preferably complexed with one or more lipids thereby forming lipid nanoparticles (LNP); and
[0734] b) at least one further RNA encoding an antigenic peptide or protein derived from LASV NP (or SP-NP), wherein said further RNA is preferably complexed with one or more lipids thereby forming lipid nanoparticles (LNP); and
[0735] c) at least one further RNA encoding an antigenic peptide or protein derived from LASV Z, wherein said further RNA is preferably complexed with one or more lipids thereby forming lipid nanoparticles (LNP), wherein components a), b) and c) are provided as separate entities or as a single entity.

[0736] The antigenic peptide(s) or protein(s) may be derived from different LASV clades, in particular from clade I, II, III, IV, V, or VI and/or from a LASV of lineage I, II, III, IV, V, or VI (see List 1-6 and Table A). Such embodiments may have the advantage that the components of the kit or kit of parts, when administered to the subject, provide broad protection against different LASV clades which is important in the context of an effective LASV vaccine.

[0737] The kit or kit of parts may further comprise additional components as described in the context of the composition of the second aspect or the vaccine of the third aspect.

[0738] The technical instructions of said kit or kit of parts may comprise information about administration and dosage and patient groups. Such kits, preferably kits of parts, may be applied e.g. for any of the applications or uses mentioned herein, preferably for the use of the RNA of the first aspect, the composition of the second aspect, the vaccine of the third aspect, for the treatment or prophylaxis of an infection or diseases caused by LASV or disorders related thereto. Preferably, the RNA of the first aspect, the composition of the second aspect, the vaccine of the third aspect is provided in a separate part of the kit, wherein the RNA of the first aspect, the composition of the second aspect, or the vaccine of the third aspect is preferably lyophilised. The kit may further contain as a part a vehicle (e.g. buffer solution) for solubilising the RNA of the first aspect, the composition of the second aspect, or the vaccine of the third aspect.

[0739] In preferred embodiments, the kit or kit of parts as defined herein comprises Ringer lactate solution.

[0740] Any of the above kits may be used in a treatment or prophylaxis as defined herein. More preferably, any of the above kits may be used as a vaccine, preferably a vaccine against infections caused by LASV as defined herein.

[0741] Medical Use:

[0742] In a further aspect, the present invention relates to the first medical use of the RNA of the first aspect, the composition of the second aspect, the vaccine of the third aspect, or the kit or kit of parts of the fourth aspect.

[0743] Accordingly, the RNA of the first aspect, the composition of the second aspect, the vaccine of the third aspect, or the kit or kit of parts of the fourth aspect is for use as a medicament.

[0744] The present invention furthermore provides several applications and uses of the RNA of the first aspect, the composition of the second aspect, the vaccine of the third aspect, or the kit or kit of parts of the fourth aspect.

[0745] In particular, said RNA, composition, vaccine, kit or kit of parts may be used for human medical purposes and also for veterinary medical purposes, preferably for human medical purposes.

[0746] In another aspect, the present invention relates to the second medical use of the RNA of the first aspect, the composition of the second aspect, the vaccine of the third aspect, or the kit or kit of parts of the fourth aspect.

[0747] Accordingly, the RNA of the first aspect, the composition of the second aspect, the vaccine of the third aspect, or the kit or kit of parts of the fourth aspect is for use in the treatment or prophylaxis of an infection with LASV, or a disorder related to such an infection.

[0748] In particular, the RNA of the first aspect, the composition of the second aspect, the vaccine of the third aspect, or the kit or kit of parts of the fourth aspect may be used in the treatment or prophylaxis of an infection with LASV, or a disorder related to such an infection for human and also for veterinary medical purposes, preferably for human medical purposes.

[0749] As used herein, “a disorder related to a LASV infection” may preferably comprise a typical symptom or a complication of an LASV infection.

[0750] Particularly, the RNA of the first aspect, the composition of the second aspect, the vaccine of the third aspect, or the kit or kit of parts of the fourth aspect may be used in a method of prophylactic (pre-exposure prophylaxis or post-exposure prophylaxis) and/or therapeutic treatment of infections caused by LASV.

[0751] The composition, vaccine, or the kit or kit of parts as defined herein may preferably be administered locally, in particular, by an intradermal, subcutaneous, intranasal, or intramuscular route. Inventive compositions or vaccines of the invention are therefore preferably formulated in liquid (or sometimes in solid) form. In embodiments, composition, vaccine, or the kit or kit of parts may be administered by conventional needle injection or needle-free jet injection. Preferred in that context is the RNA, the composition, the vaccine is administered by intramuscular needle injection.

[0752] The term “jet injection”, as used herein, refers to a needle-free injection method, wherein a fluid (composition, vaccine,) containing e.g. at least one RNA of the first aspect is forced through an orifice, thus generating an ultra-fine liquid stream of high pressure that is capable of penetrating mammalian skin and, depending on the injection settings, subcutaneous tissue or muscle tissue. In principle, the liquid stream perforates the skin, through which the liquid stream is pushed into the target tissue. Preferably, jet injection is used for intradermal, subcutaneous or intramuscular injection of the RNA, the compositions, the vaccines disclosed herein.

[0753] In embodiments, the RNA as comprised in a composition, vaccine, kit or kit of parts as defined herein is provided in an amount of about 100 ng to about 500 ug, about 1 ug to about 200 ug, about 1 ug to about 100 ug, about 5 ug to about 100 ug, about 10 ug to about 50 ug, specifically, in an amount of about 5 ug, 10 ug, 15 ug, 20 ug, 25 ug, 30 ug, 35 ug, 40 ug, 45 ug, 50 ug, 55 ug, 60 ug, 65 ug, 70 ug, 75 ug, 80 ug, 85 ug, 90 ug, 95 ug or 100 ug.

[0754] Depending from application route (intradermal, intramuscular, intranasal), application device (jet injection, needle injection, microneedle patch) and/or complexation (preferably LNP encapsulation) the suitable amount has to be adapted accordingly and will be chosen and defined by the skilled person.

[0755] The immunization protocol for the treatment or prophylaxis of an infection as defined herein, i.e. the immunization of a subject against a LASV, typically comprises a series of single doses or dosages of the composition or the vaccine. A single dosage, as used herein, refers to the initial/first dose, a second dose or any further doses, respectively, which are preferably administered in order to “boost” the immune reaction.

[0756] In one embodiment, the immunization protocol for the treatment or prophylaxis of an infection as defined herein, i.e. the immunization of a subject against a LASV, comprises one single doses of the composition or the vaccine.

[0757] The treatment or prophylaxis as defined above may comprise the administration of a further active pharmaceutical ingredient.

[0758] For example, at least one LASV protein or peptide as described herein, or a fragment or variant thereof, may be co-administered in order to induce or enhance an immune response. Further, two distinct RNAs of the first aspect and, optionally further RNAs of the first aspect may be administered at different time points, preferably in a prime-boost scenario, e.g. using a composition comprising at least one LASV polypeptide as prime vaccination and a composition/vaccine comprising at least one RNA of the first aspect as boost vaccination.

[0759] Suitably, the treatment or prophylaxis as defined above comprises the administration of a further active pharmaceutical ingredient, wherein the further active pharmaceutical ingredient may be an immunotherapeutic agent that can be selected from immunoglobulins, preferably IgGs, monoclonal or polyclonal antibodies, polyclonal serum or sera, etc., most preferably immunoglobulins directed against a LASV protein or peptide as defined herein. Preferably, such a further immunotherapeutic agent may be provided as a peptide/protein or may be encoded by a nucleic acid, preferably by a DNA or an RNA, more preferably an mRNA.

[0760] Method of Treatment and Use, Diagnostic Method and Use:

[0761] In another aspect, the present invention relates to a method of treating or preventing a disorder.

[0762] In preferred embodiments, the present invention relates to a method of treating or preventing a disorder, wherein the method comprises applying or administering to a subject in need thereof the RNA of the first aspect, the composition of the second aspect, the vaccine of the third aspect, or the kit or kit of parts of the fourth aspect.

[0763] In preferred embodiments, the disorder is an infection with LASV or a disorder related to such an infection.

[0764] In preferred embodiments, the present invention relates to a method of treating or preventing a disorder, wherein the method comprises applying or administering to a subject in need thereof the RNA of the first aspect, the composition of the second aspect, the vaccine of the third aspect, or the kit or kit of parts of the fourth aspect, wherein the subject in need is preferably a mammalian subject. In particularly preferred embodiments, the mammalian subject is a human subject.

[0765] In particular, such a method may preferably comprise the steps of:
[0766] a) providing the RNA of the first aspect, the composition of the second aspect, the vaccine of the third aspect, or the kit or kit of parts of the fourth aspect;
[0767] b) applying or administering said RNA, composition, vaccine or kit or kit of parts of the to a tissue or an organism;
[0768] c) optionally, administering immunoglobulin (IgGs) against a LASV;
[0769] d) optionally, administering a further substance (adjuvant, auxiliary substance, further antigen, further RNA).

[0770] According to a further aspect, the present invention also provides a method for expression of at least one polypeptide comprising at least one peptide or protein derived from a LASV, or a fragment or variant thereof, wherein the method preferably comprises the following steps:
[0771] a) providing the RNA of the first aspect or the composition of the second aspect; and
[0772] b) applying or administering said RNA or composition to an expression system (cells), a tissue, an organism.

[0773] The method may be applied for laboratory, for research, for diagnostic, for commercial production of peptides or proteins and/or for therapeutic purposes. The method may furthermore be carried out in the context of the treatment of a specific disease, particularly in the treatment of infectious diseases, particularly LASV infections.

[0774] Likewise, according to another aspect, the present invention also provides the use of the RNA of the first aspect, the composition of the second aspect, the vaccine of the third aspect, or the kit or kit of parts of the fourth aspect preferably for diagnostic or therapeutic purposes, e.g. for expression of an encoded LASV antigenic peptide or protein, e.g. by applying or administering said RNA, composition comprising said RNA, vaccine comprising said RNA, e.g. to a cell-free expression system, a cell (e.g. an expression host cell or a somatic cell), a tissue or an organism. In specific embodiments, applying or administering said RNA, composition comprising said RNA, vaccine comprising said RNA to a tissue or an organism is followed by e.g. a step of obtaining induced LASV GPC antibodies e.g. LASV GPC specific (monoclonal) antibodies.

[0775] The use may be applied for a (diagnostic) laboratory, for research, for diagnostics, for commercial production of peptides, proteins, or LASV antibodies and/or for therapeutic purposes. The use may be carried out in vitro, in vivo or ex vivo. The use may furthermore be carried out in the context of the treatment of a specific disease, particularly in the treatment of an LASV infection or a related disorder.

[0776] In a particularly preferred embodiment, the invention provides the RNA of the first aspect, the composition of the second aspect, the composition of the third aspect, the vaccine of the fourth aspect, or the kit or kit of parts of the fifth aspect for use as a medicament, for use in treatment or prophylaxis, preferably treatment or prophylaxis of an LASV infection or a related disorder, or for use as a vaccine.

[0777] According to a further aspect, the present invention also provides a method of manufacturing a composition or a LASV vaccine, comprising the steps of:
[0778] a) RNA in vitro transcription step using a DNA template in the presence of a trinuclotide cap analogue to obtain cap1 comprising coding RNA,
[0779] b) Purifying the obtained cap1 comprising coding RNA of step a) using RP-HPLC, and/or TFF, and/or Oligo(dT) purification and/or AEX, preferably using RP-HPLC;
[0780] c) Providing a first liquid composition comprising the purified cap1 comprising coding RNA of step b);
[0781] d) Providing a second liquid composition comprising at least one cationic lipid as defined herein, a neutral lipid as defined herein, a steroid or steroid analogue as defined herein, and a PEG-lipid as defined herein;
[0782] e) Introducing the first liquid composition and the second liquid composition into at least one mixing means to allow the formation of LN Ps comprising cap1 comprising coding RNA;
[0783] f) Purifying the obtained LNPs comprising cap1 comprising coding RNA;
[0784] g) optionally, lyophilizing the purified LNPs comprising cap1 comprising coding RNA.

[0785] Preferably, the mixing means of step e) is a T-piece connector or a microfluidic mixing device. Preferably, the purifying step f) comprises at least one step selected from precipitation step, dialysis step, filtration step, TFF step. Optionally, an enzymatic polyadenylation step may be performed after step a) or b). Optionally, further purification steps may be implemented to e.g. remove residual DNA, buffers, small RNA by-products etc. Optionally, RNA in vitro transcription is performed in the absence of a cap analog, and an enzymatic capping step is performed after RNA vitro transcription. Optionally, RNA in vitro transcription is performed in the presence of at least one modified nucleotide as defined herein.

[0786] List of Preferred Embodiments/Items

[0787] In the following, particularly preferred embodiments (items 1-49) of the invention are provided.

[0788] Item 1:

[0789] RNA comprising at least one coding sequence encoding at least one antigenic peptide or protein derived from a Lassa virus (LASV) protein or a fragment or variant thereof, wherein said coding sequence is operably linked to a 5′-UTR derived from a HSD17B4 gene, a NDUFA4 gene, or a RPL32 gene and/or a 3′-UTR derived from a PSMB3 gene, a CASP1 gene, an ALB7 gene, or an alpha-globin gene.

[0790] Item 2:

[0791] RNA according to item 1, wherein said coding sequence is operably linked to a 5′-UTR and/or 3′-UTR, comprising
[0792] a-1. at least one 5′-UTR derived from a 5′-UTR of a HSD17B4 gene, or from a corresponding RNA sequence, homolog, fragment or variant thereof and at least one 3′-UTR derived from a 3′-UTR of a PSMB3 gene, or from a corresponding RNA sequence, homolog, fragment or variant thereof; or
[0793] a-2. at least one 5′-UTR derived from a 5′-UTR of a NDUFA4 gene, or from a corresponding RNA sequence, homolog, fragment or variant thereof and at least one 3′-UTR derived from a 3′-UTR of a PSMB3 gene, or from a corresponding RNA sequence, homolog, fragment or variant thereof; or
[0794] b-4. at least one 5′-UTR derived from a 5′-UTR of a HSD17B4 gene, or from a corresponding RNA sequence, homolog, fragment or variant thereof and at least one 3′-UTR derived from a 3′-UTR of a CASP1 gene, or from a corresponding RNA sequence, homolog, fragment or variant thereof; or
[0795] i-2. at least one 5′-UTR derived from a 5′-UTR of a RPL32 gene, or from a corresponding RNA sequence, homolog, fragment or variant thereof and at least one 3′-UTR derived from a 3′-UTR of a ALB7 gene, or from a corresponding RNA sequence, homolog, fragment or variant thereof; or
[0796] i-3. at least one 3′-UTR derived from a 3′-UTR of a alpha-globin gene gene, or from a corresponding RNA sequence, homolog, fragment or variant thereof.

[0797] Item 3:

[0798] RNA according to item 1 or 2, wherein
[0799] said 5′-UTR derived from a HSD17B4 gene comprises or consists of a nucleic acid sequence being identical or at least 70%, 80%, 85%, 86%, 87%, 88%, 89%, 90%, 91%, 92%, 93%, 94%, 95%, 96%, 97%, 98%, or 99% identical to SEQ ID NO: 13804 or 13805 or a fragment or a variant thereof;
[0800] said 5′-UTR derived from a NDUFA4 gene comprises or consists of a nucleic acid sequence being identical or at least 70%, 80%, 85%, 86%, 87%, 88%, 89%, 90%, 91%, 92%, 93%, 94%, 95%, 96%, 97%, 98%, or 99% identical to SEQ ID NO: 13812 or 13813 or a fragment or a variant thereof;
[0801] said 5′-UTR derived from a RPL32 gene comprises or consists of a nucleic acid sequence being identical or at least 70%, 80%, 85%, 86%, 87%, 88%, 89%, 90%, 91%, 92%, 93%, 94%, 95%, 96%, 97%, 98%, or 99% identical to SEQ ID NO: 13824 or 13825 or a fragment or a variant thereof;
[0802] said 3′-UTR derived from a PSMB3 gene comprises or consists of a nucleic acid sequence being identical or at least 70%, 80%, 85%, 86%, 87%, 88%, 89%, 90%, 91%, 92%, 93%, 94%, 95%, 96%, 97%, 98%, or 99% identical to SEQ ID NO: 13826 or 13827 or a fragment or a variant thereof;
[0803] said 3′-UTR derived from a CASP1 gene comprises or consists of a nucleic acid sequence being identical or at least 70%, 80%, 85%, 86%, 87%, 88%, 89%, 90%, 91%, 92%, 93%, 94%, 95%, 96%, 97%, 98%, or 99% identical to SEQ ID NO: 13828 or 13829 or a fragment or a variant thereof;
[0804] said 3′-UTR derived from a ALB7 gene comprises or consists of a nucleic acid sequence being identical or at least 70%, 80%, 85%, 86%, 87%, 88%, 89%, 90%, 91%, 92%, 93%, 94%, 95%, 96%, 97%, 98%, or 99% identical to SEQ ID NO: 13838 or 13839 or a fragment or a variant thereof;
[0805] said 3′-UTR derived from a alpha-globin gene comprises or consists of a nucleic acid sequence being identical or at least 70%, 80%, 85%, 86%, 87%, 88%, 89%, 90%, 91%, 92%, 93%, 94%, 95%, 96%, 97%, 98%, or 99% identical to EQ ID NO: 13840 or 13841 or a fragment or a variant thereof.

[0806] Item 4:

[0807] RNA according to any one of the preceding items, wherein the LASV protein is derived from glycoprotein precursor (GPC), a prefusion-stabilized GPC, nucleoprotein (NP), zinc-binding matrix protein (Z), or a variant, fragment, or combination thereof, wherein GPC, prefusion-stabilized GPC, NP, Z are preferably full-length proteins.

[0808] Item 4.1:

[0809] RNA according to item 4, wherein the LASV protein is derived from glycoprotein precursor (GPC), wherein the GPC or prefusion-stabilized GPC is C-terminally truncated, preferably lacking the cytoplasmic tail (herein referred to as GPCmut13, or GPCmut14 to GPCmut25).

[0810] Item 4.2:

[0811] RNA according to item 4, wherein the LASV protein is derived from nucleoprotein (NP), additionally encoding a heterologous secretory signal peptide, preferably derived from tissue plasminogen activator (TPA or HsPLAT), human serum albumin (HSA or HsALB), or immunoglobulin IgE (IgE) (herein referred to as SP-NP or SP-HsPLAT_NP, SP-HsALB_NP, SP-IgE_NP).

[0812] Item 4.3:

[0813] RNA according to item 4, wherein the LASV protein is preferably derived from glycoprotein precursor (GPC) or from prefusion-stabilized GPC and is mutated/substituted to delete at least one predicted or potential glycosylation site.

[0814] Item 5:

[0815] RNA according item 4, wherein the prefusion-stabilized GPC comprises at least one of the following mutations
[0816] A, preferably of Al, A2, A3 and B, and C:
[0817] A amino acid substitutions allowing a covalent link of different structural elements of GPC, preferably by introduction of two additional cysteine residues, wherein preferably
   [0818] A1 the amino acid substitutions allowing a covalent link of GP1 and GP2, preferably by introduction of two additional cysteine residues, preferably at position 207 or 206 and 360 or 359, preferably by amino acid substitutions R2070 or R2060 and G3600 or G359C, or
   [0819] A2 the amino acid substitutions allowing a covalent link of GP1 to HR1 of GP2, preferably by introduction of two additional cysteine residues, preferably at position 81 or 80 and 319 or 318, preferably by amino acid substitutions T81C or T800 and N3190 or N3180, or
   [0820] A3 the amino acid substitutions allowing a covalent link of T-loop in GP2 to adjacent loop in GP2, preferably by introduction of two additional cysteine residues, preferably at positon 370 or 369 and 386 or 385, preferably by amino acid substitutions W3700 or W369C and W386C or W385C,
[0821] B amino acid substitutions allowing stabilization of GP2, preferably by introduction of a helix- breaking point mutation in the metastable region of HR1 of GP2 subunit, more preferably by introducing E329P or E328P,
[0822] C replacing the native GP1-GP2 cleavage site (S1 P) with a furin cleavage site, e.g. RRLL to RRRR to facilitate efficient processing of the mRNA encoded antigenic protein in target cells, preferably by amino acid substitutions L258R, L259R or L257R, L258R,

[0823] wherein prefusion-stabilized GPC preferably comprises at least one mutation A selected from A1, A2 and A3 (herein referred to as GPCmut1, GPCmut2, GPCmut3, GPCmut4, GPCmut5, GPCmut6, GPCmut7, GPCmut8, GPCmut9, GPCmut10, GPCmut11, or GPCmut12).

[0824] Item 6:

[0825] RNA according to any one of the preceding items, wherein
[0826] said at least one coding sequence encodes at least one antigenic peptide or protein derived from LASV GPC comprising or consisting of an amino acid sequences being identical or at least 70%, 80%, 85%, 86%, 87%, 88%, 89%, 90%, 91%, 92%, 93%, 94%, 95%, 96%, 97%, 98%, or 99% identical to any one of SEQ ID NO: 1-254 or a fragment or a variant thereof;
[0827] said at least one coding sequence encoding at least one antigenic peptide or protein derived from LASV prefusion-stabilized GPC (GPCmutl or GPCstabilized) comprising or consisting of at least one amino acid sequences being identical or at least 70%, 80%, 85%, 86%, 87%, 88%, 89%, 90%, 91%, 92%, 93%, 94%, 95%, 96%, 97%, 98%, or 99% identical to any one of SEQ ID NO: 3567-3820 or a fragment or variant of any of these sequences;
[0828] said at least one coding sequence encoding at least one antigenic peptide or protein derived from LASV prefusion-stabilized GPC (GPCmut2) comprising or consisting of at least one amino acid sequences being identical or at least 70%, 80%, 85%, 86%, 87%, 88%, 89%, 90%, 91%, 92%, 93%, 94%, 95%, 96%, 97%, 98%, or 99% identical to any one of SEQ ID NO: 22949-22980 or a fragment or variant of any of these sequences;
[0829] said at least one coding sequence encoding at least one antigenic peptide or protein derived from LASV prefusion-stabilized GPC (GPCmut3) comprising or consisting of at least one amino acid sequences being identical or at least 70%, 80%, 85%, 86%, 87%, 88%, 89%, 90%, 91%, 92%, 93%, 94%, 95%, 96%, 97%, 98%, or 99% identical to any one of SEQ ID NO: 24645-24676 or a fragment or variant of any of these sequences;
[0830] said at least one coding sequence encoding at least one antigenic peptide or protein derived from LASV prefusion-stabilized GPC (GPCmut4) comprising or consisting of at least one amino acid sequences being identical or at least 70%, 80%, 85%, 86%, 87%, 88%, 89%, 90%, 91%, 92%, 93%, 94%, 95%, 96%, 97%, 98%, or 99% identical to any one of SEQ ID NO: 26341-26372 or a fragment or variant of any of these sequences;
[0831] said at least one coding sequence encoding at least one antigenic peptide or protein derived from LASV prefusion-stabilized GPC (GPCmut5) comprising or consisting of at least one amino acid sequences being identical or at least 70%, 80%, 85%, 86%, 87%, 88%, 89%, 90%, 91%, 92%, 93%, 94%, 95%, 96%, 97%, 98%, or 99% identical to any one of SEQ ID NO: 28037-28068 or a fragment or variant of any of these sequences;
[0832] said at least one coding sequence encoding at least one antigenic peptide or protein derived from LASV prefusion-stabilized GPC (GPCmut6) comprising or consisting of at least one amino acid sequences being identical or at least 70%, 80%, 85%, 86%, 87%, 88%, 89%, 90%, 91%, 92%, 93%, 94%, 95%, 96%, 97%, 98%, or 99% identical to any one of SEQ ID NO: 29733-29764 or a fragment or variant of any of these sequences;
[0833] said at least one coding sequence encoding at least one antigenic peptide or protein derived from LASV prefusion-stabilized GPC (GPCmut7) comprising or consisting of at least one amino acid sequences being identical or at least 70%, 80%, 85%, 86%, 87%, 88%, 89%, 90%, 91%, 92%, 93%, 94%, 95%, 96%, 97%, 98%, or 99% identical to any one of SEQ ID NO: 31429-31460 or a fragment or variant of any of these sequences;
[0834] said at least one coding sequence encoding at least one antigenic peptide or protein derived from LASV prefusion-stabilized GPC (GPCmut8) comprising or consisting of at least one amino acid sequences being identical or at least 70%, 80%, 85%, 86%, 87%, 88%, 89%, 90%, 91%, 92%, 93%, 94%, 95%, 96%, 97%, 98%, or 99% identical to any one of SEQ ID NO: 33125-33156 or a fragment or variant of any of these sequences;
[0835] said at least one coding sequence encoding at least one antigenic peptide or protein derived from LASV prefusion-stabilized GPC (GPCmut9) comprising or consisting of at least one amino acid sequences being identical or at least 70%, 80%, 85%, 86%, 87%, 88%, 89%, 90%, 91%, 92%, 93%, 94%, 95%, 96%, 97%, 98%, or 99% identical to any one of SEQ ID NO: 34821-34852 or a fragment or variant of any of these sequences;
[0836] said at least one coding sequence encoding at least one antigenic peptide or protein derived from LASV prefusion-stabilized GPC (GPCmut10) comprising or consisting of at least one amino acid sequences being identical or at least 70%, 80%, 85%, 86%, 87%, 88%, 89%, 90%, 91%, 92%, 93%, 94%, 95%, 96%, 97%, 98%, or 99% identical to any one of SEQ ID NO: 36517-36548 or a fragment or variant of any of these sequences;
[0837] said at least one coding sequence encoding at least one antigenic peptide or protein derived from LASV prefusion-stabilized GPC (GPCmut11) comprising or consisting of at least one amino acid sequences being identical or at least 70%, 80%, 85%, 86%, 87%, 88%, 89%, 90%, 91%, 92%, 93%, 94%, 95%, 96%, 97%, 98%, or 99% identical to any one of SEQ ID NO: 38213-38244 or a fragment or variant of any of these sequences,
[0838] said at least one coding sequence encoding at least one antigenic peptide or protein derived from LASV prefusion-stabilized GPC (GPCmut12) comprising or consisting of at least one amino acid sequences being identical or at least 70%, 80%, 85%, 86%, 87%, 88%, 89%, 90%, 91%, 92%, 93%, 94%, 95%, 96%, 97%, 98%, or 99% identical to any one of SEQ ID NO: 39909-39940 or a fragment or variant of any of these sequences,
[0839] said at least one coding sequence encoding at least one antigenic peptide or protein derived from LASV GPC lacking the cytoplasmic tail (GPCmut13) comprising or consisting of at least one amino acid sequences being identical or at least 70%, 80%, 85%, 86%, 87%, 88%, 89%, 90%, 91%, 92%, 93%, 94%, 95%, 96%, 97%, 98%, or 99% identical to any one of SEQ ID NO: 41605-41636 or a fragment or variant of any of these sequences,
[0840] said at least one coding sequence encodes at least one antigenic peptide or protein derived from LASV NP comprising or consisting of an amino acid sequences being identical or at least 70%, 80%, 85%, 86%, 87%, 88%, 89%, 90%, 91%, 92%, 93%, 94%, 95%, 96%, 97%, 98%, or 99% identical to any one of SEQ ID NO: 7547-7797 or a fragment or a variant thereof;
[0841] said at least one coding sequence encoding at least one antigenic peptide or protein derived from HsPLAT_NP comprising or consisting of at least one amino acid sequences being identical or at least 70%, 80%, 85%, 86%, 87%, 88%, 89%, 90%, 91%, 92%, 93%, 94%, 95%, 96%, 97%, 98%, or 99% identical to any one of SEQ ID NO: 17968-18001 or a fragment or variant of any of these sequences;
[0842] said at least one coding sequence encoding at least one antigenic peptide or protein derived from HsALB_NP comprising or consisting of at least one amino acid sequences being identical or at least 70%, 80%, 85%, 86%, 87%, 88%, 89%, 90%, 91%, 92%, 93%, 94%, 95%, 96%, 97%, 98%, or 99% identical to any one of SEQ ID NO: 19328-19361 or a fragment or variant of any of these sequences;
[0843] said at least one coding sequence encoding at least one antigenic peptide or protein derived from IgE_NP comprising or consisting of at least one amino acid sequences being identical or at least 70%, 80%, 85%, 86%, 87%, 88%, 89%, 90%, 91%, 92%, 93%, 94%, 95%, 96%, 97%, 98%, or 99% identical to any one of SEQ ID NO: 20689-20722 or a fragment or variant of any of these sequences;
[0844] said at least one coding sequence encodes at least one antigenic peptide or protein derived from LASV Z comprising or consisting of an amino acid sequences being identical or at least 70%, 80%, 85%, 86%, 87%, 88%, 89%, 90%, 91%, 92%, 93%, 94%, 95%, 96%, 97%, 98%, or 99% identical to any one of SEQ ID NO: 11166-11347 or a fragment or a variant thereof.

[0845] Item 7:

[0846] RNA according to any one of the preceding items, wherein
[0847] said the at least one coding sequence comprises or consists of at least one of the nucleic acid sequences being identical or at least 70%, 80%, 85%, 86%, 87%, 88%, 89%, 90%, 91%, 92%, 93%, 94%, 95%, 96%, 97%, 98%, or 99% identical to SEQ ID NOs: 255-2286 or a fragment or a fragment or variant of any of these sequences;
[0848] said the at least one coding sequence comprises or consists of at least one of the nucleic acid sequences being identical or at least 70%, 80%, 85%, 86%, 87%, 88%, 89%, 90%, 91%, 92%, 93%, 94%, 95%, 96%, 97%, 98%, or 99% identical to SEQ ID NOs: 3821-6106 (encoding GPCmut1) or a fragment or a fragment or variant of any of these sequences;
[0849] said the at least one coding sequence comprises or consists of at least one of the nucleic acid sequences being identical or at least 70%, 80%, 85%, 86%, 87%, 88%, 89%, 90%, 91%, 92%, 93%, 94%, 95%, 96%, 97%, 98%, or 99% identical to SEQ ID NOs: 22981-23108 (encoding GPCmut2) or a fragment or a fragment or variant of any of these sequences;
[0850] said the at least one coding sequence comprises or consists of at least one of the nucleic acid sequences being identical or at least 70%, 80%, 85%, 86%, 87%, 88%, 89%, 90%, 91%, 92%, 93%, 94%, 95%, 96%, 97%, 98%, or 99% identical to SEQ ID NOs: 24677-24804 (encoding GPCmut3) or a fragment or a fragment or variant of any of these sequences;
[0851] said the at least one coding sequence comprises or consists of at least one of the nucleic acid sequences being identical or at least 70%, 80%, 85%, 86%, 87%, 88%, 89%, 90%, 91%, 92%, 93%, 94%, 95%, 96%, 97%, 98%, or 99% identical to SEQ ID NOs: 26373-26500 (encoding GPCmut4) or a fragment or a fragment or variant of any of these sequences;
[0852] said the at least one coding sequence comprises or consists of at least one of the nucleic acid sequences being identical or at least 70%, 80%, 85%, 86%, 87%, 88%, 89%, 90%, 91%, 92%, 93%, 94%, 95%, 96%, 97%, 98%, or 99% identical to SEQ ID NOs: 28069-28196 (encoding GPCmut5) or a fragment or a fragment or variant of any of these sequences;
[0853] said the at least one coding sequence comprises or consists of at least one of the nucleic acid sequences being identical or at least 70%, 80%, 85%, 86%, 87%, 88%, 89%, 90%, 91%, 92%, 93%, 94%, 95%, 96%, 97%, 98%, or 99% identical to SEQ ID NOs: 29765-29892 (encoding GPCmut6) or a fragment or a fragment or variant of any of these sequences;
[0854] said the at least one coding sequence comprises or consists of at least one of the nucleic acid sequences being identical or at least 70%, 80%, 85%, 86%, 87%, 88%, 89%, 90%, 91%, 92%, 93%, 94%, 95%, 96%, 97%, 98%, or 99% identical to SEQ ID NOs: 31461-31588 (encoding GPCmut7) or a fragment or a fragment or variant of any of these sequences;
[0855] said the at least one coding sequence comprises or consists of at least one of the nucleic acid sequences being identical or at least 70%, 80%, 85%, 86%, 87%, 88%, 89%, 90%, 91%, 92%, 93%, 94%, 95%, 96%, 97%, 98%, or 99% identical to SEQ ID NOs: 33157-33284 (encoding GPCmut8) or a fragment or a fragment or variant of any of these sequences;
[0856] said the at least one coding sequence comprises or consists of at least one of the nucleic acid sequences being identical or at least 70%, 80%, 85%, 86%, 87%, 88%, 89%, 90%, 91%, 92%, 93%, 94%, 95%, 96%, 97%, 98%, or 99% identical to SEQ ID NOs: 34853-34980 (encoding GPCmut9) or a fragment or a fragment or variant of any of these sequences;
[0857] said the at least one coding sequence comprises or consists of at least one of the nucleic acid sequences being identical or at least 70%, 80%, 85%, 86%, 87%, 88%, 89%, 90%, 91%, 92%, 93%, 94%, 95%, 96%, 97%, 98%, or 99% identical to SEQ ID NOs: 36549-36676 (encoding GPCmut10) or a fragment or a fragment or variant of any of these sequences;
[0858] said the at least one coding sequence comprises or consists of at least one of the nucleic acid sequences being identical or at least 70%, 80%, 85%, 86%, 87%, 88%, 89%, 90%, 91%, 92%, 93%, 94%, 95%, 96%, 97%, 98%, or 99% identical to SEQ ID NOs: 38245-38372 (encoding GPCmut11) or a fragment or a fragment or variant of any of these sequences;
[0859] said the at least one coding sequence comprises or consists of at least one of the nucleic acid sequences being identical or at least 70%, 80%, 85%, 86%, 87%, 88%, 89%, 90%, 91%, 92%, 93%, 94%, 95%, 96%, 97%, 98%, or 99% identical to SEQ ID NOs: 39941-40068 (encoding GPCmut12) or a fragment or a fragment or variant of any of these sequences;
[0860] said the at least one coding sequence comprises or consists of at least one of the nucleic acid sequences being identical or at least 70%, 80%, 85%, 86%, 87%, 88%, 89%, 90%, 91%, 92%, 93%, 94%, 95%, 96%, 97%, 98%, or 99% identical to SEQ ID NOs: 41637-41764 (encoding GPCmut13) or a fragment or a fragment or variant of any of these sequences;
[0861] said the at least one coding sequence comprises or consists of at least one of the nucleic acid sequences being identical or at least 70%, 80%, 85%, 86%, 87%, 88%, 89%, 90%, 91%, 92%, 93%, 94%, 95%, 96%, 97%, 98%, or 99% identical to SEQ ID NOs: 7798-9805 (encoding NP) or a fragment or a fragment or variant of any of these sequences;
[0862] said the at least one coding sequence comprises or consists of at least one of the nucleic acid sequences being identical or at least 70%, 80%, 85%, 86%, 87%, 88%, 89%, 90%, 91%, 92%, 93%, 94%, 95%, 96%, 97%, 98%, or 99% identical to SEQ ID NOs: 18002-18103 (encoding SP- HsPLAT_NP) or a fragment or a fragment or variant of any of these sequences;
[0863] said the at least one coding sequence comprises or consists of at least one of the nucleic acid sequences being identical or at least 70%, 80%, 85%, 86%, 87%, 88%, 89%, 90%, 91%, 92%, 93%, 94%, 95%, 96%, 97%, 98%, or 99% identical to SEQ ID NOs: 19362-19463 (encoding SP- HsALB_NP) or a fragment or a fragment or variant of any of these sequences;
[0864] said the at least one coding sequence comprises or consists of at least one of the nucleic acid sequences being identical or at least 70%, 80%, 85%, 86%, 87%, 88%, 89%, 90%, 91%, 92%, 93%, 94%, 95%, 96%, 97%, 98%, or 99% identical to SEQ ID NOs: 20723-20824 (encoding SP- IgE_NP) or a fragment or a fragment or variant of any of these sequences;
[0865] said the at least one coding sequence comprises or consists of at least one of the nucleic acid sequences being identical or at least 70%, 80%, 85%, 86%, 87%, 88%, 89%, 90%, 91%, 92%, 93%, 94%, 95%, 96%, 97%, 98%, or 99% identical to SEQ ID NOs: 11348-12803 (encoding Z) or a fragment or a fragment or variant of any of these sequences.

[0866] Item 8:

[0867] RNA according to any one of the preceding items, wherein the at least one coding sequence is a codon modified coding sequence, wherein the amino acid sequence encoded by the at least one codon modified coding sequence is preferably not being modified compared to the amino acid sequence encoded by the corresponding wild type coding sequence.

[0868] Item 9:

[0869] RNA according to item 8, wherein the at least one codon modified coding sequence is selected from C maximized coding sequence, CAI maximized coding sequence, human codon usage adapted coding sequence, G/C content modified coding sequence, and G/C optimized coding sequence, or any combination thereof.

[0870] Item 10:

[0871] RNA according to item 8 or 9, wherein the
[0872] at least one coding sequence comprising a codon modified nucleic acid sequence which is identical or at least 70%, 80%, 85%, 86%, 87%, 88%, 89%, 90%, 91%, 92%, 93%, 94%, 95%, 96%, 97%, 98%, or 99% identical to any one SEQ ID NOs: 509-2286 (encoding GPC) or a fragment or variant of any of these sequences, or
[0873] at least one coding sequence comprises a codon modified coding sequence comprising a nucleic acid sequence being identical or at least 70%, 80%, 85%, 86%, 87%, 88%, 89%, 90%, 91%, 92%, 93%, 94%, 95%, 96%, 97%, 98%, or 99% identical to any one SEQ ID NOs: 4075-6106 (encoding GPCmut1) or a fragment or variant of any of these sequences, or
[0874] at least one coding sequence comprises a codon modified coding sequence comprising a nucleic acid sequence being identical or at least 70%, 80%, 85%, 86%, 87%, 88%, 89%, 90%, 91%, 92%, 93%, 94%, 95%, 96%, 97%, 98%, or 99% identical to any one SEQ ID NOs: 22981-23108 (encoding GPCmut2) or a fragment or variant of any of these sequences, or
[0875] at least one coding sequence comprises a codon modified coding sequence comprising a nucleic acid sequence being identical or at least 70%, 80%, 85%, 86%, 87%, 88%, 89%, 90%, 91%, 92%, 93%, 94%, 95%, 96%, 97%, 98%, or 99% identical to any one SEQ ID NOs: 24677-24804 (encoding GPCmut3) or a fragment or variant of any of these sequences, or
[0876] at least one coding sequence comprises a codon modified coding sequence comprising a nucleic acid sequence being identical or at least 70%, 80%, 85%, 86%, 87%, 88%, 89%, 90%, 91%, 92%, 93%, 94%, 95%, 96%, 97%, 98%, or 99% identical to any one SEQ ID NOs: 26373-26500 (encoding GPCmut4) or a fragment or variant of any of these sequences, or
[0877] at least one coding sequence comprises a codon modified coding sequence comprising a nucleic acid sequence being identical or at least 70%, 80%, 85%, 86%, 87%, 88%, 89%, 90%, 91%, 92%, 93%, 94%, 95%, 96%, 97%, 98%, or 99% identical to any one SEQ ID NOs: 28069-28196 (encoding GPCmut5) or a fragment or variant of any of these sequences, or
[0878] at least one coding sequence comprises a codon modified coding sequence comprising a nucleic acid sequence being identical or at least 70%, 80%, 85%, 86%, 87%, 88%, 89%, 90%, 91%, 92%, 93%, 94%, 95%, 96%, 97%, 98%, or 99% identical to any one SEQ ID NOs: 29765-29892 (encoding GPCmut6) or a fragment or variant of any of these sequences, or
[0879] at least one coding sequence comprises a codon modified coding sequence comprising a nucleic acid sequence being identical or at least 70%, 80%, 85%, 86%, 87%, 88%, 89%, 90%, 91%, 92%, 93%, 94%, 95%, 96%, 97%, 98%, or 99% identical to any one SEQ ID NOs: 31461-31588 (encoding GPCmut7) or a fragment or variant of any of these sequences, or
[0880] at least one coding sequence comprises a codon modified coding sequence comprising a nucleic acid sequence being identical or at least 70%, 80%, 85%, 86%, 87%, 88%, 89%, 90%, 91%, 92%, 93%, 94%, 95%, 96%, 97%, 98%, or 99% identical to any one SEQ ID NOs: 33157-33284 (encoding GPCmut8) or a fragment or variant of any of these sequences, or
[0881] at least one coding sequence comprises a codon modified coding sequence comprising a nucleic acid sequence being identical or at least 70%, 80%, 85%, 86%, 87%, 88%, 89%, 90%, 91%, 92%, 93%, 94%, 95%, 96%, 97%, 98%, or 99% identical to any one SEQ ID NOs: 34853-34980 (encoding GPCmut9) or a fragment or variant of any of these sequences, or
[0882] at least one coding sequence comprises a codon modified coding sequence comprising a nucleic acid sequence being identical or at least 70%, 80%, 85%, 86%, 87%, 88%, 89%, 90%, 91%, 92%, 93%, 94%, 95%, 96%, 97%, 98%, or 99% identical to any one SEQ ID NOs: 36549-36676 (encoding GPCmut10) or a fragment or variant of any of these sequences, or
[0883] at least one coding sequence comprises a codon modified coding sequence comprising a nucleic acid sequence being identical or at least 70%, 80%, 85%, 86%, 87%, 88%, 89%, 90%, 91%, 92%, 93%, 94%, 95%, 96%, 97%, 98%, or 99% identical to any one SEQ ID NOs: 38245-38372 (encoding GPCmut11) or a fragment or variant of any of these sequences, or
[0884] at least one coding sequence comprises a codon modified coding sequence comprising a nucleic acid sequence being identical or at least 70%, 80%, 85%, 86%, 87%, 88%, 89%, 90%, 91%, 92%, 93%, 94%, 95%, 96%, 97%, 98%, or 99% identical to any one SEQ ID NOs: 39941-40068 (encoding GPCmut12) or a fragment or variant of any of these sequences, or
[0885] at least one coding sequence comprises a codon modified coding sequence comprising a nucleic acid sequence being identical or at least 70%, 80%, 85%, 86%, 87%, 88%, 89%, 90%, 91%, 92%, 93%, 94%, 95%, 96%, 97%, 98%, or 99% identical to any one SEQ ID NOs: 41637-41764 (encoding GPCmut13) or a fragment or variant of any of these sequences, or
[0886] at least one coding sequence comprises a codon modified coding sequence comprising a nucleic acid sequence being identical or at least 70%, 80%, 85%, 86%, 87%, 88%, 89%, 90%, 91%, 92%, 93%, 94%, 95%, 96%, 97%, 98%, or 99% identical to any one SEQ ID NOs: 8049-9805 (encoding NP) or a fragment or variant of any of these sequences, or
[0887] at least one coding sequence comprises a codon modified coding sequence comprising a nucleic acid sequence being identical or at least 70%, 80%, 85%, 86%, 87%, 88%, 89%, 90%, 91%, 92%, 93%, 94%, 95%, 96%, 97%, 98%, or 99% identical to any one SEQ ID NOs: 18002-18103, 19362-19463, or 20723-20824 (encoding SP-NP) or a fragment or variant of any of these sequences, or
[0888] at least one coding sequence comprises a codon modified coding sequence comprising a nucleic acid sequence being identical or at least 70%, 80%, 85%, 86%, 87%, 88%, 89%, 90%, 91%, 92%, 93%, 94%, 95%, 96%, 97%, 98%, or 99% identical to any one SEQ ID NOs: 11530-12803 (encoding Z) or a fragment or variant of any of these sequences.

[0889] Item 11:

[0890] RNA according to item 8 to 10, wherein the
[0891] at least one coding sequence comprising a G/C optimized or G/C content modified coding sequence (opt1, opts, opt6, opt11) comprising a nucleic acid sequence which is identical or at least 50%, 60%, 70%, 80%, 85%, 86%, 87%, 88%, 89%, 90%, 91%, 92%, 93%, 94%, 95%, 96%, 97%, 98%, or 99% identical to any one of the nucleic acid sequences according to the SEQ ID NOs: 509-762, 1525-2286 (encoding GPC) or a fragment or variant of any of these sequences, or
[0892] at least one coding sequence comprises a codon modified coding sequence comprising a nucleic acid sequence being identical or at least 70%, 80%, 85%, 86%, 87%, 88%, 89%, 90%, 91%, 92%, 93%, 94%, 95%, 96%, 97%, 98%, or 99% identical to any one SEQ ID NOs: 4075-4582, 5345-6106 (encoding GPCmut1) or a fragment or variant of any of these sequences, or
[0893] at least one coding sequence comprises a codon modified coding sequence comprising a nucleic acid sequence being identical or at least 70%, 80%, 85%, 86%, 87%, 88%, 89%, 90%, 91%, 92%, 93%, 94%, 95%, 96%, 97%, 98%, or 99% identical to any one SEQ ID NOs: 22981-23044, 23077-23108 (encoding GPCmut2) or a fragment or variant of any of these sequences, or
[0894] at least one coding sequence comprises a codon modified coding sequence comprising a nucleic acid sequence being identical or at least 70%, 80%, 85%, 86%, 87%, 88%, 89%, 90%, 91%, 92%, 93%, 94%, 95%, 96%, 97%, 98%, or 99% identical to any one SEQ ID NOs: 24677-24740, 24773-24804 (encoding GPCmut3) or a fragment or variant of any of these sequences, or
[0895] at least one coding sequence comprises a codon modified coding sequence comprising a nucleic acid sequence being identical or at least 70%, 80%, 85%, 86%, 87%, 88%, 89%, 90%, 91%, 92%, 93%, 94%, 95%, 96%, 97%, 98%, or 99% identical to any one SEQ ID NOs: 26373-26436, 26469-26500 (encoding GPCmut4) or a fragment or variant of any of these sequences, or
[0896] at least one coding sequence comprises a codon modified coding sequence comprising a nucleic acid sequence being identical or at least 70%, 80%, 85%, 86%, 87%, 88%, 89%, 90%, 91%, 92%, 93%, 94%, 95%, 96%, 97%, 98%, or 99% identical to any one SEQ ID NOs: 28069-28132, 28165-28196 (encoding GPCmut5) or a fragment or variant of any of these sequences, or
[0897] at least one coding sequence comprises a codon modified coding sequence comprising a nucleic acid sequence being identical or at least 70%, 80%, 85%, 86%, 87%, 88%, 89%, 90%, 91%, 92%, 93%, 94%, 95%, 96%, 97%, 98%, or 99% identical to any one SEQ ID NOs: 29765-29828, 29861-29892 (encoding GPCmut6) or a fragment or variant of any of these sequences, or
[0898] at least one coding sequence comprises a codon modified coding sequence comprising a nucleic acid sequence being identical or at least 70%, 80%, 85%, 86%, 87%, 88%, 89%, 90%, 91%, 92%, 93%, 94%, 95%, 96%, 97%, 98%, or 99% identical to any one SEQ ID NOs: 31461-31524, 31557-31588 (encoding GPCmut7) or a fragment or variant of any of these sequences, or
[0899] at least one coding sequence comprises a codon modified coding sequence comprising a nucleic acid sequence being identical or at least 70%, 80%, 85%, 86%, 87%, 88%, 89%, 90%, 91%, 92%, 93%, 94%, 95%, 96%, 97%, 98%, or 99% identical to any one SEQ ID NOs: 33157-33220, 33253-33284 (encoding GPCmut8) or a fragment or variant of any of these sequences, or
[0900] at least one coding sequence comprises a codon modified coding sequence comprising a nucleic acid sequence being identical or at least 70%, 80%, 85%, 86%, 87%, 88%, 89%, 90%, 91%, 92%, 93%, 94%, 95%, 96%, 97%, 98%, or 99% identical to any one SEQ ID NOs: 34853-34916, 34949-34980 (encoding GPCmut9) or a fragment or variant of any of these sequences, or
[0901] at least one coding sequence comprises a codon modified coding sequence comprising a nucleic acid sequence being identical or at least 70%, 80%, 85%, 86%, 87%, 88%, 89%, 90%, 91%, 92%, 93%, 94%, 95%, 96%, 97%, 98%, or 99% identical to any one SEQ ID NOs: 36549-36612, 36645-36676 (encoding GPCmut10) or a fragment or variant of any of these sequences, or
[0902] at least one coding sequence comprises a codon modified coding sequence comprising a nucleic acid sequence being identical or at least 70%, 80%, 85%, 86%, 87%, 88%, 89%, 90%, 91%, 92%, 93%, 94%, 95%, 96%, 97%, 98%, or 99% identical to any one SEQ ID NOs: 38245-38308, 38341-38372 (encoding GPCmut11) or a fragment or variant of any of these sequences, or
[0903] at least one coding sequence comprises a codon modified coding sequence comprising a nucleic acid sequence being identical or at least 70%, 80%, 85%, 86%, 87%, 88%, 89%, 90%, 91%, 92%, 93%, 94%, 95%, 96%, 97%, 98%, or 99% identical to any one SEQ ID NOs: 39941-40004, 40037-40068 (encoding GPCmut12) or a fragment or variant of any of these sequences, or
[0904] at least one coding sequence comprises a codon modified coding sequence comprising a nucleic acid sequence being identical or at least 70%, 80%, 85%, 86%, 87%, 88%, 89%, 90%, 91%, 92%, 93%, 94%, 95%, 96%, 97%, 98%, or 99% identical to any one SEQ ID NOs: 41637-41700, 41733-41764 (encoding GPCmut13) or a fragment or variant of any of these sequences, or
[0905] at least one coding sequence comprises a codon modified coding sequence comprising a nucleic acid sequence being identical or at least 70%, 80%, 85%, 86%, 87%, 88%, 89%, 90%, 91%, 92%, 93%, 94%, 95%, 96%, 97%, 98%, or 99% identical to any one SEQ ID NOs: 8049-8299, 9053-9805 (encoding NP) or a fragment or variant of any of these sequences, or
[0906] at least one coding sequence comprises a codon modified coding sequence comprising a nucleic acid sequence being identical or at least 70%, 80%, 85%, 86%, 87%, 88%, 89%, 90%, 91%, 92%, 93%, 94%, 95%, 96%, 97%, 98%, or 99% identical to any one SEQ ID NOs: 18002-18035, 18070-18103, 19362-19395, 19430-19463, 20723-20756, 20791-20824 (encoding SP_NP) or a fragment or variant of any of these sequences, or
[0907] at least one coding sequence comprises a codon modified coding sequence comprising a nucleic acid sequence being identical or at least 70%, 80%, 85%, 86%, 87%, 88%, 89%, 90%, 91%, 92%, 93%, 94%, 95%, 96%, 97%, 98%, or 99% identical to any one SEQ ID NOs: 11530-11711, 12258-12803 (encoding Z) or a fragment or variant of any of these sequences.

[0908] Item 11.1:

[0909] RNA according to item 8 to 10, wherein the at least one coding sequence is a codon modified coding sequence, comprising at least one modified nucleotide selected from pseudouridine (ψ), N1-methylpseudouridine (m1ψ), 5-methylcytosine, and 5-methoxyuridine, wherein pseudouridine (ψ), and N1-methylpseudouridine (m1ψ) are particularly preferred.

[0910] Item 12:

[0911] RNA according to any one of the preceding items, wherein the RNA comprises a 5′-cap structure, preferably m7G(5′), m7G(5′)ppp(5′)(2′OMeA), or m7G(5′)ppp(5′)(2′OMeG), wherein cap1 (m7G(5′)ppp(5′)(2′OMeA), or m7G(5′)ppp(5′)(2′OMeG) is particularly preferred.

[0912] Item 13:

[0913] RNA according to any one of the preceding items, wherein the RNA comprises at least one poly(A) sequence, preferably comprising 30 to 200 adenosine nucleotides, preferably about 64 adenosine nucleotides (A64), about 100 adenosine nucleotides (A100) or about 150 adenosine nucleotides.

[0914] Item 13.1:

[0915] RNA according to any one of the preceding items, wherein the RNA comprises at least one poly(A) sequence, located (exactly) at the 3′ terminus of the coding RNA.

[0916] Item 14:

[0917] RNA according to any one of the preceding items, wherein the RNA comprises at least one histone stem-loop, wherein the histone stem-loop preferably comprises a nucleic acid sequence according to SEQ ID NOs: 13842 or 13843 or a fragment or variant thereof.

[0918] Item 15:

[0919] RNA according to any one of the preceding items comprising the following elements:
[0920] a) 5′-cap structure, preferably as defined in item 12;
[0921] b) 5′-UTR and/or 3′-UTR as defined in items 1 to 3;
[0922] c) at least one coding sequence, preferably as defined by any one of items 7 to 11 or encoding a protein as defined by any one of items 4 to 6 or;
[0923] d) optionally, a poly(A) sequence, preferably as defined by item 13;
[0924] e) optionally, a poly(C) sequence, preferably as defined by item 13;
[0925] f) optionally, a histone stem-loop, preferably as defined by any one of item 14;
[0926] g) optionally, a 3′-terminal sequence according to SEQ ID NOs: 13848-13867, 13873-13879.

[0927] Item 16:

[0928] RNA according items to any one of the preceding items comprising the following elements, preferably in 5′- to 3′-direction:
[0929] a) 5′-cap structure, preferably as defined in item 12;
[0930] b) 5′-UTR and/or 3′-UTR according to a-1, a-2, b-4, i-2, or i-3;
[0931] c) at least one coding sequence as defined by any one of items 7 to 11 wherein said coding sequence is located between said 5′-UTR and said 3′-UTR, preferably downstream of said 5′-UTR and upstream of said 3′-UTR;
[0932] d) optionally, a poly(A) sequence, preferably as defined by item 13;
[0933] e) optionally, poly(C) sequence, preferably as defined by item 13;
[0934] f) optionally, histone stem-loop, preferably as defined by any one of item 14;
[0935] g) optionally, a 3′-terminal sequence according to SEQ ID NOs: 13848-13867, 13873-13879.

[0936] Item 17:

[0937] RNA according to any one of the preceding items wherein
[0938] said RNA comprises or consists of an RNA sequence which is identical or at least 70%, 80%, 85%, 86%, 87%, 88%, 89%, 90%, 91%, 92%, 93%, 94%, 95%, 96%, 97%, 98%, or 99% identical to a nucleic acid sequence selected from the group consisting of SEQ ID NOs: 2287-3566, 14056-15207 (encoding GPC) or a fragment or variant of any of these sequences;
[0939] said RNA comprises or consists of an RNA sequence which is identical or at least 70%, 80%, 85%, 86%, 87%, 88%, 89%, 90%, 91%, 92%, 93%, 94%, 95%, 96%, 97%, 98%, or 99% identical to a nucleic acid sequence selected from the group consisting of SEQ ID NOs: 6107-7546, 15208-16743 (encoding GPCmut1) or a fragment or variant of any of these sequences;
[0940] said RNA comprises or consists of an RNA sequence which is identical or at least 70%, 80%, 85%, 86%, 87%, 88%, 89%, 90%, 91%, 92%, 93%, 94%, 95%, 96%, 97%, 98%, or 99% identical to a nucleic acid sequence selected from the group consisting of SEQ ID NOs: 23109-24644 (encoding GPCmut2) or a fragment or variant of any of these sequences;
[0941] said RNA comprises or consists of an RNA sequence which is identical or at least 70%, 80%, 85%, 86%, 87%, 88%, 89%, 90%, 91%, 92%, 93%, 94%, 95%, 96%, 97%, 98%, or 99% identical to a nucleic acid sequence selected from the group consisting of SEQ ID NOs: 24805-26340 (encoding GPCmut3) or a fragment or variant of any of these sequences;
[0942] said RNA comprises or consists of an RNA sequence which is identical or at least 70%, 80%, 85%, 86%, 87%, 88%, 89%, 90%, 91%, 92%, 93%, 94%, 95%, 96%, 97%, 98%, or 99% identical to a nucleic acid sequence selected from the group consisting of SEQ ID NOs: 26501-28036 (encoding GPCmut4) or a fragment or variant of any of these sequences;
[0943] said RNA comprises or consists of an RNA sequence which is identical or at least 70%, 80%, 85%, 86%, 87%, 88%, 89%, 90%, 91%, 92%, 93%, 94%, 95%, 96%, 97%, 98%, or 99% identical to a nucleic acid sequence selected from the group consisting of SEQ ID NOs: 28197-29732 (encoding GPCmut5) or a fragment or variant of any of these sequences;
[0944] said RNA comprises or consists of an RNA sequence which is identical or at least 70%, 80%, 85%, 86%, 87%, 88%, 89%, 90%, 91%, 92%, 93%, 94%, 95%, 96%, 97%, 98%, or 99% identical to a nucleic acid sequence selected from the group consisting of SEQ ID NOs: 29893-31428 (encoding GPCmut6) or a fragment or variant of any of these sequences;
[0945] said RNA comprises or consists of an RNA sequence which is identical or at least 70%, 80%, 85%, 86%, 87%, 88%, 89%, 90%, 91%, 92%, 93%, 94%, 95%, 96%, 97%, 98%, or 99% identical to a nucleic acid sequence selected from the group consisting of SEQ ID NOs: 31589-33124 (encoding GPCmut7) or a fragment or variant of any of these sequences;
[0946] said RNA comprises or consists of an RNA sequence which is identical or at least 70%, 80%, 85%, 86%, 87%, 88%, 89%, 90%, 91%, 92%, 93%, 94%, 95%, 96%, 97%, 98%, or 99% identical to a nucleic acid sequence selected from the group consisting of SEQ ID NOs: 33285-34820 (encoding GPCmut8) or a fragment or variant of any of these sequences;
[0947] said RNA comprises or consists of an RNA sequence which is identical or at least 70%, 80%, 85%, 86%, 87%, 88%, 89%, 90%, 91%, 92%, 93%, 94%, 95%, 96%, 97%, 98%, or 99% identical to a nucleic acid sequence selected from the group consisting of SEQ ID NOs: 34981-36516 (encoding GPCmut9) or a fragment or variant of any of these sequences;
[0948] said RNA comprises or consists of an RNA sequence which is identical or at least 70%, 80%, 85%, 86%, 87%, 88%, 89%, 90%, 91%, 92%, 93%, 94%, 95%, 96%, 97%, 98%, or 99% identical to a nucleic acid sequence selected from the group consisting of SEQ ID NOs: 36677-38212 (encoding GPCmut10) or a fragment or variant of any of these sequences;
[0949] said RNA comprises or consists of an RNA sequence which is identical or at least 70%, 80%, 85%, 86%, 87%, 88%, 89%, 90%, 91%, 92%, 93%, 94%, 95%, 96%, 97%, 98%, or 99% identical to a nucleic acid sequence selected from the group consisting of SEQ ID NOs: 38373-39908 (encoding GPCmut11) or a fragment or variant of any of these sequences;
[0950] said RNA comprises or consists of an RNA sequence which is identical or at least 70%, 80%, 85%, 86%, 87%, 88%, 89%, 90%, 91%, 92%, 93%, 94%, 95%, 96%, 97%, 98%, or 99% identical to a nucleic acid sequence selected from the group consisting of SEQ ID NOs: 40069-41604 (encoding GPCmut12) or a fragment or variant of any of these sequences;
[0951] said RNA comprises or consists of an RNA sequence which is identical or at least 70%, 80%, 85%, 86%, 87%, 88%, 89%, 90%, 91%, 92%, 93%, 94%, 95%, 96%, 97%, 98%, or 99% identical to a nucleic acid sequence selected from the group consisting of SEQ ID NOs: 41765-43300 (encoding GPCmut13) or a fragment or variant of any of these sequences;
[0952] said RNA comprises or consists of an RNA sequence which is identical or at least 70%, 80%, 85%, 86%, 87%, 88%, 89%, 90%, 91%, 92%, 93%, 94%, 95%, 96%, 97%, 98%, or 99% identical to a nucleic acid sequence selected from the group consisting of SEQ ID NOs: 9806-11165, 16744-17967 (encoding NP) or a fragment or variant of any of these sequences;
[0953] said RNA comprises or consists of an RNA sequence which is identical or at least 70%, 80%, 85%, 86%, 87%, 88%, 89%, 90%, 91%, 92%, 93%, 94%, 95%, 96%, 97%, 98%, or 99% identical to a nucleic acid sequence selected from the group consisting of SEQ ID NOs: 18104-19327, 19464-20687, 20825-22048 (encoding SP-NP) or a fragment or variant of any of these sequences;
[0954] said RNA comprises or consists of an RNA sequence which is identical or at least 70%, 80%, 85%, 86%, 87%, 88%, 89%, 90%, 91%, 92%, 93%, 94%, 95%, 96%, 97%, 98%, or 99% identical to a nucleic acid sequence selected from the group consisting of SEQ ID NOs: 12804-13803, 22049-22948 (encoding Z) or a fragment or variant of any of these sequences.

[0955] Item 18:

[0956] A composition comprising at least one RNA as defined in any one of items 1 to 17, wherein the composition optionally comprises at least one pharmaceutically acceptable carrier.

[0957] Item 19:

[0958] Composition according to item 18, wherein the composition comprises more than one or a plurality, preferably 2, 3, 4, 5, 6, 7, 8, 9, 10, 11, 12, 13, 14, 15 of different RNAs each defined in any one of items 1 to 18.

[0959] Item 20:

[0960] Composition according to item 19, wherein each of the different RNAs encodes a different antigenic peptide or protein derived from the same LASV, or wherein each of the RNAs encodes a different antigenic peptide or protein derived from different proteins of the same LASV, or wherein each of the RNAs encodes a different antigenic peptide or protein derived from different proteins of different LASV.

[0961] Item 21:

[0962] Composition according to items 19 or 20, wherein the composition comprises at least one RNA encoding at least one antigenic peptide or protein derived from GPC or prefusion-stabilized GPC or a variant or fragment thereof and at least one additional RNA encoding at least one antigenic peptide or protein derived from NP (or SP-NP) or a variant or fragment thereof, and/or at least one additional RNA encoding at least one antigenic peptide or protein derived from Z or a variant or fragment thereof.

[0963] Item 22:

[0964] Composition according to items 19 to 21, wherein the composition comprises at least one RNA encoding at least one antigenic peptide or protein derived from GPC or prefusion-stabilized GPC or a variant or fragment thereof and at least one additional RNA encoding at least one antigenic peptide or protein derived from NP (or SP-NP) or a variant or fragment thereof.

[0965] Item 23:

[0966] Composition according to items 19 to 22, wherein said antigenic peptides or proteins are derived from the same LASV or from different LASV or combinations thereof.

[0967] Item 24:

[0968] Composition according to item 23, wherein the different LASV belong to different LASV clades or different LASV lineages, preferably to the LASV clades I, II, III, IV, V, and VI or to the LASV lineages I, II, III, IV, V, and VI.

[0969] Item 25:

[0970] Composition according to item 18 to 24, wherein at least one RNA is complexed or associated with or at least partially complexed or partially associated with one or more cationic or polycationic compound, preferably cationic or polycationic polymer, cationic or polycationic polysaccharide, cationic or polycationic lipid, cationic or polycationic protein, cationic or polycationic peptide, or any combinations thereof.

[0971] Item 26:

[0972] Composition according to item 25, wherein the at least one RNA is complexed or associated with one or more lipids, thereby forming liposomes, lipid nanoparticles, lipoplexes, and/or nanoliposomes.

[0973] Item 27:

[0974] Composition according to item 26, wherein the at least one RNA is complexed with one or more lipids thereby forming lipid nanoparticles (LNP).

[0975] Item 28:

[0976] Composition according to item 26 or 27, wherein the LNP comprises a cationic lipid with the formula III:

[chemical structure]

[0977] or a pharmaceutically acceptable salt, tautomer, prodrug or stereoisomer thereof, wherein:
[0978] L¹ or L² is each independently —O(C═O)—, —(C═O)O—, —C(═O)—, —O—, —S(O)ₓ—, —S—S—, —C(═O)S—, —SC(═O)—, —NR^{a}C(═O)—, —C(═O)NR^{a}—, —NR^{a}C(═O)NR^{a}—, —OC(═O)NR^{a}— or —NR^{a}C(═O)O—, preferably L¹ or L² is —O(C═O)—or
[0979] —(C═O)O—;
[0980] G¹ and G² are each independently unsubstituted C₁-C₁₂ alkylene or C₁-C₁₂ alkenylene;
[0981] G³ is C₁-C₂₄ alkylene, alkenylene, C₃-C₈ cycloalkylene, or C₃-C₈ cycloalkenylene;
[0982] R^{a} is H or C₁-C₁₂ alkyl;
[0983] R¹ and R² are each independently C6⁻C24 alkyl or C6⁻C24 alkenyl;
[0984] R³ is H, OR⁵, CN, —C(═O)OR⁴, —OC(═O)R⁴ or —NR⁵C(═O)R⁴;
[0985] R⁴ is 1-C₁₂ alkyl;
[0986] R⁵ is H or 1-C₆ alkyl; and
[0987] x is 0, 1 or 2;

[0988] Item 29:

[0989] Composition according to item 28, wherein the cationic lipid is a compound of formula III, and wherein:
[0990] L¹ and L² are each independently —O(C═O)— or (C═O)—O—;
[0991] G³ is C₁-C₂₄ alkylene or C₁-C₂₄ alkenylene; and
[0992] R³ is H or OR⁵.

[0993] Item 30:

[0994] Composition according to any one of items 28 to 29, wherein the cationic lipid is a compound of formula III, and wherein:
[0995] L¹ and L² are each independently —O(C═O)— or (C═O)—O—; and
[0996] R¹ and R² each independently have one of the following structures:

[chemical structure]

[0997] Item 31:

[0998] Composition according to any one of items 28 to 30, wherein the cationic lipid is a compound of formula III, and wherein R³ is OH.

[0999] Item 32:

[1000] Composition according to any one of items 28 to 31, wherein the cationic lipid is selected from structures III-1 to III-36:

| No. | Structure |
|---|---|
| III-1 | [chemical structure] |
| III-2 | [chemical structure] |
| III-3 | [chemical structure] |
| III-4 | [chemical structure] |
| III-5 | [chemical structure] |
| III-6 | [chemical structure] |
| III-7 | [chemical structure] |
| III-8 | [chemical structure] |
| III-9 | [chemical structure] |
| III-10 | [chemical structure] |
| III-11 | [chemical structure] |
| III-12 | [chemical structure] |
| III-13 | [chemical structure] |
| III-14 | [chemical structure] |
| III-15 | [chemical structure] |
| III-16 | [chemical structure] |
| III-17 | [chemical structure] |
| III-18 | [chemical structure] |
| III-19 | [chemical structure] |
| III-20 | [chemical structure] |
| III-21 | [chemical structure] |
| III-22 | [chemical structure] |
| III-23 | [chemical structure] |
| III-24 | [chemical structure] |
| III-25 | [chemical structure] |
| III-26 | [chemical structure] |
| III-27 | [chemical structure] |
| III-28 | [chemical structure] |
| III-29 | [chemical structure] |
| III-30 | [chemical structure] |
| III-31 | [chemical structure] |
| III-32 | [chemical structure] |
| III-33 | [chemical structure] |
| III-34 | [chemical structure] |
| III-35 | [chemical structure] |
| III-36 | [chemical structure] |

[1001] Item 33:

[1002] Composition according to any one of items 28 to 32, wherein the cationic lipid is

[chemical structure]

[1003] Item 34:

[1004] Composition according to any one of items 27 to 33, wherein the LNP comprises a PEG lipid with the formula (IV):

[chemical structure]

[1005] wherein R⁹ and R⁹ are each independently a straight or branched, saturated or unsaturated alkyl chain containing from 10 to 30 carbon atoms, wherein the alkyl chain is optionally interrupted by one or more ester bonds;
[1006] and w has a mean value ranging from 30 to 60.

[1007] Item 35:

[1008] Composition according to item 34, wherein in the PEG lipid R⁹ and R⁹ are saturated alkyl chains.

[1009] Item 36:

[1010] Composition according to item 34 or 35, wherein the PEG lipid is

[chemical structure]

[1011] wherein n has a mean value ranging from 30 to 60, preferably wherein n has a mean value of about 45, 46, 47, 48, 49, 50, 51, 52, 53, 54, most preferably wherein n has a mean value of 49.

[1012] Item 37:

[1013] Composition according to any one of items 27 to 36, wherein the LNP comprises one or more neutral lipids and/or a steroid or steroid analogues.

[1014] Item 38:

[1015] Composition according to item 37, wherein the neutral lipid is selected from the group comprising distearoylphosphatidylcholine (DSPC), dioleoylphosphatidylcholine (DOPC), dipalmitoylphosphatidylcholine (DPPC), dioleoylphosphatidylglycerol (DOPG), dipalmitoylphosphatidylglycerol (DPPG), dioleoyl-phosphatidylethanolamine (DOPE), palmitoyloleoylphosphatidylcholine (POPC), palmitoyloleoyl-phosphatidylethanolamine (POPE) and dioleoyl-phosphatidylethanolamine 4-(N-maleimidomethyl)-cyclohexane-1carboxylate (DOPE-mal), dipalmitoyl phosphatidyl ethanolamine (DPPE), dimyristoylphosphoethanolamine (DMPE), distearoyl-phosphatidylethanolamine (DSPE), 16-O-monomethyl PE, 16-O-dimethyl PE, 18-1-trans PE, 1-stearioyl-2-oleoylphosphatidyethanol amine (SOPE), and 1,2-dielaidoyl-sn-glycero-3-phophoethanolamine (transDOPE).

[1016] Item 39:

[1017] Composition according to item 37 or 38, wherein the neutral lipid is 1,2-distearoyl-sn-glycero-3-phosphocholine (DSPC), and wherein the molar ratio of the cationic lipid to DSPC is optionally in the range from about 2:1 to 8:1.

[1018] Item 40:

[1019] Composition according to item 37, wherein the steroid is cholesterol, and wherein the molar ratio of the cationic lipid to cholesterol is optionally in the range from about 2:1 to 1:1

[1020] Item 41:

[1021] Composition according to any one of items 27 to 40, wherein the LNP essentially consists of
[1022] (i) at least one cationic lipid, preferably as defined in any one of items 28 to 33;
[1023] (ii) a neutral lipid, preferably as defined in any one of items 37 to 39;
[1024] (iii) a steroid or steroid analogue, preferably as defined in item 40; and
[1025] (iv) a PEG-lipid, e.g. PEG-DMG or PEG-cDMA, preferably as defined in any one of items 34 to 36,

[1026] wherein (i) to (iv) are in a molar ratio of about 20-60% cationic lipid, 5-25% neutral lipid, 25-55% sterol, and 0.5-15% PEG-lipid.

[1027] Item 42:

[1028] A vaccine comprising at least one RNA as defined in any one of items 1 to 17, or the composition as defined in any one of items 18 to 41.

[1029] Item 43:

[1030] Vaccine according to item 42, wherein the at least one RNA as defined in any one of items 1 to 17, or the composition as defined in any one of items 18 to 41 elicits an adaptive immune response.

[1031] Item 44:

[1032] A Kit or kit of parts comprising at least one RNA as defined in any one of items 1 to 17, the composition as defined in any one of items 18 to 41, and/or the vaccine as defined in any one of items 42 or 43, optionally comprising a liquid vehicle for solubilising, and optionally technical instructions providing information on administration and dosage of the components.

[1033] Item 45:

[1034] Kit or kit of parts according to item 44 comprising at least the following components
[1035] a) at least one RNA as defined in any one of items 1 to 17 encoding at least one antigenic peptide or protein derived from a LASV, preferably derived from GPC or prefusion-stabilized GPC, wherein said RNA is preferably complexed with one or more lipids thereby forming lipid nanoparticles (LNP); and
[1036] b) at least one, two or more further RNA species as defined in any one of items 1 to 17 each encoding an antigenic peptide or protein derived from a LASV, preferably derived from NP or Z, wherein each of said further RNA species are preferably complexed with one or more lipids thereby forming lipid nanoparticles (LNP),

[1037] wherein components a) and b) are provided as separate entities or as a single entity.

[1038] Item 46:

[1039] Kit or kit of parts according to item 45 or 46 further comprising Ringer lactate solution.

[1040] Item 47:

[1041] RNA as defined in any one of items 1 to 17, the composition as defined in any one of items 18 to 41, the vaccine as defined in any one of items 42 or 43, or the kit or kit of parts as defined in item 44 to 46 for use as a medicament.

[1042] Item 48:

[1043] RNA as defined in any one of items 1 to 17, the composition as defined in any one of items 18 to 41, the vaccine as defined in any one of items 42 or 43, or the kit or kit of parts as defined in item 44 to 46 for use in the treatment or prophylaxis of an infection with a virus, preferably with LASV, or a disorder related to such an infection.

[1044] Item 49:

[1045] A method of treating or preventing an infection with a LASV, or a disorder related to such an infection, wherein the method comprises applying or administering to a subject in need thereof the at least one RNA as defined in any one of items 1 to 17, the composition as defined in any one of items 18 to 41, the vaccine as defined in any one of items 42 or 43, or the kit or kit of parts as defined in item 44 to 46.

[1046] Brief Description of Tables and Lists

[1047] List 1: LASV clade I or LASV lineage I members

[1048] List 2: LASV clade II or LASV lineage II members

[1049] List 3: LASV clade III or LASV lineage III members

[1050] List 4: LASV clade IV or LASV lineage IV members

[1051] List 5: LASV clade V or LASV lineage V members

[1052] List 6: LASV clade VI or LASV lineage VI members

[1053] Table 1: Human codon usage table with frequencies indicated for each amino acid

[1054] Table 2: Preferred LASV Glycoprotein (GPC) constructs

[1055] Table 3.1: Preferred LASV prefusion-stabilized (GPCmut1) constructs

[1056] Table 3.2: Preferred LASV prefusion-stabilized (GPCmut2) constructs

[1057] Table 3.3: Preferred LASV prefusion-stabilized (GPCmut3) constructs

[1058] Table 3.4: Preferred LASV prefusion-stabilized (GPCmut4) constructs

[1059] Table 3.5: Preferred LASV prefusion-stabilized (GPCmut5) constructs

[1060] Table 3.6: Preferred LASV prefusion-stabilized (GPCmut6) constructs

[1061] Table 3.7: Preferred LASV prefusion-stabilized (GPCmut7) constructs

[1062] Table 3.8: Preferred LASV prefusion-stabilized (GPCmut8) constructs

[1063] Table 3.9: Preferred LASV prefusion-stabilized (GPCmut9) constructs

[1064] Table 3.10: Preferred LASV prefusion-stabilized (GPCmut10) constructs

[1065] Table 3.11: Preferred LASV prefusion-stabilized (GPCmut11) constructs

[1066] Table 3.12: Preferred LASV prefusion-stabilized (GPCmut12) constructs

[1067] Table 3.13: Preferred LASV prefusion-stabilized (GPCmut13) constructs

[1068] Table 4: Preferred LASV Nucleoprotein (NP) constructs

[1069] Table 4.1: Preferred LASV Nucleoprotein (SP-HsPLAT_NP) constructs

[1070] Table 4.2: Preferred LASV Nucleoprotein (SP-HsALB_NP) constructs

[1071] Table 4.3: Preferred LASV Nucleoprotein (SP-IgE_NP) constructs

[1072] Table 5: Preferred LASV Zinc-binding matrix protein (Z) constructs

[1073] Table 6: Representative lipid compounds derived from formula (III)

[1074] Table 7: RNA constructs used in the Examples section

[1075] Table 8: Animal groups and vaccination schedule of Example 2 (see Examples section)

[1076] Table 9: Animal groups and vaccination schedule of Example 3 (see Examples section)

[1077] Table 10: Animal groups and vaccination schedule of Example 4 (see Examples section)

[1078] Table 11: Animal groups and vaccination schedule of Example 5 (see Examples section)

[1079] Table 12: Tested RNA constructs of Example 6 (see Examples section)

[1080] Table 13: mRNA designs for Western blot analysis (see Examples section)

[1081] Table 14: Animal groups and vaccination schedule of Example 7 (see Examples section)

[1082] Table 15: Animal groups and vaccination schedule of Example 8 (see Examples section)

[1083] Table 16: Animal groups and vaccination schedule of Example 9 (see Examples section)

### BRIEF DESCRIPTION OF THE DRAWINGS

[1084] FIG. 1: shows that LNP formulated RNA encoding LASV GPC induced the formation of specific binding antibodies in mice. A: IgG1 titers on day 21; B: IgG1 titers on day 35; C: IgG2a titers on day 21; D: IgG2a titers on day 35. Vaccination schedule and animal groups see Table 8. Further details are provided in Example 2.

[1085] FIG. 2: shows that LNP-formulated RNA encoding LASV GPC induced the T-cell responses. Vaccination schedule and animal groups see Table 8. Further details are provided in Example 2.

[1086] FIG. 3: shows that LNP-formulated RNA encoding LASV GPC with different mRNA design induced the formation of specific binding antibodies in mice. The experiment was performed as described in Example 4. Further construct details are provided in Table 10.

[1087] FIG. 4: shows that LNP-formulated RNA encoding LASV GPC with different mRNA designs induced T-cell responses using an intracellular cytokine staining assay. A:% of CD8/INFgamma/TNF positive T cells. B: % of CD4/INFgamma/TNF positive T cells. The experiment was performed as described in Example 4. Further construct details are provided in Table 10.

[1088] FIG. 5: shows that LNP-formulated RNA encoding an prefusion-stabilized GPC construct induced the formation of specific binding antibodies in mice. The experiment was performed as described in Example 5. Further details are provided in Table 11.

[1089] FIG. 6: shows that LNP-formulated RNA encoding an optimized LASV GPC construct induced T-cell responses using an intracellular cytokine staining assay. A:% of CD8/INFgamma/TNF positive T cells. B: % of CD4/INFgamma/TNF positive T cells. The experiment was performed as described in Example 5. Further details are provided in Table 11.

[1090] FIG. 7: shows that optimized GPC constructs encoded by optimized mRNA designs express GPC proteins. The experiment was performed as described in Example 6. Further details are provided in Table 12.

[1091] FIG. 8: shows that optimized GPC constructs encoded by optimized mRNA designs express GPC proteins. The experiment was performed as described in Example 6. Further details are provided in Table 12.

### EXAMPLES

[1092] In the following, particular examples illustrating various embodiments and aspects of the invention are presented. However, the present invention shall not to be limited in scope by the specific embodiments described herein. The following preparations and examples are given to enable those skilled in the art to more clearly understand and to practice the present invention. The present invention, however, is not limited in scope by the exemplified embodiments, which are intended as illustrations of single aspects of the invention only, and methods which are functionally equivalent are within the scope of the invention. Indeed, various modifications of the invention in addition to those described herein will become readily apparent to those skilled in the art from the foregoing description, accompanying figures and the examples below. All such modifications fall within the scope of the appended claims.

### Example 1

### Preparation of DNA and RNA Constructs and Compositions for In Vitro and In Vivo Experiments

[1093] The present Example provides methods of obtaining the RNA of the invention as well as methods of generating a composition or a vaccine of the invention.

[1094] 1.1. Preparation of DNA and RNA constructs:

[1095] DNA sequences encoding different LASV antigenic proteins were prepared and used for subsequent RNA in vitro transcription. Said DNA sequences were prepared by modifying the wild type cds sequences by introducing an optimized cds (opt1, opt2, opt4, opt6, opt11). Sequences were introduced into a plasmid vector to comprise (i) advantageous 3′-UTR sequences derived from PSMB3, ALB7, alpha-globin (“muag”), or CASP1 and (ii) advantageous 5′-UTR sequences selected from HSD17B4, RPL32, NDUFA4, additionally comprising (iii) a stretch of adenosines, and optionally a histone-stem-loop structure and/or a stretch of 30 cytosines (Table 7).

[1096] Obtained plasmid DNA was transformed and propagated in bacteria using common protocols and plasmid DNA was extracted, purified, and used for subsequent RNA in vitro transcription (see section 1.2.).

[1097] Alternatively, DNA plasmids prepared according to paragraph 1 are used as DNA template for PCR-based amplification. The generated PCR products are purified and used for subsequent RNA in vitro transcription (see section 1.3.).

[1098] 1.2. RNA In Vitro Transcription from Plasmid DNA Templates:

[1099] DNA plasmids prepared according to paragraph 1.1 were enzymatically linearized using a restriction enzyme (e.g. EcoRI, sapI or HindIII) and used for DNA dependent RNA in vitro transcription using T7 RNA polymerase in the presence of a nucleotide mixture (ATP/GTP/CTP/UTP) and cap analog (e.g., m7GpppG, m7G(5′)ppp(5′)(2′OMeA)pG or 3′-O-Me-m7G(5′)ppp(5′)G)) under suitable buffer conditions. The obtained RNA constructs were purified using RP-HPLC (PureMessenger®, CureVac AG, Tübingen, Germany; WO2008/077592) and used for in vitro and in vivo experiments. RNA for clinical development is produced under current good manufacturing practice e.g. according to WO2016/180430, implementing various quality control steps on DNA and RNA level. The generated RNA sequences/constructs are provided in Table 7 with the encoded antigenic protein and the respective UTR elements indicated therein. In addition to the information provided in Table 7, further information relating to specific RNA SEQ-ID NOs may be derived from the information provided under <223> identifier provided in the ST.25 sequence listing.

[1100] Alternatively, enzymatically linearized DNA is used for DNA dependent RNA in vitro transcription using an RNA polymerase in the presence of a modified nucleotide mixture (ATP, GTP, CTP, N(1)-methylpseudouridine (m1ψ), pseudouridine (ψ) or 5-methoxyuridine) and cap analog (m7GpppG, m7G(5′)ppp(5′)(2′OMeA)pG or m7G(5′)ppp(5′)(2′OMeG)pG) under suitable buffer conditions. The obtained m1ψ-modified, ψ-modified or 5-methoxyuridine modified RNA is purified e.g. as explained above and used for further experiments.

[1101] Some RNA constructs are in vitro transcribed in the absence of a cap analog. The cap-structure (cap0 or cap1) is added enzymatically using capping enzymes as commonly known in the art. In short, in vitro transcribed RNA is capped using a capping kit to obtain cap0-RNA. Cap0-RNA may be additionally modified using Cap specific 2′-O-methyltransferase to obtain cap1-RNA. CapO-RNA or Cap1-RNA is purified e.g. as explained above and used for further experiments.

[1102] 1.3. RNA In Vitro Transcription from PCR Amplified DNA Templates:

[1103] Purified PCR amplified DNA templates prepared according to paragraph 1.1 are transcribed in vitro using DNA dependent T7 RNA polymerase in the presence of a nucleotide mixture (ATP/GTP/CTP/UTP) and cap analog (m7GpppG, m7G(5′)ppp(5′)(2′OMeA)pG or 3′-O-Me-m7G(5′)ppp(5′)G)) under suitable buffer conditions. Alternatively, PCR amplified DNA is transcribed in vitro using DNA dependent T7 RNA polymerase in the presence of a modified nucleotide mixture (ATP, GTP, CTP, N(1)-methylpseudouridine (m1ψ), pseudouridine (ψ) or 5-methoxyuridine) and cap analog (m7GpppG, m7G(5′)ppp(5′)(2′OMeA)pG or 3′-O-Me-m7G(5′)ppp(5′)G)) under suitable buffer conditions. Some RNA constructs are in vitro transcribed in the absence of a cap analog and the cap-structure (cap0 or cap1) is added enzymatically using capping enzymes as commonly known in the art. The obtained RNA is purified e.g. as explained above and used for further experiments.

TABLE 7
RNA constructs used in the present examples

| | | | | | 5′-UTR/ | SEQ ID | SEQ ID |
|---|---|---|---|---|---|---|---|
| | Virus | Virus | LASV | CDS | 3′-UTR; | NO: | NO: |
| RNA ID | Strain | Clade | Antigen | opt. | UTR Design | RNA | Protein |
| R6023/R6630 | Josiah | IV | GPC | opt1 | RPL32/ALB7; i-2 | 3087 | 1 |
| R6024 | Josiah | IV | NP | opt1 | RPL32/ALB7; i-2 | 10656 | 7547 |
| R6025 | Josiah | IV | Z | opt1 | RPL32/ALB7; i-2 | 13429 | 11166 |
| R6026/R6631 | LP | I | GPC | opt1 | RPL32/ALB7; i-2 | 3088 | 2 |
| R6027/R6632 | 803213 | II | GPC | opt1 | RPL32/ALB7; i-2 | 3089 | 3 |
| R6028/R6633 | GA391 | III | GPC | opt1 | RPL32/ALB7; i-2 | 3090 | 4 |
| R6717 | Josiah | IV | GPC | opt1 | —/muag; i-3 | 3343 | 1 |
| R7278 | Josiah | IV | GPC | opt1 | HSD17B4/PSMB3; a-1 | 2319 | 1 |
| R7279 | Josiah | IV | GPC | opt1 | HSD17B4/CASP1; b-4 | 2831 | 1 |
| R7280 | Josiah | IV | GPC | opt1 | Ndufa4/PSMB3; a-2 | 2575 | 1 |
| R7286 | Josiah | IV | GPC | opt2 | —/muag; i-3 | 3375 | 1 |
| R7287 | Josiah | IV | GPC | opt4 | —/muag; i-3 | 3439 | 1 |
| R7288 | Josiah | IV | GPC | opt6 | —/muag; i-3 | 3503 | 1 |
| R7289 | Josiah | IV | GPC | opt11 | —/muag; i-3 | 3535 | 1 |
| R7390 | Josiah | IV | GPCmut1 | opt1 | —/muag; i-3 | 7291 | 3567 |
| R8477 | Josiah | IV | GPC | opt1 | —/muag; i-3 | 14055 | 1 |
| R8471 | Josiah | IV | GPC | opt1 | —/muag; i-3 | 14920 | 1 |
| R8472 | Josiah | IV | GPCmut1 | opt1 | —/muag; i-3 | 16360 | 3567 |
| R8513 | Josiah | IV | GPCmut2 | opt1 | —/muag; i-3 | 24261 | 22949 |
| R8516 | Josiah | IV | GPCmut3 | opt1 | —/muag; i-3 | 25957 | 24645 |
| R8473 | Josiah | IV | GPC | opt1 | —/muag; i-3 | 14920 | 1 |
| R8474 | Josiah | IV | GPCmut1 | opt1 | —/muag; i-3 | 16360 | 3567 |
| R8514 | Josiah | IV | GPCmut2 | opt1 | —/muag; i-3 | 24261 | 22949 |
| R8517 | Josiah | IV | GPCmut3 | opt1 | —/muag; i-3 | 25957 | 24645 |
| R8475 | Josiah | IV | GPC | opt1 | HSD17B4/PSMB3; a-1 | 14152 | 1 |
| R8476 | Josiah | IV | GPCmut1 | opt1 | HSD17B4/PSMB3; a-1 | 15336 | 3567 |
| R8515 | Josiah | IV | GPCmut2 | opt1 | HSD17B4/PSMB3; a-1 | 23237 | 22949 |
| R8518 | Josiah | IV | GPCmut3 | opt1 | HSD17B4/PSMB3; a-1 | 24933 | 24645 |
| R8479 | Josiah | IV | GPCmut13 | opt1 | —/muag; i-3 | 41893 | 41605 |

[1104] 1.4. Preparation of an LNP Formulated RNA Composition:

[1105] Lipid nanoparticles (LNP), cationic lipids, and polymer conjugated lipids (PEG-lipid) were prepared and tested essentially according to the general procedures described in WO2015/199952, WO2017/004143 and WO2017/075531, the full disclosures of which are incorporated herein by reference. LNP formulated RNA was prepared using an ionizable amino lipid (cationic lipid), phospholipid, cholesterol and a PEGylated lipid. Briefly, cationic lipid compound of formula 111-3, DSPC, cholesterol, and PEG-lipid of formula IVa were solubilized in ethanol at a molar ratio (%) of approximately 50:10:38.5:1.5 or 47.4:10:40.9:1.7. LNPs comprising cationic lipid compound of formula III-3 and PEG-lipid compound of formula IVa were prepared at a ratio of RNA to total Lipid of 0.03-0.04 w/w. The RNA was diluted to 0.05 mg/mL to 0.2 mg/mL in 10 mM to 50 mM citrate buffer, pH4. Syringe pumps were used to mix the ethanolic lipid solution with the RNA aqueous solution at a ratio of about 1:5 to 1:3 (vol/vol) with total flow rates above 15 ml/min. The ethanol was then removed and the external buffer replaced with a PBS buffer comprising Sucrose by dialysis. Finally, the lipid nanoparticles were filtered through a 0.2 um pore sterile filter and the LNP-formulated RNA composition was adjusted to about 1 mg/ml total RNA. Lipid nanoparticle particle diameter size was 60-90 nm as determined by quasi-elastic light scattering using a Malvern Zetasizer Nano (Malvern, UK). For other cationic lipid compounds mentioned in the present specification, the formulation process is essentially similar. The obtained LNP-formulated RNA composition (1 mg/ml total RNA) was diluted to the desired target concentration using Saline before in vivo application.

### Example 2

### Vaccination of Mice with LNP-Formulated mRNA Encoding LASV GPC

[1106] The present Example shows that LNP-formulated mRNA encoding LASV GPC induces strong humoral and cellular immune responses in mice after i.m. immunization.

[1107] RNA encoding LASV GPC was generated according to Example 1 (R6717; see Table 7) and formulated in LNPs according to Example 1.4. Female Balb/c mice were vaccinated on day 0 and day 21 intramuscularly (i.m) with doses provided in Table 8. Mice injected with saline (0.9% NaCl buffer) served as negative controls.

TABLE 8
Animal groups and vaccination schedule of Example 2

| | | | SEQ ID NO: | SEQ ID NO: | | |
|---|---|---|---|---|---|---|
| Group | Mice | Treatment | Protein | mRNA | Dose | Route |
| 1 | 6 | R6717; LNP formulated | 1 | 3343 | 10 ug | i.m. |
| 2 | 6 | R6717; LNP formulated | 1 | 3343 | 5 ug | i.m. |
| 3 | 6 | R6717; LNP formulated | 1 | 3343 | 2 ug | i.m. |
| 4 | 6 | 0.9% NaCl buffer | — | — | — | i.m. |

[1108] Determination of Binding Antibody Titers:

[1109] Serum samples were collected (on day 21 and day 35) and binding antibodies (IgG1 and IgG2a) were determined by ELISA using LASV GP2 protein (LASV GA391, clade I; The Native Antigen Company) for coating. Coated plates were incubated using given serum dilutions. Binding of specific antibodies to the GA391 protein was detected using biotinylated isotype specific anti-mouse antibodies in combination with streptavidin-HRP (horse radish peroxidase) with Amplex UltraRed substrate. ELISA results are shown in FIG. 1.

[1110] Intracellular Cytokine Staining (ICS):

[1111] Splenocytes from vaccinated and control mice were isolated according to a standard protocol. Briefly, isolated spleens are grinded through a cell strainer and washed in PBS/1% FBS followed by red blood cell lysis. After an extensive washing step with PBS/1% FBS, splenocytes were seeded into 96-well plates (2×10⁶ cells/well). Cells were stimulated with LASV-specific CD4 and CD8 peptide mix and 2.5 ug/ml of an anti-CD28 antibody (BD Biosciences) for 6 hours at 37° C. in the presence of the mixture of GolgiPlug™/GolgiStop™ (Protein transport inhibitors containing Brefeldin A and Monensin, respectively; BD Biosciences). After stimulation cells were washed and stained for intracellular cytokines using the Cytofix/Cytoperm reagent (BD Biosciences) according to the manufacturer's instructions. The following antibodies were used for staining: CD3-FITC (1:100), CD8-PE-Cy7 (1:200), TNF-PE (1:100), IFNγ-APC (1:100) (eBioscience), CD4-BD Horizon V450 (1:200) (BD Biosciences) and incubated with Fcy-block diluted 1:100. Aqua Dye was used to distinguish live/dead cells (Invitrogen). Cells were collected using a Canto II flow cytometer (Beckton Dickinson). Flow cytometry data was analysed using FlowJo software (Tree Star, Inc.). The result of the experiment is shown in FIG. 2.

[1112] Results:

[1113] As can be seen from FIG. 1, the LNP formulated mRNA vaccine induce specific binding antibodies in mice. The data shows (i) that the mRNA construct is expressed upon injection in vivo, (ii) that the mRNA vaccine induces binding antibody responses after i.m. injection in mice, and that (iii) said binding antibody responses are induced in a dose dependent manner. Moreover, as shown in FIG. 2, LNP formulated mRNA vaccine induces CD4+ T cell responses after i.m. injection in a dose dependent manner in mice.

### Example 3

### Vaccination of Mice with Optimized LNP-Formulated mRNA Encoding LASV GPC

[1114] As demonstrated in Example 2, LNP-formulated mRNA encoding LASV GPC induces both specific humoral and specific cellular immune responses in mice. To further optimize the LASV RNA construct, e.g. to increase the expression of the RNA or the stability of the antigen, constructs comprising advantageous 3′ UTR and 5′ UTR elements (SEQ ID NO: 2319, 2831, 2575), different cds optimizations (SEQ ID NOs: 3375, 3439, 3503, 3535), or an optimized antigen (RNA construct encoding stabilized GPC; (SEQ ID NO: 7291)) are generated according to Example 1 and tested in vivo. Female Balb/c mice are vaccinated with said optimized RNA constructs on day 0 and day 21 intramuscularly (i.m) with doses provided in Table 8. Serum samples from day 21 and 35 are analyzed for binding antibody titers (as explained above) and analysis of T-cell responses is performed on splenocytes (day 35; as explained above).

TABLE 9
Animal groups and vaccination schedule of Example 3

| | | | SEQ ID NO: | | |
|---|---|---|---|---|---|
| Group | Mice | Treatment | mRNA | Dose | Route |
| 1 | 6 | R7278; LNP formulated | 2319 | 5 ug | i.m. |
| 2 | 6 | R7279; LNP formulated | 2831 | 5 ug | i.m. |
| 3 | 6 | R7280; LNP formulated | 2575 | 5 ug | i.m. |
| 4 | 6 | R7286; LNP formulated | 3375 | 5 ug | i.m. |
| 5 | 6 | R7287; LNP formulated | 3439 | 5 ug | i.m. |
| 6 | 6 | R7288; LNP formulated | 3503 | 5 ug | i.m. |
| 7 | 6 | R7289; LNP formulated | 3535 | 5 ug | i.m. |
| 8 | 6 | R7290; LNP formulated | 7291 | 5 ug | i.m. |
| 9 | 6 | 0.9% NaCl buffer | — | — | i.m. |

### Example 4

### Vaccination of Mice with Optimized LNP-Formulated mRNA Encoding LASV GPC

[1115] The present Example shows that LNP-formulated mRNA designs encoding LASV GPC induced strong humoral and cellular immune responses in mice after i.m. immunization.

[1116] RNA encoding LASV GPC was generated according to Example 1 (see Table 7) and formulated in LNPs according to Example 1.4. Female Balb/c mice were vaccinated on day 0 and 21 intramuscularly (i.m) with doses of 5 ug (further details provided in Table 10).

TABLE 10
Animal groups and vaccination schedule of Example 4

| | | | | 5′-UTR/ | |
|---|---|---|---|---|---|
| | | | | 3′-UTR; | SEQ ID NO: |
| Group | Mice | RNA ID | Treatment | UTR Design | mRNA |
| A | 5 | — | 0.9% NaCl buffer | —/— | — |
| | | | (negative control) | | |
| B | 5 | R6717 | GPC | —/muag | 3343 |
| C | 5 | R7278 | GPC | HSD17B4/PSMB3, a-1 | 2319 |
| D | 5 | R7279 | GPC | HSD17B4/CASP1, b-4 | 2831 |
| E | 5 | R7280 | GPC | Ndufa4/PSMB3, a-2 | 2575 |

[1117] Determination of Binding Antibody Titers:

[1118] Serum samples were collected (on day 21 and day 35) and binding antibodies (IgG1 and IgG2a) were determined by ELISA using LASV GP2 protein (LASV GA391, clade I; The Native Antigen Company) for coating. Coated plates were incubated using given serum dilutions. Binding of specific antibodies to the GA391 protein was detected using biotinylated isotype specific anti-mouse antibodies in combination with streptavidin-HRP (horse radish peroxidase) with Amplex UltraRed substrate. ELISA results are shown in FIG. 3.

[1119] Intracellular Cytokine Staining (ICS):

[1120] Splenocytes from vaccinated and control mice (see Table 10) were isolated according to a standard protocol. Briefly, isolated spleens were grinded through a cell strainer and washed in PBS/1%FBS followed by red blood cell lysis. After an extensive washing step with PBS/1%FBS, splenocytes were seeded into 96-well plates (2×10⁶ cells/well). Cells were stimulated with a LASV-specific CD4 and CD8 peptide mix and 2.5 ug/ml of an anti-CD28 antibody (BD Biosciences) for 6 hours at 37° C. in the presence of the mixture of GolgiPlug™/GolgiStop™ (Protein transport inhibitors containing Brefeldin A and Monensin, respectively; BD Biosciences). After stimulation cells were washed and stained for intracellular cytokines using the Cytofix/Cytoperm reagent (BD Biosciences) according to the manufacturer's instructions. The following antibodies were used for staining: CD3-FITC (1:100), CD8-PE-Cy7 (1:200), TNF-PE (1:100), IFNγ-APC (1:100) (eBioscience), CD4-BD Horizon V450 (1:200) (BD Biosciences) and incubated with Fcγ-block diluted 1:100. Aqua Dye was used to distinguish live/dead cells (Invitrogen). Cells are collected using a Canto II flow cytometer (Beckton Dickinson). Flow cytometry data was analysed using FlowJo software (Tree Star, Inc.). The result of the experiment is shown in FIG. 4.

[1121] Results:

[1122] As can be seen from FIG. 3, the LNP formulated mRNA vaccine with different mRNA designs (5′-UTR and 3′-UTR-combinations, see Table 10) induced specific binding IgG1 and IgG2a antibodies in mice. The results show (i) that the mRNA construct was expressed upon injection in vivo and (ii) that the mRNA vaccine induced binding antibody responses after i.m. injection in mice.

[1123] Moreover, as shown in FIG. 4A, LNP formulated mRNA vaccine with different mRNA designs (5′-UTR and 3′-UTR-combinations, see Table 10) induced CD8+ T cell responses after i.m. injection in in mice. In addition, the LNP formulated mRNA vaccine induced CD4+ T cell responses (see FIG. 4B). Both T-cell responses play important roles in the adaptive immune response against viral pathogens such as LASV.

### Example 5

### Vaccination of Mice with LNP-Formulated mRNA Encoding an Optimized LASV GPC Construct

[1124] The present Example shows that LNP-formulated RNA encoding a LASV prefusion stabilized GPC induce strong humoral and cellular immune responses in mice after i.m. immunization.

[1125] Determination of Binding Antibodies:

[1126] HeLa cells were transfected with 2 ug RNA prefusion-stablized GPC (GPCmut1, R7390) using Lipofectamine. 20 h post transfection cells were harvested, counted and seeded at 1×10⁵ cells/well of a 96 well U-bottom plate. Cells were incubated with serum (diluted 1:50) collected two weeks post second immunization of Balb/c mice (as previously described in Example 4) with 5 ug R7390 (RNA encoding GPCmut1, Group B of Table 11) or NaCl buffer (group A), followed by secondary anti-mouse FITC-conjugated antibody. Cells were acquired on a BD FACS Canto II and analyzed using FlowJo software. The result of the experiment is shown in FIG. 5.

[1127] Intracellular Cytokine Staining (ICS):

[1128] Splenocytes from vaccinated and control mice (see Table 11, Group A-C) were isolated according to a standard protocol. Briefly, isolated spleens are grinded through a cell strainer and washed in PBS/1% FBS followed by red blood cell lysis. After an extensive washing step with PBS/1% FBS, splenocytes were seeded into 96-well plates (2×10⁶ cells/well). Cells were stimulated with a LASV-specific CD4 and CD8 peptide mix and 2.5 ug/ml of an anti-CD28 antibody (BD Biosciences) for 6 hours at 37° C. in the presence of the mixture of GolgiPlug™/GolgiStop™ (Protein transport inhibitors containing Brefeldin A and Monensin, respectively; BD Biosciences). After stimulation cells were washed and stained for intracellular cytokines using the Cytofix/Cytoperm reagent (BD Biosciences) according to the manufacturer's instructions. The following antibodies were used for staining: CD3-FITC (1:100), CD8-PE-Cy7 (1:200), TNF-PE (1:100), IFNγ-APC (1:100) (eBioscience), CD4-BD Horizon V450 (1:200) (BD Biosciences) and incubated with Fcγ-block diluted 1:100. Aqua Dye was used to distinguish live/dead cells (Invitrogen). Cells are collected using a Canto II flow cytometer (Beckton Dickinson). Flow cytometry data was analysed using FlowJo software (Tree Star, Inc.) The result of the experiment is shown in FIG. 6.

TABLE 11
Animal groups and vaccination schedule of Example 5

| | | | Construct | SEQ ID NO: | SEQ ID NO: |
|---|---|---|---|---|---|
| Group | Mice | Treatment | Design | mRNA | mRNA |
| A | 5 | 0.9% NaCl | — | — | |
| | | buffer | | | |
| | | (negative | | | |
| | | control) | | | |
| B | 5 | R7390 | GPCmut1 | 7291 | 3567 |
| C | 5 | R6717 | GPC | 3343 | 1 |

[1129] Results:

[1130] As can be seen from FIG. 5, the LNP formulated mRNA encoding a LASV prefusion-stabilized GPC construct (see Table 11, Group B) induced specific binding antibodies in mice. The result shows (i) that the prefusion-stabilized GPC construct was expressed upon injection in vivo and additionally (ii) that the mRNA construct induced binding antibody responses after i.m. injection in mice.

[1131] Additionally, as shown in FIG. 6A and FIG. 6B the LNP formulated mRNA encoding a LASV prefusion-stabilized GPC construct induced robust CD8 and CD4 positive T cell responses. In addition the optimized LASV prefusion-stabilized GPC mRNA vaccine (Group B, see FIG. 6A and B) showed highly improved T cell responses compared to the wt LASV GPC construct (Group C, see FIGS. 6A and B).

### Example 6

### In Vitro Expression Analysis of Optimized mRNA Designs Encoding LASV GPC and Prefusion-Stabilized GPC constructs

[1132] The present Example shows that optimized mRNA designs according to the invention (UTR-combination a-1, cap1, and/or poly(A)-sequence located (exactly) at the 3′ end) encoding different optimized LASV GPC constructs express GPC and prefusion-stablized GPC proteins. As a detection antibody, the mouse 37.7H monoclonal antibody was used, which is directed against the quaternary GPC-B epitope. The use of this antibody gives indication for a correct conformation of the heterotrimeric GPC protomer to potentially induce neutralizing antibodies that achieve neutralization by stabilizing LASV GPC in its prefusion conformation.

[1133] FACS Analysis:

[1134] HeLa cells were transfected with 2 ug of the different mRNA designs (see Table 12) using Lipofectamine. 20 h post transfection cells were harvested, and seeded in a 96 well U-bottom plate. Cells were incubated with α-GPC [37.7H] antibody which binds to a quaternary GPC-B epitope bridging the LASV GP1 and GP2 subunits,)) encoded by different mRNA constructs (see Table 12) followed by secondary anti-mouse FITC-conjugated antibody. Cells were acquired on a BD FACS Canto II and analyzed using FlowJo software. The result of the experiment is shown in FIG. 7.

TABLE 12
Tested RNA constructs of Example 6

| | | | 5′-UTR/ | 5′-cap | | |
|---|---|---|---|---|---|---|
| | | | 3′-UTR; | structure/ | Modified | SEQ ID |
| Group | RNA ID | Construct Design | UTR Design | 3′ terminus | nucleotides | NO: mRNA |
| A | R8477 | GPC full-length | —/muag | cap1/ | — | 14055 |
| | | | | A64-N5-hSL-N5 | | |
| B | R8471 | GPC full-length | —/muag | cap1/ | — | 14920 |
| | | | | hSL-A64-N5 | | |
| C | R8472 | GPCmut1 | —/muag | cap1/ | — | 16360 |
| | | | | hSL-A64-N5 | | |
| D | R8513 | GPCmut2 | —/muag | cap1/ | — | 24261 |
| | | | | hSL-A64-N5 | | |
| E | R8473 | GPC full-length | —/muag | cap1/ | Ψ | 14920 |
| | | | | hSL-A64-N5 | | |
| F | R8474 | GPCmut1 | —/muag | cap1/ | Ψ | 16360 |
| | | | | hSL-A64-N5 | | |
| G | R8514 | GPCmut2 | —/muag | cap1/ | Ψ | 24261 |
| | | | | hSL-A64-N5 | | |
| H | R8475 | GPC full-length | HSD17B4/ | cap1/ | — | 14152 |
| | | | PSMB3; a-1 | hSL-A100 | | |
| I | R8476 | GPCmut1 | HSD17B4/ | cap1/ | — | 15336 |
| | | | PSMB3; a-1 | hSL-A100 | | |
| J | R8515 | GPCmut2 | HSD17B4/ | cap1/ | — | 23237 |
| | | | PSMB3; a-1 | hSL-A100 | | |
| K | | Negative control (WFI = | — | — | — | — |
| | | water for injection) | | | | |

[1135] Western Blot Analysis:

[1136] HeLa cells were transfected with 2 ug of the respective mRNA designs encoding LASV GPC (see Table 13), with a negative control (water for injection) and as a positive control (irradiated LASV Josiah strain, clade IV). 20 h post transfection cells were harvested, lysed and subjected to SDS-PAGE followed by Western blot. For the detection a-GPC [37.7H] antibody was used and a goat anti-mouse IgG IRDye® 800CW antibody (1:10000; Li-Cor) as secondary antibody. The a-GPC [37.7H] antibody binds to a quaternary GPC-B epitope bridging the LASV GP1 and GP2 subunits. The result of the experiment is shown in FIG. 8.

TABLE 13
mRNA designs for Western blot analysis

| | | | 5′-UTR/ | 5′-cap | | |
|---|---|---|---|---|---|---|
| | | | 3′-UTR; | structure/ | Modified | mRNA |
| Group | RNA ID | Construct Design | UTR Design | 3′ terminus | nucleotides | SEQ ID NO |
| A | R8471 | GPC full-length | —/muag | cap1/ | — | 14920 |
| | | | | hSL-A64-N5 | | |
| B | R8477 | GPC full-length | —/muag | cap1/ | — | 14055 |
| | | | | A64-N5-hSL-N5 | | |
| C | R8472 | GPCmut1 | —/muag | cap1/ | | 16360 |
| | | | | hSL-A64-N5 | | |
| D | R8513 | GPCmut2 | —/muag | cap1/ | | 24261 |
| | | | | hSL-A64-N5 | | |
| E | R8473 | GPC full-length | —/muag | cap1/ | Ψ | 14920 |
| | | | | hSL-A64-N5 | | |
| F | R8474 | GPCmut1 | —/muag | cap1/ | Ψ | 16360 |
| | | | | hSL-A64-N5 | | |
| G | R8514 | GPCmut2 | —/muag | cap1/ | Ψ | 24261 |
| | | | | hSL-A64-N5 | | |
| H | R8475 | GPC full-length | HSD17B4/ | cap1/ | — | 14152 |
| | | | PSMB3; a-1 | hSL-A100 | | |
| I | R8476 | GPCmut1 | HSD17B4/ | cap1/ | | 15336 |
| | | | PSMB3; a-1 | hSL-A100 | | |
| J | R8515 | GPCmut2 | HSD17B4/ | cap1/ | — | 23237 |
| | | | PSMB3; a-1 | hSL-A100 | | |
| K | | Negative control (WFI = | | | | |
| | | water for injection) | | | | |
| L | | Irradiated LASV (positive | | | | |
| | | control) | | | | |

[1137] Results:

[1138] FIG. 7 shows that all optimized mRNA constructs express a (prefusion-stabilized) GPC protein. The samples D, G and J (see Table 12, encoding prefusion-stabilizd GPC mut2) show higher levels of expressed protein.

[1139] As shown in FIG. 8, all optimized constructs (see Table 13) express a (prefusion-stabilized) GPC protein (about 76 kDa). According to the expression showed via FACS analysis, especially the Groups D, G and J, encoding the prefusion-stabilized GPC mut2 showed an increased expression.

[1140] Through the detection with the 37.7H antibody directed to the quaternary GPC-B epitope, indication for a correct conformation of the GPC trimer to potentially induce neutralizing antibodies is given.

### Example 7

### Analysis of Polyvalent LASV Vaccine Compositions in Guinea Pigs (Challenge)

[1141] The present example shows that LASV mRNA vaccines induce protective immune responses against Lassa virus infection in Hartley guinea pigs. Hartley (outbred) guinea pigs are widely used for studying arenaviral hemorrhagic fevers and for testing potential therapeutics and vaccine candidates. Binding antibodies are measured using ELISA and moreover virus neutralizing antibodies to the vaccine are analyzed. In addition this example shows of the monovalent LASV-GPC lineage IV vaccine as well as the feasibility of a 1-dose regimen.

[1142] Different mRNA designs encoding different LASV GPC constructs are prepared according to Example 1. The mRNAs are formulated with LNPs (see Example 1.4.). The different mRNA vaccine candidates (see Table 14) are applied on day 0 and 28 or only at day 0 and administered intramuscular (i.m.) with different doses of RNA. Blood samples are collected at day 0, 28, 56 and post challenge for determination of humoral immune responses.

[1143] 4 weeks after the last vaccination the groups are challenged with 10⁵ PFU Josiah LASV strain (i.p. route). The groups are observed for 4 weeks after the challenge. The animals are monitored daily for survival, body weight, morbidity index, temperature and viremia. Additional the viral load in lung, spleen and kidney is measured at necropsy.

TABLE 14
Animal groups and vaccination schedule of Example 7

| | Administration | Guinea | |
|---|---|---|---|
| Group | Interval | pigs | Construct Design |
| A | 1 x | 10 | 0.9% NaCl buffer |
| | | | (negative control) |
| B | 1 x | 10 | GPC or prefusion-stabilized GPC |
| C | 2 x | 10 | GPC or prefusion-stabilized GPC |

### Example 8

### Analysis of Polyvalent LASV Vaccine Compositions in Guinea Pigs (Challenge)

[1144] The present example shows the efficacy of the mRNA LASV vaccine to provide protection against heterologous LASV strains or clades, especially that the polyvalent/tetravalent mRNA vaccine provides protection against two LASV viruses from phylogenetically most distant LASV lineages (I and IV) in guinea pigs.

[1145] mRNA designs encoding LASV GPC or prefusion-stabilized GPC are prepared according to Example 1. The mRNAs are formulated with LNPs (see Example 1.4.). The different mRNA vaccine candidates (see Table 15) are applied on day 0 and 28 and administered intramuscular (i.m.) with different doses of RNA. Blood samples are collected at day 0, 28, 56 and post challenge for determination of humoral immune responses.

[1146] 4 weeks after the last vaccination the groups are challenged with 10⁵ PFU Josiah LASV strain (i.p. route). The groups are observed for 4 weeks after the challenge. The animals are monitored daily for survival, body weight, morbidity index, temperature and viremia. Additional the viral load in lung, spleen and kidney is measured at necropsy.

TABLE 15
Animal groups and vaccination schedule of Example 8

| Group | Guinea pigs | Virus Clade | Vaccine composition |
|---|---|---|---|
| A | 10 | — | 0.9% NaCl buffer |
| | | | (negative control) |
| B | 10 | IV | GPC or prefusion-stabilized GPC |
| C | 10 | I + II + | Tetravalent GPC or tetravalent |
| | | III + IV | prefusion-stabilized GPC |

### Example 9

### Analysis of Polyvalent LASV mRNA Vaccine

[1147] The present example shows a tetravalent mRNA vaccine covering Lassa clades I-IV as well as the inclusion of the nucleoprotein (NP) as an additional target of T cell responses to broaden the coverage of the vaccine.

[1148] RNA encoding different Lassa mRNA vaccine encoding GPC or a prefusion-stabilized GPC (see Table 16) was generated according to Example 1 and formulated in LNPs according to Example 1.4. Female CBA/J mice (9 mice per group) were vaccinated on day 0 and day 21 intramuscularly (i.m). Serum is collected at day 21 and 28 to test humoral immune responses. Splenocytes are collected at day 28 to test cellular immune responses via an ICS with LASV-GPC overlapping peptide libraries from lineages IV and I, II, III to analyze cross-reactivity.

TABLE 16
Animal groups and vaccination schedule of Example 9

| Group | Mice | Virus Clade | Vaccine composition |
|---|---|---|---|
| A | 9 | — | 0.9% NaCl buffer (negative control) |
| B | 9 | IV | GPC or prefusion-stabilized GPC and |
| | | | NP or SP-NP |
| C | | IV | NP or SP-NP |
| D | 9 | I + II + | Tetravalent GPC or tetravalent |
| | | II + IV | prefusion-stabilized GPC |
| E | 9 | I | GPC or prefusion-stabilized GPC |
| F | 9 | II | GPC or prefusion-stabilized GPC |
| F | 9 | III | GPC or prefusion-stabilized GPC |
| G | 9 | IV | GPC or prefusion-stabilized GPC |

### Example 9

### Safety, Reactogenicity and Immunogenicity of LASV mRNA Vaccine in Healthy Adults

[1149] To demonstrate safety, reactogenicity and immunogenicity of LASV mRNA vaccine, a phase I clinical trial is initiated.

[1150] For clinical development, RNA is used that has been produced under GMP conditions (e.g. using a procedure as described in WO2016/180430).

[1151] In this LASV mRNA vaccine phase I trial different dosages of the candidate LASV mRNA vaccine will be administered in a one or two-dose schedule to healthy adult subjects. The subjects will be enrolled sequentially into the different trial groups to receive one or two doses of LASV mRNA vaccine. The subjects in the two-dose groups will be administered a second dose 28 days later. An additional group of control subjects will receive a single dose of saline on Day 1. Safety information for solicited (days 1-7 post-vaccination) and unsolicited (days 1-28 post-vaccination) adverse events (AEs) will be collected using diary cards. Serious AEs, AEs leading to premature withdrawal from the trial or receipt of the second dose, AEof Special Interest and medically-attended AEs will be collected throughout the trial (Day 1 to Day 365 post last vaccine dose). Specified safety data will be reviewed by an internal safety review team and a DSMB on a pre-defined schedule.

The application's sequence listing, which the Patent Office published only in electronic form, follows.

SEQUENCE LISTING (43300 sequences)

SEQ ID NO: 1 - protein, 491 aa, Artificial Sequence
  derived and/or modified protein sequence (wt) from LASV(Josiah;Clade IV)__NP_694870__GPC
MGQIVTFFQEVPHVIEEVMNIVLIALSVLAVLKGLYNFATCGLVGLVTFLLLCGRSCTTSLYKGVYELQTLELNMETLNMTMPLSCTKNNSHHYIMVGNETGLELTLTNTSIINHKFCNLSDAHKKNLYDHALMSIISTFHLSIPNFNQYEAMSCDFNGGKISVQYNLSHSYAGDAANHCGTVANGVLQTFMRMAWGGSYIALDSGRGNWDCIMTSYQYLIIQNTTWEDHCQFSRPSPIGYLGLLSQRTRDIYISRRLLGTFTWTLSDSEGKDTPGGYCLTRWMLIEAELKCFGNTAVAKCNEKHDEEFCDMLRLFDFNKQAIQRLKAEAQMSIQLINKAVNALINDQLIMKNHLRDIMGIPYCNYSKYWYLNHTTTGRTSLPKCWLVSNGSYLNETHFSDDIEQQADNMITEMLQKEYMERQGKTPLGLVDLFVFSTSFYLISIFLHLVKIPTHRHIVGKSCPKPHRLNHMGICSCGLYKQPGVPVKWKR

SEQ ID NO: 2 - protein, 490 aa, Artificial Sequence
  derived and/or modified protein sequence (wt) from LASV(LP;Clade I)__AAF86701__GPC
MGQIITFFQEVPHVIEEVMNIVLIALSLLAILKGLYNIATCGIIGLVAFLFLCGKSCSLTLKGGYELQTLELNMETLNMTMPLSCTKNSSHHYIRVGNETGLELTLTNTSIINHKFCNLSDAHKKNLYDHALMSIISTFHLSIPNFNQYEAMSCDFNGGKISVQYNLSHSYAGDAAEHCGTVANGVLQTFMRMAWGGRYIALDSGKGNWDCIMTSYQYLIIQNTTWEDHCQFSRPSPIGYLGLLSQRTRDIYISRRLLGTFTWTLSDSEGNETPGGYCLTRWMLIEAELKCFGNTAVAKCNEKHDEEFCDMLRLFDFNKQAIRRLKAEAQMSIQLINKAVNALINDQLIMKNHLRDIMGIPYCNYSKYWYLNHTSSGRTSLPKCWLISNGSYLNETQFSDDIEQQADNMITEMLQKEYIERQGKTPLGLVDIFIFSTSFYLISIFLHLIKIPTHRHIVGKPCPKPHRLNHMGVCSCGLYKHPGVPTKWKR

SEQ ID NO: 3 - protein, 490 aa, Artificial Sequence
  derived and/or modified protein sequence (wt) from LASV(803213;Clade II)__AAF86703__GPC
MGQIITFFQEVPHVIEEVMNIVLIALSLLAILKGIYNVATCGLFGLISFLLLCGRSCSVTYKGVYELQTLELNMANLNMTMPLSCTKNNSHHYIMVGNETGLELTLTNTSIINHKFCNLSDAHKKNLYDHALMSIISTFHLSIPNFNQYEAMSCDFNGGKISVQYNLSHSFAVDAANHCGTIANGVLQTFMRMAWGGSYIALDSGKGNWDCIMTSYQYLIIQNTTWEDHCQFSRPSPIGYLGLLSQRTRDIYISRRLLGTFTWTLSDSEGNEAPGGYCLTRWMLIEAELKCFGNTAVAKCNEKHDEEFCDMLRLFDFNKQAIKRLKTEAQMSIQLINKAVNALINDQLIMKNHLRDIMGIPYCNYSRYWYLNHTVTGKTSLPRCWLVSNGSYLNETHFSDDIEQQADNMITEMLQKEYMDRQGKTPLGLVDLFVFSTSFYLISIFLHLVKIPTHRHIVGKPCPKPHRLNHMGICSCGLYKHPGVPVKWKR

SEQ ID NO: 4 - protein, 490 aa, Artificial Sequence
  derived and/or modified protein sequence (wt) from LASV(GA391;Clade III)__CAA36645__GPC
MGQIVTFFQEVPHVIEEVMNIVLIALSILAILKGLYNVATCGLIGLVTFLLLSGRSCSLIYKGTYELQTLELNMETLNMTMPLSCTKNNSHHYIRVGNETGLELTLTNTSILNHKFCNLSDAHKRNLYDHSLMSIISTFHLSIPNFNQYEAMSCDFNGGKITVQYNLSHSFAVDAAGHCGTLANGVLQTFMRMAWGGSYIALDSGRGNWDCIMTSYQYLIIQNTTWDDHCQFSRPSPIGYLGLLSQRTRDIYISRRLLGTFTWTLSDSEGNETPGGYCLTRWMLIEAELKCFGNTAVAKCNEKHDEEFCDMLRLFDFNKQAIRRLKTEAQMSIQLINKAVNALINDQLIMKNHLRDIMGIPYCNYSRYWYLNHTSTGKTSLPRCWLISNGSYLNETKFSDDIEQQADNMITEMLQKEYIDRQGKTPLGLVDLFVFSTSFYLISIFLHLVKIPTHRHIVGKPCPKPHRLNHMGICSCGLYKQPGVPVRWKR

SEQ ID NO: 5 - protein, 491 aa, Artificial Sequence
  derived and/or modified protein sequence (wt) from LASV(AV;Clade V)__CCA30314__GPC
MGQIVTFFQEVPHVIEEVMNIVLIALSILAVLKGLYNIATCGLIGLITFLLLCGRSCSSNLYKGVYELQSLDLNMETLNMTMPLSCTKNNSHHYIRVGNDTGLELTLTNTSILNHKFCNLSDAHKKDLYDHALMSIISTFHLSIPNFNQYEAMSCDFNGGKISVQYNLSHSYAIDAANHCGTVANGILQTFMRMAWGGSYIALDSGRGNWDCIMTSYQYLIIQNTTWENHCQFSRPSPIGYLGLLSQRTRDIYISRRLLGTFTWTLSDSEGNATPGGYCLTRWMLIEAELKCFGNTAVAKCNEKHDEEFCDMLRLFDFNKQAISRLKSEAQMSIQLINKAVNALINDQLIMKNHLRDIMGIPYCNYSKYWYLNHTITGKTSLPKCWLVSNGSYLNETHFSDDIEQQADNMITEMLQKEYMERQGKTPLGLVDLFVFSTSFYLISIFLRLVKIPTHRHIVGKPCPKPHRLNHMGICSCGLYKQPGVPVRWKR

SEQ ID NO: 6 - protein, 490 aa, Artificial Sequence
  derived and/or modified protein sequence (wt) from LASV(Togo/2016/7082;Clade VI)__AMR44577__GPC
MGQIITFFQEVPHVIEEVMNIVLIALSLLAILKGVYNVATCGIIGLVTFLFLCGRSCSLIYKGSYELQTLELNMETLNMTMPLSCTKNSSHHYIRVGNETGLELTLTNTSIINHKFCNLSDAHKRNLYDHALMSILSTFHLSIPNFNQYEAMSCDFNGGKISVQYNLSHAYAVDAAEHCGTVANGVLQTFMRMAWGGSYIALDSGRGNWDCIMTSYQYLIIQNTTWEDHCQFSRPSPIGYLGLLSQRTRDIYISRRLLGTFTWTLSDSEGNETPGGYCLTRWMLIEAELKCFGNTAVAKCNEKHDEEFCDMLRLFDFNKQAIQRLKSEAQMSIQLINKAVNALINDQLIMKNHLRDMMGIPYCNYSKYWYLNHTSSGRTSLPKCWLVSNGSYLNETHFSDDIEQQADNMITEMLQKEYIDRQGKTPLGLVDLFVFSTSFYLISIFLHLIKIPTHRHIVGKPCPKPHRLNHMGICSCGLYKQPGVPTRWKR

SEQ ID NO: 7 - protein, 490 aa, Artificial Sequence
  derived and/or modified protein sequence (wt) from LASV(KAK-428;Clade n.d. (VII))__ANH09740__GPC
MGQIVTFFQEVPHVIEEVMNIVLIALSLLAILKGLYNFATCGVIGLITFLLLCGRSCSATYKGQYELQTLELNMESLNMTMPLSCTKNNSHHYIRAGNNTGLELTLTNTSIISHKFCNLSDAHKKNLYDHTLMSIITTFHLSIPNFNQYEAMSCDFNGGKISIQYNLSHSYAGDAAQHCGTVANGVLQTFMRMAWGGSYLALDSGRRGWDCIISSYQYLIIQNTTWDDHCQFSRPSPIGYLGFVSQKTRDIYISRRLLGTFTWTLSDSEGHDMPGGYCLTRWMLIEADLKCFGNTAVAKCNEKHDEEFCDMWRLFDFNKQAIQRLKAEAQMNIQLINKAVNALINDQLMMKNHLRDIMGIPYCNYSKFWYLNNTTTGRTSLPRCWLISNGSYLNETHFSDDIEQQADNMITEMLQKEYMDRQGKTPLGLVDLFVFSTSFYLITIFLHLVKIPTHRHIVGKPCPKPHRLNHMGICSCGLYKQPGVPVRWKR

SEQ ID NO: 8 - protein, 490 aa, Artificial Sequence
  derived and/or modified protein sequence (wt) from LASV(Acar 3080;Clade I)__AAT49014__GPC
MGQIITFFQEVPHVIEEVMNIVLIALSLLAILKGLYNIATCGIIGLVAFLFLCGKSCSLTLKGGYELQTLELNMETLNMTMPLSCTKNSSHHYIRVGNETGLELTLTNTSIINHKFCNLSDAHKKNLYDHALMSIISTFHLSIPNFNQYEAMSCDFNGGKISVQYNLSHSYAGDAAEHCGTVANGVLQTFMRMAWGGRYIALDSGKGNWDCIMTSYQYLIIQNTTWEDHCQFSRPSPIGYLGLLSQRTRDIYISRRLLGTFTWTLSDSEGNETPGGYCLTRWMLIEAELKCFGNTAVAKCNEKHDEEFCDMLRLFDFNKQAIRRLKAEAQMSIQLINKAVNALINDQLIMKNHLRDIMGIPYCNYSKYWYLNHTSSGRTSLPKCWLISNGSYLNETQFSDDIEQQADHMITEMLQKEYIERQGKTPLGLVDIFIFSTSFYLISIFLHLIKIPTHRHIVGKPCPKPHRLNHMGVCSCGLYKHPGVPTKWKR

SEQ ID NO: 9 - protein, 490 aa, Artificial Sequence; identical to SEQ ID NO: 2
  derived and/or modified protein sequence (wt) from LASV(Pinneo-NIG-1969;Clade I)__AIT17836__GPC

SEQ ID NO: 10 - protein, 490 aa, Artificial Sequence
  derived and/or modified protein sequence (wt) from LASV(ISTH0009-NIG-2011;Clade II)__AIT17404__GPC
MGQIITFFQEVPHVIEEVMNIVLIALSLLAILKGIYNVATCGLFGLVSFLLLCGRSCSTTYKGVYELQTLELDMASLNMTMPLSCTKNNSHHYIMVGNETGLELTLTNTSIINHKFCNLSDAHKKNLYDHALMSIISTFHLSIPNFNQYEAMSCDFNGGKISVQYNLSHAYAVDAANHCGTIANGVLQTFMRMAWGGSYIALDSGKGSWDCIMTSYQYLIIQNTTWEDHCQFSRPSPIGYLGLLSQRTRDIYISRRLLGTFTWTLSDSEGNETPGGYCLTRWMLIEAELKCFGNTAVAKCNEKHDEEFCDMLRLFDFNKQAIRRLKTEAQMSIQLINKAVNALINDQLIMKNHLRDIMGIPYCNYSKYWYLNHTVTGKTSLPRCWLVSNGSYLNETHFSDDIEQQADNMITELLQKEYMDRQGKTPLGLVDLFVFSTSFYLISIFLHLIKIPTHRHITGKPCPKPHRLNHMGICSCGLYKHPGVPVKWKR

SEQ ID NO: 11 - protein, 490 aa, Artificial Sequence
  derived and/or modified protein sequence (wt) from LASV(ISTH0012-NIG-2011;Clade II)__AIT17408__GPC
MGQIITFFQEVPHVIEEVMNIVLIALSLLAILKGIYNVATCGLFGLVSFLLLCGRSCSTTYKGVYELQTLELDMASLNMTMPLSCTKNNSHHYIMVGNETGLELTLTNTSIINHKFCNLSDAHKKNLYDHALMSIISTFHLSIPNFNQYEAMSCDFNGGKISVQYNLSHTYAVDAANHCGTVANGVLQTFMRMAWGGSYIALDSGKGSWDCIMTSYQYLIIQNTTWEDHCQFSRPSPIGYLGLLSQRTRDIYISRRLLGTFTWTLSDSEGNETPGGYCLTRWMLIEAELKCFGNTAVAKCNEKHDEEFCDMLRLFDFNKQAIRRLKTEAQMSIQLINKAVNALINDQLIMKNHLRDIMGIPYCNYSKYWYLNHTVTGKTSLPRCWLVSNGSYLNETHFSDDIEQQADNMITELLQKEYMDRQGKTPLGLVDLFVFSTSFYLISIFLHLVKIPTHRHVIGKPCPKPHRLNHMGICSCGLYKHPGVPVKWKR

SEQ ID NO: 12 - protein, 490 aa, Artificial Sequence
  derived and/or modified protein sequence (wt) from LASV(ISTH0047-NIG-2011;Clade II)__AIT17412__GPC
MGQIITFFQEVPHVIEEVMNIVLIALSLLAILKGIYNVATCGLFGLVSFLLLCGRSCSTTYKGVYELQTLELDMASLNMTMPLSCTKNNSHHYIMVGNETGLELTLTNTSIINHKFCNLSDAHKKNLYDHALMSIISTFHLSIPNFNQYEAMSCDFNGGKISVQYNLSHAYAVDAANHCGTIANGVLQTFMRMAWGGSYIALDSGKGSWDCIMTSYQYLIIQNTSWEDHCQFSRPSPIGYLGLLSQRTRDIYISRRLLGTFTWTLSDSEGNETPGGYCLTRWMLIEAELKCFGNTAVAKCNEKHDEEFCDMLRLFDFNKQAIRRLKTEAQMSIQLINKAVNALINDQLIMKNHLRDIMGIPYCNYSKYWYLNHTVTGKTSLPRCWLVSNGSYLNETHFSDDIEQQADNMITELLQKEYIDRQGKTPLGLVDLFVFSTSFYLISIFLHLVKIPTHRHVIGKPCPKPHRLNHMGICSCGLYKHPGVPVKWKR

SEQ ID NO: 13 - protein, 490 aa, Artificial Sequence
  derived and/or modified protein sequence (wt) from LASV(ISTH0073-NIG-2011;Clade II)__AIT17416__GPC
MGQIITFFQEVPHVIEEVMNIVLIALSLLAILKGIYNVATCGLFGLVSFLLLCGRSCSTTYKGVYELQTLELDMASLNMTMPLSCTKNNSHHYIMVGNETGLELTLTNTSIINHKFCNLSDAHRKNLYDHALMSIISTFHLSIPNFNQYEAMSCDFNGGKISVQYNLSHAYAVDAANHCGTIANGVLQTFMRMAWGGSYIALDSGKGSWDCIMTSYQYLIIQNTSWEDHCQFSRPSPIGYLGLLSQRTRDIYISRRLLGTFTWTLSDSEGNETPGGYCLTRWMLIEAELKCFGNTAVAKCNEKHDEEFCDMLRLFDFNKQAIRRLKTEAQMSIQLINKAVNALINDQLIMKNHLRDIMGIPYCNYSKYWYLNHTVTGKTSLPRCWLVSNGSYLNETHFSDDIEQQADNMITELLQKEYIDRQGKTPLGLVDLFVFSTSFYLISIFLHLVKIPTHRHVIGKPCPKPHRLNHMGICSCGLYKHPGVPVKWKR

SEQ ID NO: 14 - protein, 490 aa, Artificial Sequence
  derived and/or modified protein sequence (wt) from LASV(ISTH0230-NIG-2011;Clade II)__AIT17420__GPC
MGQIITFFQEVPHVIEEVMNIVLIALSLLAILKGIYNVATCGLFGLVSFLLLCGRSCSTTYKGVYELQTLELDMASLNMTMPLSCTKNNSHHYIMVGNETGLELTLTNTSIINHKFCNLSDAHKKNLYDHALMSIISTFHLSIPNFNQYEAMSCDFNGGKISVQYNLSHTYAVDAANHCGTIANGVLQTFMRMAWGGSYIALDSGKGSWDCIMTSYQYLIIQNTTWEDHCQFSRPSPIGYLGLLSQRTRDIYISRRLLGTFTWTLSDSEGNETPGGYCLTRWMLIEAELKCFGNTAVAKCNEKHDEEFCDMLRLFDFNKQAIRRLKTEAQMSIQLINKAVNALINDQLIMKNHLRDIMGIPYCNYSKYWYLNHTVTGKTSLPRCWLVSNGSYLNETHFSDDIEQQADNMITELLQKEYMDRQGKTPLGLVDLFVFSTSFYLISIFLHLIKIPTHRHITGKPCPKPHRLNHMGICSCGLYKHPGVPVKWKR

SEQ ID NO: 15 - protein, 490 aa, Artificial Sequence
  derived and/or modified protein sequence (wt) from LASV(ISTH0531-NIG-2011;Clade II)__AIT17424__GPC
MGQIITFFQEVPHVIEEVMNIVLIALSLLAILKGIYNVATCGLFGLVSFLLLCGRSCSTTYKGVYELQTLELDMTNLNMTMPLSCTKNNSHHYIMVGNETGLELTLTNTSIINHKFCNLSDAHKKNLYNHALMSIISTFHLSIPNFNQYEAMSCDFNGGKISVQYNLSHAYAVDAANHCGTIANGVLQTFMRMAWGGSYIALDSGKGSWDCIMTSYQYLIIQNTTWEDHCQFSRPSPIGYLGLLSQRTRDIYISRRLLGTFTWTLSDSEGNETPGGYCLTRWMLIEAELKCFGNTAVAKCNEKHDEEFCDMLRLFDFNKQAIRRLKTEAQTNIQLINKAVNALINDQLIMKNHLRDIMGIPYCNYSKYWYLNHTVTGKTSLPRCWLVSNGSYLNETHFSDDIEQQADNMITELLQKEYMDRQGKTPLGLVDLFVFSTSFYLISIFLHLVKIPTHRHIIGKPCPKPHRLNHMGICSCGLYKHPGVPVKWKR

SEQ ID NO: 16 - protein, 490 aa, Artificial Sequence
  derived and/or modified protein sequence (wt) from LASV(ISTH0595-NIG-2011;Clade II)__AIT17428__GPC
MGQIITFFQEVPHVIEEVMNIVLIALSLLAILKGIYNVATCGLFGLVSFLLLCGRSCSTTYKGVYELQTLELDMASLNMTMPLSCTKNNSHHYIMVGNETGLELTLTNTSIINHKFCNLSDAHKKNLYDHALMSIISTFHLSIPNFNQYEAMSCDFNGGKISVQYNLSHTYAVDAANHCGTIANGVLQTFMRMAWGGSYIALDSGKGSWDCIMTSYQYLIIQNTTWEDHCQFSRPSPIGYLGLLSQRTRDIYISRRLLGTFTWTLSDSEGNETPGGYCLTRWMLIAADLKCFGNTAVAKCNEKHDEEFCDMLRLFDFNKQAIERLKTEAQMSIQLINKAVNALINDQLIMKNHLRDIMGIPYCNYSKYWYLNHTVTGRTSLPRCWLVSNGSYLNETHFSDDIEQQADNMITELLQKEYMDRQGKTPLGLVDLFVFSTSFYLISIFLHLVRIPTHRHVIGKPCPKPHRLNHMGICSCGLYKHPGVPVKWKR

SEQ ID NO: 17 - protein, 490 aa, Artificial Sequence
  derived and/or modified protein sequence (wt) from LASV(ISTH0964-NIG-2011;Clade II)__AIT17430__GPC
MGQIITFFQEVPHVIEEVMNIVLIALSLLAILKGIYNVATCGLFGLVSFLLLCGRSCSTTYKGVYELQTLELDMASLNMTMPLSCTKNNSHHYIMVGNETGLELTLTNTSIINHKFCNLSDAHKKNLYDHALMSIISTFHLSIPNFNQYEAMSCDFNGGRISVQYNLSHTYAVDAAKHCGTIANGVLQTFMRMAWGGSYIALDSGKGSWDCIMTSYQYLIIQNTTWEDHCQFSRPSPIGYLGLLSQRTRDIYISRRLLGTFTWTLSDSEGNETPGGYCLTRWMLIEAELKCFGNTAVAKCNEKHDEEFCDMLRLFDFNKQAIRRLKTEAQMSIQLINKAVNALINDQLIMKNHLRDIMGIPYCNYSKYWYLNHTVTGKTSLPRCWLVSNGSYLNETHFSDDIEQQADNMITELLQKEYIDRQGKTPLGLVDLFVFSTSFYLISIFLHLVKIPTHRHVIGKPCPKPHRLNHMGICSCGLYKHPGVPVKWKR

SEQ ID NO: 18 - protein, 490 aa, Artificial Sequence
  derived and/or modified protein sequence (wt) from LASV(ISTH1038-NIG-2011;Clade II)__AIT17438__GPC
MGQIITFFQEVPHVIEEVMNIVLIALSLLAILKGIYNVATCGLFGLVSFLLLCGRSCSTTYKGVYELQTLELDMANLNMTMPLSCTKNNSHHYIRVGNETGLELTLTNTSIISHKFCNLSDAHKKNLYDHALMSIISTFHLSIPNFNQYEAMSCDFNGGKISVQYNLSHTYAVDAANHCGTIANGVLQTFMRMAWGGSYIALDSGKGSWDCIMTSYQYLIIQNTTWEDHCQFSRPSPIGYLGLLSQRTRDIYISRRLLGTFTWTLSDSEGKETPGGYCLTRWMLIEAELKCFGNTAVAKCNEKHDEEFCDMLRLFDFNKQAIRRLKTEAQMNIQLINKAVNALINDQLIMKNHLRDIMGIPYCNYSKYWYLNHTVTGKTSLPRCWLVSNGSYLNETHFSDDIEQQADNMITELLQKEYIDRQGKTPLGLVDLFVFSTSFYLISIFLHLVKIPTHRHVIGKPCPKPHRLNQMGICSCGLYKQPGVPVKWKR

SEQ ID NO: 19 - protein, 490 aa, Artificial Sequence
  derived and/or modified protein sequence (wt) from LASV(ISTH1048-NIG-2011;Clade II)__AIT17442__GPC
MGQIITFFQEVPHVIEEVMNIVLIALSLLAILKGIYNVATCGLFGLVSFLLLCGRSCSTTYKGVYELQTLELDMASLNMTMPLSCTKNNSHHYIMVGNETGLELTLTNTSIINHKFCNLSDAHRKNLYDHALMSIISTFHLSIPNFNQYEAMSCDFNGGKISVQYNLSHAYAVDAANHCGTIANGVLQTFMRMAWGGSYIALDSGKGSWDCIMTSYQYLIIQNTSWEDHCQFSRPSPIGYLGLLSQRTRDIYISRRLLGTFTWTLSDSEGNETPGGYCLTRWMLIEAELKCFGNTAVAKCNEKHDEEFCDMLRLFDFNKQAIRRLKTEAQMSIQLINKAVNALINDQLIMKNHLRDIMGIPYCNYSKYWYLNHTVTGKTSLPRCWLVSNGSYLNETHFSDDIEQQADNMITELLQKEYIDRQGKTPLGLVDLFVFSTSFYLISIFLHLVKIPTHRHVIGKPCPKPHRINHMGICSCGLYKHPGVPVKWKR

SEQ ID NO: 20 - protein, 490 aa, Artificial Sequence
  derived and/or modified protein sequence (wt) from LASV(ISTH1058-NIG-2011;Clade II)__AIT17446__GPC
MGQIITFFQEVPHVIEEVMNIVLIALSLLAILKGIYNVATCGLFGLVSFLLLCGRSCSTTYKGVYELQTLELDMASLNMTMPLSCTKNNSHHYIMVGNETGLELTLTNTSIINHKFCNLSDAHKKNLYDHALMSIISTFHLSIPNFNQYEAMSCDFNGGKISVQYNLSHTYAVDAASHCGTVANGVLQTFMRMAWGGSYIALDSGKGSWDCIMTSYQYLIIQNTTWEDHCQFSRPSPIGYLGLLSQRTRDIYISRRLLGTFTWTLSDSEGNETPGGYCLTRWMLIEAELKCFGNTAVAKCNEKHDEEFCDMLRLFDFNKQAIRRLKTEAQMSIQLINKAVNALINDQLIMKNHLRDIMGIPYCNYSKYWYLNHTVTGKTSLPRCWLVSNGSYLNETHFSDDIEQQADNMITELLQKEYMDRQGKTPLGLVDLFVFSTSFYLISIFLHLVKIPTHRHVIGKPCPKPHRLNHMGICSCGLYKHPGVPVKWKR

SEQ ID NO: 21 - protein, 490 aa, Artificial Sequence
  derived and/or modified protein sequence (wt) from LASV(ISTH1064-NIG-2011;Clade II)__AIT17450__GPC
MGQIITFFQEVPHVIEEVMNIVLIALSLLAILKGIYNVATCGLFGLVSFLLLCGRSCSTTYKGVYELQTLELDMASLNMTMPLSCTKNNSHHYIMVGNETGLELTLTNTSIINHKFCNLSDAHKKNLYDHALMSIISTFHLSIPNFNQYEAMSCDFNGGKISVQYNLSHTYAVDAANHCGTIANGVLQTFMRMAWGGSYIALDSGKGSWDCIMTSYQYLIIQNTTWEDHCQFSRPSPIGYLGLLSQRTRDIYISRRLLGTFTWTLSDSEGNETPGGYCLTRWMLIEAELKCFGNTAVAKCNEKHDEEFCDMLRLFDFNKQAIRRLKTEAQMSIQLINKAVNALINDQLIMKNHLRDIMGIPYCNYSKYWYLNHTVTGKTSLPRCWLVSNGSYLNETHFSDDIEQQADNMITELLQKEYIDRQGKTPLGLVDLFVFSTSFYLISIFLHLVKIPTHRHIIGKPCPKPHRLNHMGICSCGLYKHPGVPVKWKR

SEQ ID NO: 22 - protein, 490 aa, Artificial Sequence
  derived and/or modified protein sequence (wt) from LASV(ISTH1069-NIG-2011;Clade II)__AIT17454__GPC
MGQIITFFQEVPHVIEEVMNIVLIAFSLLAILKGIYNVATCGLFGLVSFLLLCGRSCSTTYKGVYELQTLELDMASLNMTMPLSCTKNNSHHYIMVGNETGLELTLTNTSIINHKFCNLSDAHKRNLYDHALMSIISTFHLSIPNFNQYEAMSCDFNGGKISVQYNLSHTYAVDAAGHCGTIANGVLQTFMRMAWGGSYIALDSGKGSWDCIMTSYQYLIIQNTTWEDHCQFSRPSPIGYLGLLSQRTRDIYISRRLLGTFTWTLSDSEGNETPGGYCLTRWMLIEAELKCFGNTAVAKCNEKHDEEFCDMLRLFDFNKQAIRRLKTEAQMSIQLINKAVNALINDQLIMKNHLRDIMGIPYCNYSKYWYLNHTITGKTSLPRCWLVSNGSYLNETHFSDDIEQQADNMITELLQKEYMDRQGKTPLGLVDLFVFSTSFYLISIFLHLVKIPTHRHIIGKPCPKPHRLNHMGICSCGLYKHPGVPVRWKR

SEQ ID NO: 23 - protein, 490 aa, Artificial Sequence
  derived and/or modified protein sequence (wt) from LASV(ISTH1096-NIG-2012;Clade II)__AIT17458__GPC
MGQIITFFQEVPHVIEEVMNIVLIALSLLAILKGIYNVATCGLFGLVSFLLLCGRSCSTTYKGVYELQTLELDMASLNMTMPLSCTKNNSHHYIMVGNETGLELTLTNTSIINHKFCNLSDAHKKNLYDHALMSIISTFHLSIPNFNQYEAMSCDFNGGKISVQYNLSHTYAIDAANHCGTIANGVLQTFMRMAWGGSYIALDSGKGSWDCIMTTYQYLIIQNTTWEDHCQFSRPSPIGYLGLLSQRTRDIYISRRLLGTFTWTLSDSEGNETPGGYCLTRWMLIEAELKCFGNTAVAKCNEKHDEEFCDMLRLFDFNKQAIRRLKTEAQMSIQLINKAVNALINDQLIMKNHLRDIMGIPYCNYSKYWYLNHTVTGKTSLPRCWLVSNGSYLNETHFSDDIEQQADNMITELLQKEYMDRQGKTPLGLVDLFVFSTSFYLISIFLHLVKIPTHRHVIGKPCPKPHRLNHMGICSCGLYKHPGVPVKWKR

SEQ ID NO: 24 - protein, 490 aa, Artificial Sequence
  derived and/or modified protein sequence (wt) from LASV(ISTH1107-NIG-2012;Clade II)__AIT17462__GPC
MGQIITFFQEVPHVIEEVMNIVLIALSLLAILKGIYNVATCGLFGLVSFLLLCGRSCSTTYKGVYELQTLELDMASLNMTMPLSCTKNNSHHYIMVGNETGLELTLTNTSIINHKFCNLSDAHKKNLYDHALMSIISTFHLSIPNFNQYEAMSCDFNGGKISVQYNLSHAYAVDAANHCGTIANGVLQTFMRMAWGGSYIALDSGKGSWDCIMTSYQYLIIQNTTWEDHCQFSRPSPIGYLGLLSQRTRDIYISRRLLGTFTWTLSDSEGNETPGGYCLTRWMLIEAELKCFGNTAVAKCNEKHDEEFCDMLRLFDFNKQAIRRLKTEAQMSIQLINKAVNALINDQLIMKNHLRDIMGIPYCNYSKYWYLNHTVTGKTSLPKCWLVSNGSYLNETHFSDDIEQQADNMITELLQKEYIDRQGKTPLGLVDLFVFSTSFYLISIFLHLVKIPTHRHVIGKPCPKPHRLNHMGICSCGLYKHPGVPVKWKR

SEQ ID NO: 25 - protein, 490 aa, Artificial Sequence
  derived and/or modified protein sequence (wt) from LASV(ISTH1111-NIG-2011;Clade II)__AIT17466__GPC
MGQIITFFQEVPQVIEEVMNIVLIALSLLAILKGIYNVATCGLFGLVSFLLLCGRSCSTTYKGVYELQTLELDMASLNMTMPLSCTKNNSHHYIMVGNETGLELTLTNQSIINHKFCNLSDAHKKNLYDHALMSIISTFHLSIPNFNQYEAMSCDFNGGKISVQYNLSHTFAVDAANHCGTIANGVLQTFMRMAWGGSYIALDSGRGSWDCIMTSYQYLIIQNTTWEDHCQFSRPSPIGYLGLLSQRTRDIYISRRLLGTFTWTLSDSEGNETPGGYCLTRWMLIEAELKCFGNTAVAKCNEKHDEEFCDMLRLFDFNKQAIRRLKTEAQMSIQLINKAVNALINDQLIMKNHLRDIMGIPYCNYSKYWYLNHTITGKTSLPRCWLVSNGSYLNETHFSDDIEQQADNMITELLQKEYMDRQGKTPLGLVDLFVFSTSFYLISIFLHLVKIPTHRHVIGKPCPKPHRLNHMGICSCGLYKHPGVPVKWKR

SEQ ID NO: 26 - protein, 490 aa, Artificial Sequence
  derived and/or modified protein sequence (wt) from LASV(ISTH1121-NIG-2012;Clade II)__AIT17470__GPC
MGQIITFFQEVPHVIEEVMNIVLIALSLLAILKGIYNVATCGLFGLVSFLLLCGRSCSTTYKGVYELQTLELDMASLNMTMPLSCTKNNSHHYIMVGNETGLELTLTNTSIINHKFCNLSDAHRKNLYDHALMSIISTFHLSIPNFNQYEAMSCDFNGGKISVQYNLSHTYAVDAANHCGTIANGVLQTFMRMAWGGSYIALDSGKGSWDCIMTSYQYLIIQNTTWEDHCQFSRPSPIGYLGLLSQRTRDIYISRRLLGTFTWTLSDSEGNETPGGYCLTRWMLIEAELKCFGNTAVAKCNEKHDEEFCDMLRLFDFNKQAIRRLKTEAQMSIQLINKAVNALINDQLIMKNHLRDIMGIPYCNYSKYWYLNHTVTGKTSLPRCWLVSNGSYLNETHFSDDIEQQADNMITELLQKEYIDRQGKTPLGLVDLFVFSTSFYLISIFLHLVKIPTHRHVIGKPCPKPHRLNHMGICSCGLYKHPGVPVKWKR

SEQ ID NO: 27 - protein, 490 aa, Artificial Sequence
  derived and/or modified protein sequence (wt) from LASV(ISTH1129-NIG-2012;Clade II)__AIT17474__GPC
MGQIITFFQEVPHVIEEVMNIVLIALSLLAILKGIYNVATCGLFGLVSFLLLCGRSCSTTYKGVYELQTLELDMASLNMTMPLSCTKNNSHHYIMVGNETGLELTLTNTSIINHKFCNLSDAHKKNLYDHALMSIISTFHLSIPNFNQYEAMSCDFNGGKISIQYNLSHTYAVDAANHCGTIANGVLQTFMRMAWGGSYIALDSGKGSWDCIMTSYQYLIIQNTTWEDHCQFSRPSPIGYLGLLSQRTRDIYISRRLLGTFTWTLSDSEGNETPGGYCLTRWMLIEAELKCFGNTAVAKCNEKHDEEFCDMLRLFDFNKQAIRRLKTEAQMSIQLINKAVNALINDQLIMKNHLRDIMGIPYCNYSKYWYLNHTITGKTSLPRCWLVSNGSYLNETHFSDDIEQQADNMITELLQKEYIDRQGKTPLGLVDLFVFSTSFYLISIFLHLVKIPTHRHITGKPCPKPHRLNHMGICSCGLYKHPGVPVRWKR

SEQ ID NO: 28 - protein, 490 aa, Artificial Sequence
  derived and/or modified protein sequence (wt) from LASV(ISTH1137-NIG-2011;Clade II)__AIT17478__GPC
MGQIITFFQEVPHVIEEVMNIVLIALSLLAILKGIYNVATCGLFGLVSFLLLCGRSCSTTYKGVYELQTLELDMASLNMTMPLSCTKNNSHHYIMVGNETGLELTLTNTSIINHKFCNLSDAHKKNLYDHALMSIISTFHLSIPNFNQYEAMSCDFNGGKISVQYNLSHTYAVDAADHCGTIANGVLQTFMRMAWGGSYIALDSGKGSWDCIMTSYQYLIIQNTTWEDHCQFSRPSPIGYLGLLSQRTRDIYISRRLLGTFTWTLSDSEGNETPGGYCLTRWMLIEAELKCFGNTAVAKCNEKHDEEFCDMLRLFDFNKQAISRLKTEAQMSIQLINKAVNALINDQLIMKNHLRDIMGIPYCNYSKYWYLNHTVTGKTSLPRCWLVSNGSYLNETHFSDDIEQQADNMITEMLQKEYIDRQGKTPLGLVDLFVFSTSFYLISIFLHLVKIPTHRHVIGKPCPKPHRLNHMGICSCGLYKHPGVPVKWKR

SEQ ID NO: 29 - protein, 490 aa, Artificial Sequence
  derived and/or modified protein sequence (wt) from LASV(ISTH2010-NIG-2012;Clade II)__AIT17482__GPC
MGQIITFFQEVPHVIEEVMNIVLIALSLLAILKGIYNVATCGLFGLVSFLLLCGRSCSTTYKGVYELQTLELDMASLNMTMPLSCTKNNSHHYIMVGNETGLELTLTNTSIINHKFCNLSDAHKKNLYDHALMSIISTFHLSIPNFNQYEAMSCDFNGGKISVQYNLSHAYAVDAANHCGTIANGVLQTFMRMAWGGSYIALDSGKGSWDCIMTSYQYLIIQNITWEDHCQFSRPSPIGYLGLLSQRTRDIYISRRLLGTFTWTLSDSEGNETPGGYCLTRWMLIEAELKCFGNTAVAKCNEKHDEEFCDMLRLFDFNKQAIRRLKTEAQMSIQLINKAVNALINDQLIMKNHLRDIMGIPYCNYSKYWYLNHTVTGKTSLPRCWLVSNGSYLNETHFSDDIEQQADNMITELLQKEYIDRQGKTPLGLVDLFVFSTSFYLISIFLHLVKIPTHRHVVGKPCPKPHRLNHMGICSCGLYKHPGVPVKWKR

SEQ ID NO: 30 - protein, 490 aa, Artificial Sequence
  derived and/or modified protein sequence (wt) from LASV(ISTH2016-NIG-2012;Clade II)__AIT17486__GPC
MGQIITFFQEVPHVIEEVMNIVLIALSLLAILKGIYNVATCGLFGLVSFLLLCGRSCSTTYKGVYELQTLELDMASLNMTMPLSCTKNNSHHYIMVGNETGLELTLTNTSIINHKFCNLSDAHKKNLYDHALMSIISTFHLSIPNFNQYEAMSCDFNGGKISVQYNLSHTYAVDAANHCGTIANGVLQTFMRMAWGGSYIALDSGKGSWDCIMTSYQYLIIQNTTWEDHCQFSRPSPVGYLGLLSQRTRDIYISRRLLGTFTWTLSDSEGNETPGGYCLTRWMLIEAELKCFGNTAVAKCNEKHDEEFCDMLRLFDFNKQAIRRLKTEAQMSIQLINKAVNALINDQLIMKNHLRDIMGIPYCNYSKYWYLNHTVTGKTSLPRCWLVSNGSYLNETHFSDDIEQQADNMITELLQKEYIDRQGKTPLGLVDLFVFSTSFYLISIFLHLVKIPTHRHVIGKPCPKPHRLNHMGICSCGLYKHPGVPVKWKR

SEQ ID NO: 31 - protein, 490 aa, Artificial Sequence
  derived and/or modified protein sequence (wt) from LASV(ISTH2020-NIG-2012;Clade II)__AIT17490__GPC
MGQIITFFQEVPHVIEEVMNIVLITLSLLAILKGIYNVATCGLFGLVSFLLLCGRSCSTTYKGVYELQTLELDMANLNMTMPLSCTKNNSHHYIMVGNETGLELTLTNTSIINHKFCNLSDAHKKNLYDHALMSIISTFHLSIPNFNQYEAMSCDFNGGKISVQYNLSHTFAVDAANHCGTIANGVLQTFMRMAWGGSYIALDSGKGSWDCIMTSYQYLIIQNTTWEDHCQFSRPSPIGYLGLLSQRTRDIYISRRLLGTFTWTLSDSEGNETPGGYCLTRWMLIEAELKCFGNTAVAKCNEKHDEEFCDMLRLFDFNKQAIRRLKTEAQMSIQLINKAVNALINDQLIMKNHLRDIMGIPYCNYSKYWYLNHTVTGKTSLPRCWLVSNGSYLNETHFSDDIEQQADNMITELLQKEYMDRQGKTPLGLVDLFVFSTSFYLISIFLHLVKIPTHRHIIGKPCPKPHRLNHMGICSCGLYKHPGVPVKWKR

SEQ ID NO: 32 - protein, 490 aa, Artificial Sequence
  derived and/or modified protein sequence (wt) from LASV(ISTH2025-NIG-2012;Clade II)__AIT17494__GPC
MGQIITFFQEVPHVIEEVMNIVLIALSLLAILKGVYNVATCGLFGLVSFLLLCGRSCSTIYKGVYELQTLELDMASLNMTMPLSCTKNNSHHYIMVGNETGLELTLTNTSIINHKFCNLSDAHKKNLYDHALMSIISTFHLSIPNFNQYEAMSCDFNGGKISVQYNLSHTYAVDAANHCGTIANGVLQTFMRMAWGGSYIALDSGKGSWDCIMTSYQYLIIQNTSWEDHCQFSRPSPIGYLGLLSQRTRDIYISRRLLGTFTWTLSDSEGNETPGGYCLTRWMLIEAELKCFGNTAVAKCNEKHDEEFCDMLRLFDFNKQAIRRLKTEAQMSIQLINKAVNALINDQLIMKNHLRDIMGIPYCNYSKYWYLNHTVTGKTSLPRCWLVSNGSYLNETHFSDDIEQQADNMITELLQKEYIDRQGKTPLGLVDLFVFSTSFYLISIFLHLVKIPTHRHVIGKPCPKPHRLNHMGICSCGLYKHPGVPVKWKR

SEQ ID NO: 33 - protein, 490 aa, Artificial Sequence
  derived and/or modified protein sequence (wt) from LASV(ISTH2031-NIG-2012;Clade II)__AIT17498__GPC
MGQIITFFQEVPHVIEEVMNIVLIALSLLAILKGIYNVATCGLFGLVSFLLLCGRSCSTTYKGVYELQTLELDMASLNMTMPLSCTKNNSHHYIMVGNETGLELTLTNTSIINHKFCNLSDAHKKNLYDHALMSIISTFHLSIPNFNQYEAMSCDFNGGKISVQYNLSHTYAVDAANHCGTIANGVLQTFMRMAWGGSYIALDSGKGNWDCIMTSYQYLIIQNTTWEDHCQFSRPSPIGYLGLLSQRTRDIYISRRLLGTFTWTLSDSEGNETPGGYCLTRWMLIETELKCFGNTAVAKCNEKHDEEFCDMLRLFDFNKQAISRLRSEAQMSIQLINKAVNALINDQLIMKNHLRDIMGIPYCNYSKYWYLNHTVTGKTSLPKCWLVSNGSYLNETHFSDDIEQQADNMITEMLQKEYIDRQGKTPLGLVDLFVFSTSFYLISIFLHLVKIPTHRHITGKPCPKPHRLNHMGICSCGLYKHPGVPVKWKR

SEQ ID NO: 34 - protein, 490 aa, Artificial Sequence
  derived and/or modified protein sequence (wt) from LASV(ISTH2037-NIG-2012;Clade II)__AIT17502__GPC
MGQIITFFQEIPHVIEEVMNIVLITLSLLAILKGIYNVATCGLFGLVSFLLLCGKSCSTTYKGVYELQTLELDMASLNMTMPLSCTKNNSHHYIMVGNETGLELTLTNTSIINHKFCNLSDAHRKNLYDHTLMSIISTFHLSIPNFNQYEAMSCDFNGGKISVQYNLSHAYAIDAATHCGTIANGVLQTFMRMAWGGSYIALDSGKGGWDCIMTSYQYLIIQNTTWEDHCQFSRPSPIGYLGLLSQRTRDIYISRRLLGTFTWTLSDSEGNETPGGYCLTRWMLIEAELKCFGNTAVAKCNEKHDEEFCDMLRLFDFNKQAIRRLKTEAQMSIQLINKAVNALINDQLIMRNHLRDIMGIPYCNYSKYWYLNHTVTGKTSLPKCWLVSNGSYLNETHFSDDIEQQADNMITELLQKEYMDRQGKTPLGLVDLFVFSTSFYLISIFLHLVKIPTHRHVIGKPCPKPHRLNHMGVCSCGLYKHPGVPVKWKR

SEQ ID NO: 35 - protein, 490 aa, Artificial Sequence
  derived and/or modified protein sequence (wt) from LASV(ISTH2042-NIG-2012;Clade II)__AIT17506__GPC
MGQIITFFQEVPHVIEEVMNIVLIALSLLAILKGIYNVATCGLFGLVSFLLLCGRSCSTTYKGVYELQTLELDMASLNMTMPLSCTKNNSHHYIMVGNETGLELTLTNTSIINHKFCNLSDAHKKNLYDHALMSIISTFHLSIPNFNQYEAMSCDFNGGKISVQYNLSHAYAVDAAEHCGTIANGVLQTFMRMAWGGSYIALDSGKGSWDCVMTSYQYLIIQNTTWEDHCQFSRPSPIGYLGLLSQRTRDIYISRRLLGTFTWTLSDSEGNETPGGYCLTRWMLIEAELKCFGNTAVAKCNEKHDEEFCDMLRLFDFNKQAIERLKTEAQMSIQLINKAVNALINDQLIMKNHLRDIMGIPYCNYSKYWYLNHTVTGKTSLPRCWLVSNGSYLNETHFSDDIEQQADNMITEMLQKEYIDRQGKTPLGLVDLFVFSTSFYLISIFLHLVKIPTHRHVIGKPCPKPHRLNHMGICSCGLYKHPGVPVKWKR

SEQ ID NO: 36 - protein, 490 aa, Artificial Sequence
  derived and/or modified protein sequence (wt) from LASV(ISTH2046-NIG-2012;Clade II)__AIT17510__GPC
MGQIITFFQEVPHVIEEVMNIVLIALSLLAILKGIYNVATCGLFGLVSFLLLCGRSCSTTYKGVYELQTLELDMASLNMTMPLSCTKNNSHHYIMVGNETGLELTLTNTSIINHKFCNLSDAHKKNLYDHALMSIISTFHLSIPNFNQYEAMSCDFNGGKISVQYNLSHTYAVDAANHCGTIANGVLQTFMRMAWGGSYIALDSGKGSWDCIMTSYQYLIIQNTTWEDHCQFSRPSPIGYLGLLSQRTKDIYISRRLLGTFTWTLSDSEGNETPGGYCLTRWMLIEAELKCFGNTAVAKCNEKHDEEFCDMLRLFDFNKQAIRRLKTEAQMSIQLINKAVNALINDQLIMKNHLRDIMGIPYCNYSKYWYLNHTVTGKTSLPRCWLVSNGSYLNETHFSDDIEQQADNMITELLQKEYIDRQGKTPLGLVDLFVFSTSFYLISIFLHLVKIPTHRHVIGKPCPKPHRLNHMGICSCGLYKHPGVPVKWKR

SEQ ID NO: 37 - protein, 490 aa, Artificial Sequence
  derived and/or modified protein sequence (wt) from LASV(ISTH2050-NIG-2012;Clade II)__AIT17514__GPC
MGQIITFFQEVPHVIEEVMNIVLIALSLLAVLKGIYNVATCGLFGLVSFLLLCGRSCSTTYKGVYELQTLELDMASLNMTMPLSCTKNNSHHYIMVGNETGLELTLTNTSIINHKFCNLSDAHKKNLYDHALMSIISTFHLSIPNFNQYEAMSCDFNGGKISVQYNLSHTYAVDAANHCGTIANGVLQTFMRMAWGGSYIALDSGKGSWDCIMTSYQYLIIQNTTWEDHCQFSRPSPIGYLGLLSQRTRDIYISRRLLGTFTWTLSDSEGNETPGGYCLTRWMLIEAELKCFGNTAVAKCNEKHDEEFCDMLRLFDFNKQAIRRLKTEAQMSIQLINKAVNALINDQLIMKNHLRDIMGIPYCNYSKYWYLNHTVTGKTSLPRCWLVSNGSYLNETHFSDDIEQQADNMITELLQKEYIDRQGKTPLGLVDLFVFSTSFYLISIFLHLVKIPTHRHVIGKPCPKPHRLNHMGICSCGLYRHPGVPVKWKR

SEQ ID NO: 38 - protein, 490 aa, Artificial Sequence
  derived and/or modified protein sequence (wt) from LASV(ISTH2057-NIG-2012;Clade II)__AIT17518__GPC
MGQIITFFQEVPHVIEEVMNIVLIALSLLAILKGIYNVATCGLFGLVSFLLLCGRSCSTTYKGVYELQTLELDMASLNMTMPLSCTKNNSHHYIMVGNETGLELTLTNTSIINHKFCNLSDAHKKNLYDHALMSIISTFHLSIPNFNQYEAMSCDFNGGKISVQYNLSHAYAVDAANHCGTIANGVLQTFMRMAWGGSYIALDSGKGSWDCIMTSYQYLIIQNTTWEDHCQFSRPSPIGYLGLLSQRTRDIYISRRLLGTFTWTLSDSEGNETPGGYCLTRWMLIEAELKCFGNTAVAKCNEKHDEEFCDMLRLFDFNKQAIRRLKTEAQMSIQLINKAVNALINDQLIMKNHLRDIMGIPYCNYSKYWYLNHTVTGKTSLPRCWLVSNGSYLNETHFSDDIEQQADNMITELLQKEYMDRQGKTPLGLVDLFVFSTSFYLISIFLHLVKIPTHRHVIGKPCPKPHRLNHMGICSCGLYKHPGVPVKWKR

SEQ ID NO: 39 - protein, 490 aa, Artificial Sequence
  derived and/or modified protein sequence (wt) from LASV(ISTH2064-NIG-2012;Clade II)__AIT17524__GPC
MGQIITFFQEVPHVIEEVMNIVLIALSLLAILKGIYNVATCGLFGLVSFLLLCGRSCSTTYKGVYELQTLELDMASLNMTMPLSCTKNNSHHYIMVGNETGLELTLTNTSIINHKFCNLSDAHKKNLYDHALMSIISTFHLSIPNFNQYEAMSCDFNGGKISVQYNLSHTYAIDAANHCGTIANGVLQTFMRMAWGGSYIALDSGKGSWDCIMTSYQYLIIQNTTWEDHCQFSRPSPIGYLGLLSQRTRDIYISRRLLGTFTWTLSDSEGNETPGGYCLTRWMLIEAELKCFGNTAVAKCNEKHDEEFCDMLRLFDFNKQAIRRLKTEAQMSIQLINKAVNALINDQLIMKNHLRDIMGIPYCNYSKYWYLNHTVTGKTSLPRCWLVSNGSYLNETHFSDDIEQQADNMITEMLQKEYMDRQGKTPLGLVDLFVFSTSFYLISIFLHLVKIPTHRHVIGKPCPKPHRLNHMGICSCGLYKHPGVPVKWKR

SEQ ID NO: 40 - protein, 490 aa, Artificial Sequence
  derived and/or modified protein sequence (wt) from LASV(ISTH2065-NIG-2012;Clade II)__AIT17528__GPC
MGQIITFFQEVPHVIEEVMNIVLIALSLLAMLKGIYNIATCGLFGLISFLLLCGRSCSTTYKGVYELQALELDMANLNMTMPLSCTKNNSHHYIMVGNETGLELTLTNTSIINHKFCNLSDAHKKNLYDHALMSIISTFHLSIPNFNQYEAMSCDFNGGKISVQYNLSHTYAGDAAKHCGTIANGVLQTFMRMAWGGSYIALDSGKGNWDCIMTSYQYLIIQNTTWEDHCQFSRPSPIGYLGLLSQRTRDIYISRRLLGTFTWTLSDSEGNETPGGYCLTRWMLIEAELKCFGNTAVAKCNEKHDEEFCDMLRLFDFNKQAIRRLKTEAQMSIQLINKAVNALINDQLIMKNHLRDIMGIPYCNYSKYWYLNHSVTGRTSLPRCWLVSNGSYLNETQFSDDIEQQADNMITEMLQKEYIDRQGKTPLGLVDLFVFSTSFYLISIFLHLIKIPTHRHIVGKPCPKPHRLNHMGICSCGLYKHPGIPVKWKR

SEQ ID NO: 41 - protein, 490 aa, Artificial Sequence
  derived and/or modified protein sequence (wt) from LASV(ISTH2094-NIG-2012;Clade II)__AIT17538__GPC
MGQIITFFQEVPHVIEEVMNIVLIALSLLAILKGIYNIATCGLFGLISFLLLCGRSCSTTYKGVYELQTLELDMANLNMTMPLSCTKNNSHHYIMVGNETGLELTLTNTSIINHKFCNLSDAHKKNLYDHALMSIISTFHLSIPNFNQYEAMSCDFNEGKISVQYNLSHSYAIDAAGHCGTIANGVLQTFMRMAWGGSYIALDSGKGNWDCIMTSYQYLIIQNTTWEDHCQFSRPSPIGYLGLLSQRTRDIYISRRLLGTFTWTLSDSEGNEAPGGYCLTRWMLIEAELKCFGNTAIAKCNEKHDEEFCDMLRLFDFNKQAIKRLKAEAQMSIHLINKAVNALINDQLIMKNHLRDIMGIPYCNYSKYWYLNHTVTGKTSLPKCWLVSNGSYLNETHFSDDIEQQADNMITELLQKEYMDRQGKTPLGLVDLFVFSTSFYLISIFLHLVKIPTHRHIVGRPCPKPHRLNHMGICSCGLYKHPGVPVKWKR

SEQ ID NO: 42 - protein, 490 aa, Artificial Sequence
  derived and/or modified protein sequence (wt) from LASV(ISTH2129-NIG-2012;Clade II)__AIT17544__GPC
MGQIITFFQEVPHVIEEVMNIVLIALSLLAILKGIYNVATCGLFGLVSFLLLCGRSCSTTYKGVYELQTLELDMGSLNMTMPLSCTKNNSHHYIMVGNETGLELTLTNTSIINHKFCNLSDAHKKNLYDHALMSIISTFHLSIPNFNQYEAMSCDFNGGKISVQYNLSHSYAVDAANHCGTIANGVLQTFMRMAWGGSYIALDSGKGSWDCIMTSYQYLIIQNTTWEDHCQFSRPSPIGYLGLLSQRTRDIYISRRLLGTFTWTLSDSEGNETPGGYCLTRWMLIEAELKCFGNTAVAKCNEKHDEEFCDMLRLFDFNKQAIRRLKTEAQMSIQLINKAVNALINDQLIMKNHLRDIMGIPYCNYSKYWYLNHTVTGKTSLPRCWLVSNGSYLNETHFSDDIEQQADNMITELLQKEYMDRQGKTPLGLVDLFVFSTSFYLISIFLHLVKIPTHRHIIGKPCPKPHRLNHMGICSCGLYKHPGVPVKWKR

SEQ ID NO: 43 - protein, 490 aa, Artificial Sequence
  derived and/or modified protein sequence (wt) from LASV(ISTH2217-NIG-2012;Clade II)__AIT17548__GPC
MGQIITFFQEVPHVIEEVMNIVLIALSLLAILKGIYNVATCGLFGLVSFLFLCGRSCSTTYKGVYELQTLELDMASLNMTMPLSCTKNNSHHYIMVGNETGLELTLTNTSIINHKFCNLSDAHKRNLYDHALMSIISTFHLSIPNFNQYEAMSCDFNGGKISVQYNLSHAYAGDAAKHCGTIANGVLQTFMRMAWGGSYIALDSGKGSWDCIMTSYQYLIIQNTTWEDHCQFSRPSPIGYLGLLSQRTRDIYISRRLLGTFTWTLSDSEGNETPGGYCLTRWMLIEAELKCFGNTAVAKCNEKHDEEFCDMLRLFDFNKQAIRRLRTEAQMSIQLINKAVNALINDQLIMKNHLRDIMGIPYCNYSKYWYLNHTVTGKTSLPKCWLVSNGSYLNETHFSDDIEQQADNMITEMLQKEYIDRQGKTPLGLVDLFVFSTSFYLISIFLHLVKIPTHRHVIGKPCPKPHRLNHMGICSCGLYKHPGVPVKWKR

SEQ ID NO: 44 - protein, 490 aa, Artificial Sequence
  derived and/or modified protein sequence (wt) from LASV(ISTH2271-NIG-2012;Clade II)__AIT17552__GPC
MGQIITFFQEVPHVIEEVMNIVLIALSLLAILKGIYNVATCGLFGLVSFLLLCGRSCSTTYKGVYELQTLELDMASLNMTMPLSCTKNNSHHYIMVGNETGLELTLTNTSIINHKFCNLSDAHKKNLYDHALMSIISTFHLSIPNFNQYEAMSCDFNGGKISVQYNLSHAYAVNAANHCGTIANGVLQTFMRMAWGGSYIALDSGKGSWDCIMTSYQYLIIQNTTWEDHCQFSRPSPIGYLGLLSQRTRDIYISRRLLGTFTWTLSDSEGNETPGGYCLTRWMLIEAELKCFGNTAVAKCNEKHDEEFCDMLRLFDFNKQAIRRLKTEAQMSIQLINKAVNALINDQLIMKNHLRDIMGIPYCNYSKYWYLNHTVTGKTSLPRCWLVSNGSYLNETHFSDDIEQQADNMITELLQKEYMDRQGKTPLGLVDLFVFSTSFYLISIFLHLVKIPTHRHVIGKPCPKPHRLNHMGICSCGLYKHPGVPVKWKK

SEQ ID NO: 45 - protein, 490 aa, Artificial Sequence
  derived and/or modified protein sequence (wt) from LASV(ISTH2304-NIG-2012;Clade II)__AIT17556__GPC
MGQIITFFQEVPHVIEEVMNIVLIALSLLAILKGIYNVATCGLFGLVSFLLLCGRSCSTTYKGVYELQTLELDMASLNMTMPLSCTKNNSHHYIMVGNETGLELTLTNTSIINHKFCNLSDAHKKNLYDHALMSIISTFHLSIPNFNQYEAMSCDFNGGKISVQYNLSHTYAVDAANHCGTIANGVLQTFMRMAWGGSYIALDSGRGSWDCIMTSYQYLIIQNTTWEDHCQFSRPSPIGYLGLLSQRTRDIYISRRLLGTFTWTLSDSEGNETPGGYCLTRWMLIEAELKCFGNTAVAKCNEKHDEEFCDMLRLFDFNKQAIRRLKTEAQMSIQLINKAVNALINDQLIMKNHLRDIMGIPYCNYSKYWYLNHTITGKTSLPRCWLVSNGSYLNETHFSDDIEQQADNMITELLQKEYIDRQGKTPLGLVDLFVFSTSFYLISIFLHLVKIPTHRHITGKPCPKPHRLNHMGICSCGLYKHPGVPVRWKR

SEQ ID NO: 46 - protein, 490 aa, Artificial Sequence
  derived and/or modified protein sequence (wt) from LASV(ISTH2312-NIG-2012;Clade II)__AIT17560__GPC
MGQIITFFQEVPHVIEEVMNIVLIALSLLAVLKGIYNVATCGLFGLVSFLLLCGRSCSTTYKGVYELQTLELDMASLNMTMPLSCTTNNSHHYIMVGNETGLELTLTNTSIINHKFCNLSDAHKKNLYDHALMSIISTFHLSIPNFNQYEAMSCDFNGGKISVQYNLSHAYAGEAANHCGTIANGVLQTFMRMAWGGSYIALDSGKGSWDCIMTSYKYLIIQNTTWGDHCQFSRPSPIGYLGLLSQRTRDIYISRRLLGTFTWTLSDSEGNETPGGYCLTRWMLIEAELKCFGNTAVAKCNEKHDEEFCDMLRLFDFNKQAIRKLKTEAQMSIQLINKAVNALINDQLIMKNHLRDIMGIPYCNYSRYWYLNHTVTGRTSLPRCWLVSNGSYLNETHFSDDIEQQADNMITELLQKEYIDRQGKTPLGLVDLFVFSTSFYLISIFLHLVKIPTHRHIIGKPCPKPHRLNHMGICSCGLYKHPGVPVKWKR

SEQ ID NO: 47 - protein, 490 aa, Artificial Sequence
  derived and/or modified protein sequence (wt) from LASV(ISTH2316-NIG-2012;Clade II)__AIT17564__GPC
MGQIITFFQEVPHVIEEVMNIVLIALSLLAILKGIYNVATCGLFGLLSFLLLCGRSCSTTYKGVYELQTLELDMASLNMTMPLSCTKNNSHHYIMVGNETGLELTLTNTSIINHKFCNLSDAHKKDLYDHALMSIISTFHLSIPNFNQYEAMSCDFNGGKISVQYNLSHAYAVDAAKHCGTIANGVLQTFMRMAWGGSYIALDSGKGSWDCIMTSYQYLIIQNTSWEDHCQFSRPSPIGYLGLLSQRTRDIYISRRLLGTFTWTLSDSEGNETPGGYCLTRWMLIEAELKCFGNTAVAKCNEKHDEEFCDMLRLFDFNKQAIKRLKTEAQMSIQLINKAVNALINDQLIMKNHLRDIMGIPYCNYSKYWYLNHTVTGKTSLPRCWLVSNGSYLNETHFSDDIEQQADNMITELLQKEYIDRQGKTPLGLVDLFVFSTSFYLISIFLHLVKIPTHRHVIGKPCPKPHRLNHMGICSCGLYKHPGVPVKWKR

SEQ ID NO: 48 - protein, 490 aa, Artificial Sequence
  derived and/or modified protein sequence (wt) from LASV(ISTH2358-NIG-2012;Clade II)__AIT17572__GPC
MGQIITFFQEVPHVIEEVMNIVLIALSLLAILKGIYNVATCGLFGLVSFLLLCGRSCSTTYKGVYELQTLELDMANLNMTMPLSCTKNNSHHYIMVGNETGLELTLTNTSIINHKFCNLSDAHKKNLYDHALMSIISTFHLSIPNFNQYEAMSCDFNGGKISVQYNLSHNYAVDAANHCGTIANGVLQTFMRMAWGGSYIALDSGKGNWDCIMTSYQYLIIQNTTWEDHCQFSRPSPIGYLGLLSQRTRDIYISRRLLGTFTWTLSDSEGNDMPGGYCLTRWMLIEAELKCFGNTAVAKCNEKHDEEFCDMLRLFDFNKQAIRRLKTEAQMNIQLINKAVNALINDQLIMKNHLRDIMGIPYCNYSKYWYLNHTVTGKTSLPRCWLVSNGSYLNETHFSDDIEQQADNMITELLQKEYMDRQGKTPLGLVDLFVFSTSFYLISIFLHLVKIPTHRHIIGKPCPKPHRLNHMGICSCGLYKHPGVPVKWKR

SEQ ID NO: 49 - protein, 490 aa, Artificial Sequence
  derived and/or modified protein sequence (wt) from LASV(ISTH2376-NIG-2012;Clade II)__AIT17576__GPC
MGQIITFFQEVPHVIEEVMNIVLIALSLLAILKGIYNVATCGLFGLVSFLLLCGRSCSTTYKGVYELQTLELDMASLNMTMPLSCTKNNSHHYIMVGNETGLELTLTNTSIINHKFCNLSDAHKKNLYDHALMSIISTFHLSIPNFNQYEAMSCDFNGGKISVQYNLSHTYAVDAANHCGTIANGVLQTFMRMAWGGSYIALDSGKGNWDCIMTSYQYLIIQNTTWEDHCQFSRPSPIGYLGLLSQRTRDIYISRRLLGTFTWTLSDSEGNETPGGYCLTRWMLIEAELKCFGNTAVAKCNEKHDEEFCDMLRLFDFNKQAISRLKTEAQMSIQLINKAVNALINDQLIMKNHLRDIMGIPYCNYSKYWYLNHTVTGKTSLPRCWLVSNGSYLNETHFSDDIEQQADNMITEMLQKEYIDRQGKTPLGLVDLFVFSTSFYLISIFLHLVKIPTHRHITGKPCPKPHRLNHMGICSCGLYKHPGVPVKWKR

SEQ ID NO: 50 - protein, 490 aa, Artificial Sequence
  derived and/or modified protein sequence (wt) from LASV(Lassa virus/H.sapiens-wt/NGA/2015/ISTH_0543;Clade II)__AVO03639__GPC
MGQIITFFQEVPHVIEEVMNIVLIALSLLAILKGIYNVATCGLFGLVSFLLLCGRSCSTTYKGVYELQTLELDMANLNMTMPLSCTKNNSHHYIMVGNETGLELTLTNTSIINHKFCNLSDAHKKNLYDHALMSIISTFHLSIPNFNQYEAMSCDFNGGKISVQYNLSHTYAVDAANHCGTIANGVLQTFMRMAWGGSYIALDSGKGSWDCIMTSYQYLVIQNTTWEDHCQFSRPSPIGYLGLLSQRTRDIYISRRLLGTFTWTLSDSEGNETPGGYCLTRWMLIEAELKCFGNTAVAKCNEKHDEEFCDMLRLFDFNKQAIRRLKTEAQMSIQLINKAVNALINDQLIMKNHLRDIMGIPYCNYSKYWYLNHTVTGKTSLPRCWLVSNGSYLNETHFSDDIEQQADNMITELLQKEYIDRQGKTPLGLVDLFVFSTSFYLISIFLHLVKIPTHRHITGKPCPKPHRLNHMGICSCGLYKHPGVPVKWKR

SEQ ID NO: 51 - protein, 490 aa, Artificial Sequence
  derived and/or modified protein sequence (wt) from LASV(Lassa virus/H.sapiens-wt/NGA/2015/ISTH_0547;Clade II)__AVO03583__GPC
MGQIITFFQEVPHVIEEVMNIVLIALSLLAILKGIYNVATCGLFGLVSFLLLCGRSCSTTYKGVYELQTLELDMASLNMTMPLSCTKNNSHHYIMVGNETGLELTLTNTSIINHKFCNLSDAHKKNLYDHALMSIISTFHLSIPNFNQYEAMSCDFNGGKISVQYNLSHTYAVDAANHCGTIANGVLQTFMRMAWGGSYIALDSGKGSWDCIMTSYQYLIIQNTTWEDHCQFSRPSPIGYLGLLSQRTRDIYISRRLLGTFTWTLSDSEGNETPGGYCLTRWMLIEAELKCFGNTAVAKCNEKHDEEFCDMLRLFDFNKQAIRRLKTEAQMSIQLINKAVNALINDQLIMKNHLRDIMGIPYCNYSKYWYLNHTVTGKTSLPRCWLVSNGSYLNETHFSDDIEQQADNMITELLQKEYIERQGKTPLGLVDLFVFSTSFYLISIFLHLVKIPTHRHITGKPCPKPHRLNHMGICSCGLYKHPGVPVKWKR

SEQ ID NO: 52 - protein, 490 aa, Artificial Sequence
  derived and/or modified protein sequence (wt) from LASV(Lassa virus/H.sapiens-wt/NGA/2015/ISTH_0574;Clade II)__AVO03657__GPC
MGQIITFFQEVPHVIEEVMNIVLIALSLLAILKGIYNVATCGLFGLVAFLLLCGRSCSTTYKGVYELQTLELDMASLNMTMPLSCTKNNSHHYIMVGNETGLELTLTNTSIINHKFCNLSDAHKKNLYDHALMSIISTFHLSIPNFNQYEAMSCDFNGGKISVQYNLSHTYAVDAANHCGTITNGVLQTFMRMAWGGSYIALDSGKGSWDCIMTSYQYLIIQNTTWEDHCQFSRPSPIGYLGLLSQRTRDIYISRRLLGTFTWTLSDSEGNETPGGYCLTRWMLIEAELKCFGNTAVAKCNEKHDEEFCDMLRLFDFNKQAIRRLKTEAQMSIQLINKAVNALINDQLIMKNHLRDIMGIPYCNYSKYWYLNHTVTGRTSLPRCWLVSNGSYLNETHFSDDIEQQADNMITELLQKEYMDRQGKTPLGLVDLFVFSTSFYLISIFLHLIKIPTHRHVIGKPCPKPHRLNHMGICSCGLYKHPGVPVKWKR

SEQ ID NO: 53 - protein, 490 aa, Artificial Sequence
  derived and/or modified protein sequence (wt) from LASV(Lassa virus/H.sapiens-wt/NGA/2015/ISTH_0681;Clade II)__AVO03617__GPC
MGQIITFFQEVPHVIEEVMNIVLIALSLLAILKGIYNVATCGLFGLVSFLLLCGRSCSTTYKGVYELQTLELDMASLNMTMPLSCTKNNSHHYIMVGNETGLELTLTNTSIINHKFCNLSDAHKKNLYDHALMSIISTFHLSIPNFNQYEAMSCDFNGGKISVQYNLSHTYAEGAANHCGTIANGVLQTFMRMAWGGSYIALDSGKGSWDCIMTSYQYLIIQNTTWEDHCQFSRPSPIGYLGLLSQRTRDIYISRRLLGTFTWTLSDSEGNETPGGYCLTRWMLIEAELKCFGNTAVAKCNEKHDEEFCDMLRLFDFNKQAIMRLKTEAQMSIQLINKAVNALINDQLIMKNHLRDIMGIPYCNYSKYWYLNHTVTGKTSLPRCWLVSNGSYLNETHFSDDIEQQADNMITEMLQKEYMDRQGKTPLGLVDLFVFSTSFYLISIFLHLVKIPTHRHVIGKPCPKPHRLNHMGICSCGLYKHPGVPVKWKR

SEQ ID NO: 54 - protein, 490 aa, Artificial Sequence
  derived and/or modified protein sequence (wt) from LASV(Lassa virus/H.sapiens-wt/NGA/2015/ISTH_0682;Clade II)__AVO03625__GPC
MGQIITFFQEVPHVIEEVMNIVLIALSLLAILKGIYNVATCGLFGLVSFLLLCGRSCSTTYKGVYELQTLELDMASLNMTMPLSCTKNNSHHYIMVGNETGLELTLTNTSIINHKFCNLSDAHKKNLYDHALMSIISTFHLSIPNFNQYEAMSCDFNGGKISVQYNLSHAYAVDAANHCGTIANGVLQTFMRMAWGGSYIALDSGKGSWDCIMTSYHYLIIQNTTWEDHCQFSRPSPIGYLGLLSQRTRDIYISRRLLGTFTWTLSDSEGNETPGGYCLTRWMLIEAELKCFGNTAVAKCNEKHDEEFCDMLRLFDFNKQAIRRLKTEAQMSIQLINKAVNALINDQLIMKNHLRDIMGIPYCNYSKYWYLNHTVTGKTSLPRCWLVSNGSYLNETHFSDDIEQQADNMITELLQKEYIDRQGKTPLGLVDLFVFSTSFYLISIFLHLVKIPTHRHVIGKPCPKPHRLNHMGICSCGLYKHPGVPVKWKR

SEQ ID NO: 55 - protein, 490 aa, Artificial Sequence
  derived and/or modified protein sequence (wt) from LASV(Lassa virus/H.sapiens-wt/NGA/2015/ISTH_0687;Clade II)__AVO03581__GPC
MGQIITFFQEVPHVIEEVMNIVLIALSLLAILKGIYNVATCGLFGLVSFLLLCGRSCSTTYKGVYELQTLELDMTNLNMTMPLSCTKNNSHHYIMVGNETGLELTLTNTSIINHKFCNLSDAHKKNLYNHALMSIISTFHLSIPNFNQYEAMSCDFNGGKISVQYNLSHTYAVDAANHCGTVANGVLQTFMRMAWGGSYIALDSGKGGWDCIMTSYQYLIIQNTTWEDHCQFSRPSPIGYLGLLSQRTRDIYISRRLLGTFTWTLSDSEGNETPGGYCLTRWMLIEAELKCFGNTAVAKCNEKHDEEFCDMLRLFDFNKQAIRKLKAEAQMSIQLINKAVNALINDQLIMKNHLRDIMGIPYCNYSKYWYLNHTVTGKTSLPKCWLVSNGSYLNETHFSDDIEQQADNMITELLQKEYMDRQGKTPLGLVDLFVFSTSFYLISIFLHLVKIPTHRHIIGKPCPKPHRLNHMGICSCGLYKHPGVPVKWKR

SEQ ID NO: 56 - protein, 490 aa, Artificial Sequence
  derived and/or modified protein sequence (wt) from LASV(Lassa virus/H.sapiens-wt/NGA/2015/ISTH_0736;Clade II)__AVO03573__GPC
MGQIITFFQEVPHVIEEVMNIVLIALSLLAVLKGIYNVATCGLFGLVSFLLLCGRSCSTTYKGVYELQTLELDMASLNMTMPLSCTKNNSHHYIMVGNETGLELTLTNTSIINHKFCNLSDAHKKNLYDHALMSIISTFHLSIPNFNQYEAMSCDFNGGKISVQYNLSHTHAVDAANHCGTIANGVLQTFMRMAWGGSYIALDSGKGSWDCIMTSYQYLIIQNTTWEDHCQFSRPSPIGYLGLLSQRTRDIYISRRLLGTFTWTLSDSEGNETPGGYCLTRWMLIEAELKCFGNTAVAKCNEKHDEEFCDMLRLFDFNKQAIRRLKTEAQMSIQLINKAVNALINDQLIMKNHLRDIMGIPYCNYSRYWYLNHTVTGKTSLPRCWLVSNGSYLNETHFSDDIEQQADNMITELLQKEYIDRQGRTPLGLVDLFVFSTSFYLISIFLHLVKIPTHRHVIGKPCPKPHRLNHMGICSCGLYKHPGVPVKWKR

SEQ ID NO: 57 - protein, 490 aa, Artificial Sequence
  derived and/or modified protein sequence (wt) from LASV(Lassa virus/H.sapiens-wt/NGA/2015/ISTH_0789;Clade II)__AVO03551__GPC
MGQIVTFFQEVPHVIEEIMNIVLITLSLLAILKGVYNLATCGLIGLITFLFLCGRSCSTIYKGSYQFQTLELNMETLNMTMPLSCTKNSSHHYIRVSNETGLELTLTNTSIINHKFCNLSDAHKKNLYDHTLMSIISTFHLSIPNFNQYEAMSCDFNGGKISVQYNLSHSYAVDAANHCGTVANGVLQTFMRMAWGGSYIALDSGRGNWDCIMTSYQYLIIQNTTWEDHCQFSRPSPIGYLGLLSQRTRDIYISRRLLGTFTWTLSDSEGKETPGGYCLTRWMLIEAELKCFGNTAVAKCNEKHDEEFCDMLRLFDFNKQAIQRLKAEAQMSIQLINKAVNALINDQLIMKNHLRDIMGIPYCNYSKYWYLNHTSTGRTSLPKCWLVSNGSYLNETHFSDDIEQQADNMITEMLQKEYIDRQGKTPLGLVDLFVFSTSFYLISIFLHLVKIPTHRHIVGKSCPKPHRLNHMGICSCGLYKRPGVPVKWKR

SEQ ID NO: 58 - protein, 490 aa, Artificial Sequence
  derived and/or modified protein sequence (wt) from LASV(Lassa virus/H.sapiens-wt/NGA/2015/ISTH_0821;Clade II)__AVO03641__GPC
MGQIITFFQEVPHVIEEVMNIVLIALSLLAILKGIYNVATCGLFGLVSFLLLCGRSCSTTYKGVYELQTLELDMASLNMTMPLSCTKNNSHHYIMVGNETGLELTLTNTSIINHKFCNLSDAHKKNLYDHTLMSIISTFHLSIPNFNQYEAMSCDFNGGKISVQYNLSHTYAVDAANHCGTIANGVLQTFMRMAWGGSYIALDSGKGNWDCIMTSYQYLIIQNTTWEDHCQFSRPSPIGYLGLLSQRTRDIYISRRLLGTFTWTLSDSEGNETPGGYCLTRWMLIEAELKCFGNTAVAKCNEKHDEEFCDMLRLFDFNKQAISRLKTEAQMSIQLINKAVNALINDQLIMKNHLRDIMGIPYCNYSKYWYLNHTVTGKTSLPRCWLVSNGSYLNETHFSDDIEQQADNMITEMLQKEYIDRQGKTPLGLVDLFVFSTSFYLISIFLHLVKIPTHRHVIGKPCPKPHRLNHMGICSCGLYKHPGVPVKWKR

SEQ ID NO: 59 - protein, 490 aa, Artificial Sequence
  derived and/or modified protein sequence (wt) from LASV(Lassa virus/H.sapiens-wt/NGA/2015/ISTH_0831;Clade II)__AVO03545__GPC
MGQIVTFFQEVPHVIEEIMNIVLITLSLLAILKGVYNLATCGLIGLITFLFLCGRSCSMTYKGSYQLETLELNMETLNMTMPLSCTKNTSHHYIRVGNETGLELTLTNTSIINHKFCNLSDAHKKNLYDHSLMSIVSTFHLSIPNFNQYEAMSCDFNGGKISIQYNLSHAYAGDAAKHCGTLANGVLQTFMRMAWGGSYIALDSGRGNWDCIMTSYQYLIIQNTTWDDHCQFSRPSPIGYLGLLSQRTREIYISRRLLGTFTWTLSDSEGNEAPGGYCLTRWMLIEAELKCFGNTAVAKCNEKHDEEFCDMLRLFDFNKQAIQRLKTEAQMSIQLINKAVNALINDQLIMKNHLRDIMGIPYCNYSKYWYLNHTTTGRTSLPRCWLVSNGSYLNETHFSDDIEQQADNMITEMLQKEYIDRQGKTPLGLVDLFVFSTSFYLISIFLHLVKIPTHRHIVGKSCPKPHRLNHMGICSCGLYKQPGVPVRWKR

SEQ ID NO: 60 - protein, 490 aa, Artificial Sequence
  derived and/or modified protein sequence (wt) from LASV(Lassa virus/H.sapiens-wt/NGA/2016/ISTH_0009;Clade II)__AVO03571__GPC
MGQIITFFQEVPHVIEEVMNIVLIALSLLAILKGIYNVATCGLLGLVSFLLLCGRSCSTTYKGVYELQTLELDMASLNMTMPLSCTKNNSHHYIMVGNETGLELTLTNTSIINHKFCNLSDAHKKNLYDHALMSIISTFHLSIPNFNQYEAMSCDFNGGRISVQYNLSHSYAVDAANHCGTIANGVLQTFMRMAWGGSYIALDSGKGSWDCIMTSYQYLIIQNTTWEDHCQFSRPSPIGYLGLLSQRTRDIYISRRLLGTFTWTLSDSEGNETPGGYCLTRWMLIEAELKCFGNTAVAKCNEKHDEEFCDMLRLFDFNKQAIRRLKTEAQMSIQLINKAVNALINDQLIMKNHLRDIMGIPYCNYSKYWYLNHTVTGKTSLPRCWLVSNGSYLNETHFSDDIEQQADNMITELLQKEYIDRQGKTPLGLVDLFVFSTSFYLISIFLHLVKIPTHRHITGKPCPKPHRLNHMGICSCGLYNHPGVPVKWKR

SEQ ID NO: 61 - protein, 490 aa, Artificial Sequence
  derived and/or modified protein sequence (wt) from LASV(Lassa virus/H.sapiens-wt/NGA/2016/ISTH_0017;Clade II)__AVO03567__GPC
MGQIITFFQEVPHVIEEVMNIVLIALSLLAILKGIYNVATCGLFGLVSFLLLCGRSCSTTYKGVYELQTLELDMASLNMTMPLSCTKNNSHHYIMVGNETGLELTLTNTSIINHKFCNLSDAHKKNLYDHALMSIISTFHLSIPNFNQYEAMSCDFNGGKISVQYNLSHTYAIDAANHCGTIANGVLQTFMRMAWGGSYIALDSGKGSWDCIMTSYQYLIIQNTTWEDHCQFSRPSPIGYLGLLSQRTRDIYISRRLLGTFTWTLSDSEGNETPGGYCLTRWMLIEAELKCFGNTAVAKCNEKHDEEFCDMLRLFDFNKQAIRRLKTEAQMSIQLINKAVNALINDQLIMKNHLRDIMGIPYCNYSKYWYLNHTVTGKTSLPRCWLVSNGSYLNETHFSDDIEQQADNMITELLQKEYMDRQGKTPLGLVDLFVFSTSFYLISIFLHLVRIPTHRHVIGKPCPKPHRLNHMGICSCGLYKHPGVPVKWKR

SEQ ID NO: 62 - protein, 490 aa, Artificial Sequence
  derived and/or modified protein sequence (wt) from LASV(Lassa virus/H.sapiens-wt/NGA/2016/ISTH_0035;Clade II)__AVO03619__GPC
MGQIITFFQEVPHVIEEVMNIVLIALSLLAILKGIYNVATCGLFGLVSFLLLCGRSCSMTYKGVYELQTLELDMASLNMTMPLSCTKNNSHHYIMVGNETGLELTLTNTSIINHKFCNLSDAHKKNLYDHALMSIISTFHLSIPNFNQYEAMSCDFNGGKISVQYNLSHTYAVDAANHCGTIANGVLQTFMRMAWGGSYIALDSGKGSWDCIMTSYQYLIIQNTTWEDHCQFSRPSPIGYLGLLSQRTRDIYISRRLLGTFTWTLSDSEGNETPGGYCLTRWMLIEAELKCFGNTAVAKCNEKHDEEFCDMLRLFDFNKQAIRRLKTEAQMSIQLINKAVNALINDQLIMKNHLRDIMGIPYCNYSKYWYLNHTITGKTSLPRCWLVSNGSYLNETHFSDDIEQQADNMITELLQKEYMDRQGKTPLGLVDLFVFSTSFYLISIFLHLVKIPTHRHVIGKPCPKPHRLNHMGICSCGLYKHPGVPVKWKR

SEQ ID NO: 63 - protein, 490 aa, Artificial Sequence
  derived and/or modified protein sequence (wt) from LASV(Lassa virus/H.sapiens-wt/NGA/2016/ISTH_0104;Clade II)__AVO03631__GPC
MGQVITFFQEVPHVIEEVMNIVLIALSLLAILKGIYNVATCGLFGLISFLLLCGRSCSTTYKGVYELQTLELNMQNLNMTMPLSCTKNSSHHYIMVGNETGLELTLTNTSIINHKFCNLSDAHKKNLYDHALMSIISTFHLSIPNFNQYEAMSCDFNGGKISVQYNLSHTYAIDAANHCGTVANGVLQTFMRMAWGGSYIALDSGRGNWDCIMTSYQYLIIQNTTWEDHCQFSRPSPIGYLGLLSQRTRDIYISRRLLGTFTWTLSDSEGNEAPGGYCLTRWMLIEAELKCFGNTAVAKCNEKHDEEFCDMLRLFDFNKQAIKRLKTEAQMSIQLINKAVNALINDQLIMKNHLRDIMGIPYCNYSKYWYLNHTVTGRTSLPRCWLVSNGSYLNDTQFSDDIEQQADNMITEMLQKEYMDRQGKTPLGLVDLFVFSTSFYLISIFLHLVKIPTHRHIVGRPCPKPHRLNHMGICSCGLYKHPGVPVKWKR

SEQ ID NO: 64 - protein, 491 aa, Artificial Sequence
  derived and/or modified protein sequence (wt) from LASV(Lassa virus/H.sapiens-wt/NGA/2016/ISTH_0133;Clade II)__AVO03635__GPC
MGQIITFFQEVPHVIEEVMNIVLIALSLLAVLKAIYNVATCGVFGLISFLLLCGRSCSTTYKGVYELQTLELDMANLNMTMPLSCTKNNSHHYIMVGNETGLELTLTNTSIINHKFCNLSDAHKKNLYDHSLMSIISTFHLSIPNFNQYEAMSCDFNGGKISVQYNLSHSYAVDAAKHCGTIANGVLQTFMRMAWGGSYIALDSGKGGWDCIMTSYQYLIIQNTTWEDHCQFSRPSPIGYLGLLSQRTRDIYISRRLLGTFTWTLSDSEGNDAPGGYCLTRWMLIEAELKCFGNTAIAKCNEKHDEEFCDMLRLFDFNRQAIKRLKTEAQMSIQLINKAVNALINDQLIMKNHLRDIMGIPYCNYSKYWYLNHTITGKTSLPRCWLVSNGSYLNETHFSDDIEQQADNMITELLQKEYMDRQGKTPLGLVDLFVFSTSFYLISIFLHLVKIPTHRHIVGKPCPKPHRLNHMGICSCGLYKHPGVPVKWKRQ

SEQ ID NO: 65 - protein, 490 aa, Artificial Sequence
  derived and/or modified protein sequence (wt) from LASV(Lassa virus/H.sapiens-wt/NGA/2016/ISTH_0141;Clade II)__AVO03649__GPC
MGQIITFFQEVPHVIEEVMNIVLITLSLLAILKGIYNVATCGLFGLVSFLLLCGRSCSTIYKGVYELQTLELDMASLNMTMPLSCTKNNSHHYIMVGNETGLELTLTNTSIINHKFCNLSDAHKKNLYDHALMSIISTFHLSIPNFNQYEAMSCDFNGGKISVQYNLSHTYAVDAAEHCGTIANGVLQTFMRMAWGGSYIALDSGKGSWDCIMTSYQYLIIQNTTWEDHCQFSRPSPIGYLGLLSQRTRDIYISRRLLGTFTWTLSDSEGNETPGGYCLTRWMLIEAELKCFGNTAVAKCNEKHDEEFCDMLRLFDFNKQAIRRLKTEAQMSIQLINKAVNALINDQLIMKNHLRDIMGIPYCNYSKYWYLNHTVTGKTSLPRCWLVSNGSYLNETRFSDDIEQQADNMITELLQKEYIDRQGKTPLGLVDLFVFSTSFYLISIFLHLVKIPTHRHIIGKPCPKPHRLNHMGICSCGLYKHPGIPVKWKR

SEQ ID NO: 66 - protein, 490 aa, Artificial Sequence
  derived and/or modified protein sequence (wt) from LASV(Lassa virus/H.sapiens-wt/NGA/2016/ISTH_0146;Clade II)__AVO03633__GPC
MGQIITFFQEVPHVIEEVMNIVLIALSLLAILKGIYNVATCGLFGLVSFLLLCGRSCSTTYKGVYELQTLELDMASLNMTMPLSCTKNNSHHYIMVGNETGLELTLTNTSIINHKFCNLSDAHKKNLYDHALMSIISTFHLSIPNFNQYEAMSCDFNGGKISVQYNLSHTYAVDAANHCGTIANGVLQTFMRMAWGGSYIALDSGKGSWDCIMTSYQYLIIQNTTWEDHCQFSRPSPIGYLGLLSQRTRDIYISRRLLGTFTWTLSDSEGNETPGGYCLTRWMLIEAELKCFGNTAVAKCNEKHDEEFCDMLRLFDFNKQAIRRLKTEAQMSIQLINKAVNALINDQLIMKNHLRDIMGIPYCNYSKYWYLNHTVTGKTSLPRCWLVSNGSYLNETHFSDDIEQQADNMITELLQKEYMDRQGKTPLGLVDLFVFSTSFYLISIFLHLVKIPTHRHVIGKPCPKPHRLNHMGICSCGLYKHPGVPVKWKR

SEQ ID NO: 67 - protein, 490 aa, Artificial Sequence
  derived and/or modified protein sequence (wt) from LASV(Lassa virus/H.sapiens-wt/NGA/2016/ISTH_0187;Clade II)__AVO03549__GPC
MGQIVTFFQEVPHVIEEVMNIVLIALSVLAILKGLYNFATCGLIGLVTFLLLSGRSCSMVYKGVYELQTLELNMETLNMTMPLSCTKNNSHHYIRVGNDTGLELTLTNNTLLNHKFCNLSDAHKKNLYDHALMSIISTFHLSIPNFNQYEAMSCDFNGGRITVQYNLSHSYAVDAANHCGTVANGVLQTFMRMAWGGSYIALDSRHGNWDCIMTSYQYLIIQNTTWEDHCQFSRPSPIGYLGLLSQRTRDIYISRRLLGTFTWTLSDSEGNETPGGYCLTRWMLIEAELKCFGNTAVAKCNEKHDEEFCDMLRLFDFNKQAIRRLKAEAQMSIQLINKAVNALINDQLIMKNHLRDIMGIPYCNYSKYWYLNHTSTGKTSLPRCWLVSNGSYLNETHFSDDIEQQADNMITEMLQKEYLDRQGKTPLGLVDIFVFSTSFYLISIFLHLIKIPTHRHIVGKPCPKPHRLNHMGICSCGLYKQPGVPVRWKR

SEQ ID NO: 68 - protein, 490 aa, Artificial Sequence
  derived and/or modified protein sequence (wt) from LASV(Lassa virus/H.sapiens-wt/NGA/2016/ISTH_0199;Clade II)__AVO03653__GPC
MGQIITFFQEVPHVIEEVMNIVLIALSLLAILKGIYNVATCGLFGLVSFLLLCGRSCSTTYKGVYELQTLELDMASLNMTMPLSCTKNNSHHYIMVGNETGLELTLTNTSIINHKFCNLSDAHKKNLYDHALMSIISTFHLSIPNFNQYEAMSCDFNGGKISVQYNLSHTYAVDAANHCGTIANGVLQTFMRMAWGGSYIALDSGKGNWDCIMTSYQYLIIQNTTWEDHCQFSRPSPIGYLGLLSQRTRDIYISRRLLGTFTWTLSDSEGNETPGGYCLTRWMLIEAELKCFGNTAVAKCNEKHDEEFCDMLRLFDFNKQAISRLKTEAQMSIQLINKAVNALINDQLIMKNHLRDIMGIPYCNYSKYWYLNHTVTGKTSLPRCWLVSNGSYLNETHFSDDIEQQADNMITEMLQKEYIDRQGKTPLGLVDLFVFSTSFYLISIFLHLVKIPTHRHVIGKPCPKPHRLNHMGICSCGLYKHPGVPVKWKR

SEQ ID NO: 69 - protein, 490 aa, Artificial Sequence
  derived and/or modified protein sequence (wt) from LASV(Lassa virus/H.sapiens-wt/NGA/2016/ISTH_0419;Clade II)__AVO03539__GPC
MGQIVTFFQEVPHVIEEVMNIVLIALSLLAILKGIYNFATCGLIGLITFLFLCGRSCSAIYKGSYQLQTIELNMETLNMTMPLSCTKNSSHHYIRVGNETGLELTLTNISIIDHKFCNLSDAHKKNLYDHALMSIISTFHLSIPNFNQYEAMSCDFNGGKISVQYNLSHTYAVDAANHCGTVANGVLQTFMRMAWGGSYIALDSGRGNWDCIMTSYQYLIIQNTTWEDHCQFSRPSPIGYLGLLSQRTRDIYISRRLLGTFTWTLSDSEGKETPGGYCLTRWMLIEAELKCFGNTAVAKCNEKHDEEFCDMLRLFDFNKQAIQRLKAEAQMSIQLINKAVNALINDQLIMKNHLRDIMGIPYCNYSKYWYLNHTSTGRTSLPRCWLVSNGSYLNETHFSDDIEQQADNMITEMLQKEYIDRQGKTPLGLVDLFVFSTSFYLISIFLHLIKIPTHRHIVGKSCPKPHRLNHMGICSCGLYKQPGVPVKWKR

SEQ ID NO: 70 - protein, 490 aa, Artificial Sequence
  derived and/or modified protein sequence (wt) from LASV(Lassa virus/H.sapiens-wt/NGA/2016/ISTH_0447;Clade II)__AVO03559__GPC
MGQIITFFQEVPHVIEEVMNIVLIALSLLAILKGIYNIATCGLFGLVSFLLLCGRSCSTTYKGVYELQTLELDMASLNMTMPLSCTKNNSHHYIMVGNETGLELTLTNTSIINHKFCNLSDAHKKNLYDHTLMSIISTFHLSIPNFNQYEAMSCDFNGGKISVQYNLSHAYAVDAANHCGTIANGVLQTFMRMAWGGSYIALDSGKGNWDCIMTSYQYLIIQNTTWEDHCQFSRPSPIGYLGLLSQRTRDIYISRRLLGTFTWTLSDSEGNETPGGYCLTRWMLIEAELKCFGNTAVAKCNEKHDEEFCDMLRLFDFNKQAIRRLKTEAQMSIQLINKAVNALINDQLIMKNHLRDIMGIPYCNYSKYWYLNHTVTGKTSLPRCWLVSNGSYLNETHFSDDIEQQADNMITELLQKEYIDRQGKTPLGLVDLFVFSTSFYLISIFLHLVKIPTHRHVVGKPCPKPHRLNHMGICSCGLYKHPGVPVKWKR

SEQ ID NO: 71 - protein, 490 aa, Artificial Sequence
  derived and/or modified protein sequence (wt) from LASV(Lassa virus/H.sapiens-wt/NGA/2016/ISTH_0543;Clade II)__AVO03595__GPC
MGQIITFFQEVPHVIEEVMNIVLIALSLLAILKGIYNIATCGLFGLISFLLLCGRSCSTTYKGVYELQTLELDMANLNMTMPLSCTKNNSHHYIMVGNETGLELTLTNTSIINHKFCNLSDAHKKNLYDHALMSIISTFHLSIPNFNQYEAMSCDFNGGKISVQYNLSHSYAVDAAGHCGTIANGVLQTFMRMAWGGSYIALDSGKGNWDCIMTSYQYLVIQNTTWEDHCQFSRPSPIGYLGLLSQRTRDIYISRRLLGTFTWTLSDSEGNEAPGGYCLTRWMLIEAELKCFGNTAIAKCNEKHDEEFCDMLRLFDFNKQAIRRLKAEAQMSIQLINKAVNALINDQLIMKNHLRDIMGIPYCNYSKYWYLNHTVTGKTSLPKCWLVSNGSYLNETHFSDDIEQQADNMITELLQKEYMDRQGKTPLGLVDLFVFSTSFYLISIFLHLVKIPTHRHIVGRPCPKPHRLNHMGICSCGLYKHPGVPVKWKR

SEQ ID NO: 72 - protein, 490 aa, Artificial Sequence
  derived and/or modified protein sequence (wt) from LASV(Lassa virus/H.sapiens-wt/NGA/2016/ISTH_0565;Clade II)__AVO03637__GPC
MGQIVTFFQEVPHVIEEVMNIVLIALSLLAILKGIYNVATCGLFGLISFLLLCGRSCSTTYKGVYELQTLELDMANLNMTMPLSCTKNSSHHYIMVGNETGLELTLTNTSIINHKFCNLSDAHKKNLYDHALMSIISTFHLSIPNFNQYEAMSCDFNGGKISVQYNLSHTYAVDAANHCGTIANGVLQTFMRMAWGGSYIALDSGKGNWDCIMTSYQYLIIQNTTWEDHCQFSRPSPIGYLGLLSQRTRDIYISRRLLGTFTWTLSDSEGNEAPGGYCLTRWMLIEAELKCFGNTAIAKCNEKHDEEFCDMLRLFDFNKQAIKRLKSEAQMSIQLINKAVNALINDQLIMKNHLRDIMGIPYCNYSRYWYLNHTVTGKTSLPRCWLISNGSYLNETHFSDDIEQQADNMITELLQKEYMDRQGKTPLGLVDLFVFSTSFYLISIFLHLVKIPTHRHIVGRPCPKPHRLNHMGICSCGLYKHPGVPVKWKR

SEQ ID NO: 73 - protein, 490 aa, Artificial Sequence
  derived and/or modified protein sequence (wt) from LASV(Lassa virus/H.sapiens-wt/NGA/2016/ISTH_0572;Clade II)__AVO03611__GPC
MGQIITFFQEVPHVIEEVMNIVLIALSLLAILKGIYNVATCGLFGLVAFLLLCGRSCSTTYKGVYELQTLELDMASLNMTMPLSCTKNNSHHYIMVGNETGLELTLTNTSIINHKFCNLSDAHKKNLYDHALMSIISTFHLSIPNFNQHEAMSCDFNGGKISVQYNLSHTYAVDAANHCGTIANGVLQTFMRMAWGGSYIALDSGKGSWDCIMTSYQYLIIQNTTWEDHCQFSRPSPIGYLGLLSQRTRDIYISRRLLGTFTWTLSDSEGNETPGGYCLTRWMLIEAELKCFGNTAVAKCNEKHDEEFCDMLRLFDFNKQAIRRLKTEAQMSIQLINKAVNALINDQLIMKNHLRDIMGIPYCNYSKYWYLNHTVTGRTSLPRCWLVSNGSYLNETHFSDDIEQQADNMITELLQKEYMDRQGKTPLGLVDLFVFSTSFYLISIFLHLIKIPTHRHVIGKPCPKPHRLNHMGICSCGLYKHPGVPVKWKR

SEQ ID NO: 74 - protein, 490 aa, Artificial Sequence
  derived and/or modified protein sequence (wt) from LASV(Lassa virus/H.sapiens-wt/NGA/2016/ISTH_0610;Clade II)__AVO03585__GPC
MGQIITFFQEVPHVIEEVMNIVLIALSLLAILKGVYNVATCGLFGLVSFLLLCGRSCSTTYKGVYELQTLELDMASLNMTMPLSCTKNNSHHYIMVGNETGLELTLTNTSIINHKFCNLSDAHKKNLYDHALMSIISTFHLSIPNFNQYEAMSCDFNGGKISVQYNLSHTYAVDAANHCGTIANGVLQTFMRMAWGGSYIALDSGRGSWDCIMTSYQYLIIQNTTWEDHCQFSRPSPIGYLGLLSQRTRDIYISRRLLGTFTWTLSDSEGNETPGGYCLTRWMLIEAELKCFGNTAVAKCNEKHDEEFCDMLRLFDFNKQAIRRLKAEAQMSIQLINKAVNALINDQLIMKNHLRDIMGIPYCNYSKYWYLNHTVTGRTSLPRCWLVSNGSYLNETHFSDDIEQQADNMITELLQKEYIDRQGKTPLGLVDLFVFSTSFYLISIFLHLVKIPTHRHIIGKPCPKPHRLNHMGICSCGLYKHPGVPVKWKR

SEQ ID NO: 75 - protein, 490 aa, Artificial Sequence
  derived and/or modified protein sequence (wt) from LASV(Lassa virus/H.sapiens-wt/NGA/2016/ISTH_0621;Clade II)__AVO03543__GPC
MGQIVTFFQEIPHVVEEIMNIVLITLSLLAILKGLYNFATCGLIGLITFLFLCGRSCSTIYKGSYQLQALELNMETLNMTMPLSCTKNNSHHYIRVGNETGLELTLTNTSIIDHKFCNLSDAHKRNLYDHTLMSIISTFHLSIPNFNQYEAMSCDFNGGKISVQYNLSHSYAGDAARHCGTVANGVLQTFMRMAWGGSYIALDSGKGNWDCIMTSYQYLIIQNTTWENHCQFSRPSPIGYLGLLSQRTRDIYISRRLLGTFTWTLSDSEGKETPGGYCLTRWMLIEAELKCFGNTAVAKCNEKHDEEFCDMLRLFDFNKQAIQRLKTEAQMSIQLINKAVNALINDQLIMKNHLRDIMGIPYCNYSKYWYLNHTTTGKTSLPKCWLVSNGSYLNETHFSDDIEQQADNMITEMLQKEYIDRQGKTPLGLVDLFVFSTSFYLISIFLHLIKIPTHRHIVGKSCPKPHRLNHMGICSCGLYKQPGVLVKWKR

SEQ ID NO: 76 - protein, 490 aa, Artificial Sequence
  derived and/or modified protein sequence (wt) from LASV(Lassa virus/H.sapiens-wt/NGA/2016/ISTH_0701;Clade II)__AVO03629__GPC
MGQIITFFQEVPHVIEEVMNIVLIALSLLAILKGIYNVATCGLFGLVSFLLLCGRSCSTTYKGVYELQTLELDMASLNMTMPLSCTKNNSHHYIMVGNETGLELTLTNTSIIGHKFCNLSDAHKKNLYDHALMSIISTFHLSIPNFNQYEAMSCDFNGGKISVQYNLSHAYAVDAANHCGTIANGVLQTFMRMAWGGSYIALDSGKGSWDCIMTSYQYLIIQNTTWEDHCQFSRPSPIGYLGLLSQRTRDIYISRRLLGTFTWTLSDSEGNETPGGYCLTRWMLIEAELKCFGNTAVAKCNEKHDEEFCDMLRLFDFNKQAIRRLKTEAQMSIQLINKAVNALINDQLIMKNHLRDIMGIPYCNYSKYWYLNHTVTGKTSLPRCWLVSNGSYLNETHFSDDIEQQADNMITELLQKEYIDRQGKTPLGLVDLFVFSTSFYLISIFLHLVKIPTHRHVIGKPCPKPHRLNHMGICSCGLYKHPGVPVKWKR

SEQ ID NO: 77 - protein, 490 aa, Artificial Sequence
  derived and/or modified protein sequence (wt) from LASV(Lassa virus/H.sapiens-wt/NGA/2016/ISTH_0702;Clade II)__AVO03557__GPC
MGQIITFFQEVPHVIEEVMNIVLIALSLLAVLKGIYNVATCGLFGLVAFLLLCGRSCSTTYKGVYELQTLELDMANLNMTMPLSCTKNNSHHYIMVGNETGLELTLTNTSIINHKFCNLSDAHKKNLYDHALMSIISTFHLSIPNFNQYEAMSCDFNGGKISVQYNLSHTYAVDAANHCGTIANGVLQTFMRMAWGGSYIALDSGKGSWDCIMTSYQYLIIQNTTWEDHCQFSRPSPIGYLGLLSQRTRDIYISRRLLGTFTWTLSDSEGNETPGGYCLTRWMLIEAELKCFGNTAVAKCNEKHDEEFCDMLRLFDFNKQAIRRLKTEAQMSIQLINKAVNALINDQLIMKNHLRDIMGIPYCNYSKYWYLNHTVTGRTSLPRCWLVSNGSYLNETHFSDDIEQQADNMITELLQKEYMDRQGKTPLGLVDLFVFSTSFYLISIFLHLIKIPTHRHVIGKPCPKPHRLNHMGICSCGLYKHPGVPVKWKR

SEQ ID NO: 78 - protein, 490 aa, Artificial Sequence
  derived and/or modified protein sequence (wt) from LASV(Lassa virus/H.sapiens-wt/NGA/2016/ISTH_0703;Clade II)__AVO03597__GPC
MGQIITFFQEVPHVIEEVMNIVLIALSLLAILKGIYNVATCGLFGLVSFLLLCGRSCSTTYKGVYELQTLELDMASLNMTMPLSCTKNNSHHYIMVGNETGLELTLTNTSIINHKFCNLSDAHKKNLYDHALMSIISTFHLSIPNFNQYEAMSCDFNGGKISVQYNLSHTYAVDAASHCGTIANGVLQTFMRMAWGGSYIALDSGKGSWDCIMTSYQYLIIQNTTWEDHCQFSRPSPIGYLGLLSQRTRDIYISRRLLGTFTWTLSDSEGNETPGGYCLTRWMLIEAELKCFGNTAVAKCNEKHDEEFCDMLRLFDFNKQAIRRLKTEAQMSIQLINKAVNALINDQLIMKNHLRDIMGIPYCNYSKYWYLNHTVTGRTSLPRCWLVSNGSYLNETHFSDDIEQQADNMITELLQKEYIERQGKTPLGLVDLFVFSTSFYLISIFLHLIKIPTHRHVIGKPCPKPHRLNHMGICSCGLYKHPGVPVKWKR

SEQ ID NO: 79 - protein, 490 aa, Artificial Sequence
  derived and/or modified protein sequence (wt) from LASV(Lassa virus/H.sapiens-wt/NGA/2016/ISTH_0717;Clade II)__AVO03547__GPC
MGQIVTFFQEVPHVIEEVMNIVLIALSILAILKGLYNVATCGLIGLVTFLLLSGRSCSMIYKGVYELQTLELNMETLNMTMPLSCTKNNSHHYIMVGNETGLELTLTNTSLLNHKFCNLSDAHKKNLYDHTLMSIISTFHLSIPNFNQYEAMSCDFNGGKITVQYNLSHTYAVDAVNHCGTLANGILQTFMRMAWGGSYIALDSRHGSWDCIMTSYQYLIIQNTTWEDHCQFSRPSPIGYLGLLSQRTRDIYISRRLLGTFTWTLSDSEGNETPGGYCLTRWMLIEAELKCFGNTAVAKCNEKHDEEFCDMLRLFDFNKQAIRRLKAEAQMSIQLINKAVNALINDQLIMKNHLRDIMGIPYCNYSKYWYLNHTSTGRTSLPRCWLVSNGSYLNETHFSDDIEQQADNMITEMLQKEYLDRQGKTPLGLVDLFVFSTSFYLISIFLHLIKIPTHRHIVGKPCPKPHRLNHMGICSCGLYKQPGVPVRWKR

SEQ ID NO: 80 - protein, 490 aa, Artificial Sequence
  derived and/or modified protein sequence (wt) from LASV(Lassa virus/H.sapiens-wt/NGA/2016/ISTH_0753;Clade II)__AVO03609__GPC
MGQIITFFQEVPHVIEEVMNIVLIALSLLAILKGIYNVATCGLFGLVSFLLLCGRSCSTTYKGVYELQTLELDMASLNMTMPLSCTKNNSHHYIMVGNETGLELTLTNTSIINHKFCNLSDAHKKNLYDHALMSIISTFHLSIPNFNQYEAMSCDFNGGKISVQYNLSHTYAVDAANHCGTIANGVLQTFMRMAWGGSYIALDSGKGNWDCIMTSYQYLIIQNTTWEDHCQFSRPSPIGYLGLLSQRTRDIYISRRLLGTFTWTLSDSEGNETPGGYCLTRWMLIEAELKCFGNTAVAKCNEKHDEEFCDMLRLFDFNKQAISRLKTEAQMSIQLINKAVNALINDQLIMKNHLRDIMGIPYCNYSKYWYLNHTVTGRTSLPRCWLVSNGSYLNETHFSDDIEQQADNMITELLQKEYMDRQGKTPLGLVDLFVFSTSFYLISIFLHLVKIPTHRHVIGKPCPKPHRLNHMGICSCGLYKHPGVPVKWKR

SEQ ID NO: 81 - protein, 490 aa, Artificial Sequence
  derived and/or modified protein sequence (wt) from LASV(Lassa virus/H.sapiens-wt/NGA/2016/ISTH_0759;Clade II)__AVO03593__GPC
MGQIITFFQEVPHVIEEVMNIVLIALSLLAILKGIYNVATCGLFGLVSFLLLCGRSCSTTYKGVYELQTLELDMASLNMTMPLSCTKNNSHHYIMVGNETGLELTLTNTSIINHKFCNLSDAHKKNLYDHTLMSIISTFHLSIPNFNQYEAMSCDFNGGKISVQYNLSHTYAVDAANHCGTIANGVLQTFMRMAWGGSYIALDSGKGSWDCIMTSYQYLIIQNTSWEDHCQFSRPSPIGYLGLLSQRTRDIYISRRLLGTFTWTLSDSEGNETPGGYCLTRWMLIEAELKCFGNTAVAKCNEKHDEEFCDMLRLFDFNKQAIRRLKTEAQMSIQLINKAVNALINDQLIMKNHLRDIMGIPYCNYSKYWYLNHTVTGKTSLPRCWLVSNGSYLNETHFSDDIEQQADNMITELLQKEYIDRQGKTPLGLVDLFVFSTSFYLISIFLHLVKIPTHRHVIGKPCPKPHRLNHMGICSCGLYKHPGVPVKWKR

SEQ ID NO: 82 - protein, 490 aa, Artificial Sequence
  derived and/or modified protein sequence (wt) from LASV(Lassa virus/H.sapiens-wt/NGA/2016/ISTH_0777;Clade II)__AVO03615__GPC
MGQIITFFQEVPHVIEEVMNIVLIALSLLAILKGIYNVATCGLLGLISFLLLCGRSCSTTYKGVYELQTLELDMANLNMTMPLSCTKNSSHHYIMVGNETGLELTLTNTSIINHKFCNLSDAHKKNLYDHALMSIISTFHLSIPNFNQYEAMSCDFNGGKISVQYNLSHAYAVDAANHCGTIANGVLQTFMRMAWGGSYIALDSGKGNWDCIMTSYQYLIIQNTTWEDHCQFSRPSPIGYLGLLSQRTRDIYISRRLLGTFTWTLSDSEGNEAPGGYCLTRWMLIEAELKCFGNTAIAKCNEKHDEEFCDMLRLFDFNKQAIRRLKTEAQMSIQLINKAVNALINDQLIMKNHLRDIMGIPYCNYSKYWYLNHTVTGKTSLPRCWLISNGSYLNETHFSDDIEQQADNMITELLQKEYMDRQGKTPLGLVDLFVFSTSFYLISIFLHLVKIPTHRHIVGKPCPKPHRLNHMGICSCGLYKHPGVPVKWKR

SEQ ID NO: 83 - protein, 490 aa, Artificial Sequence
  derived and/or modified protein sequence (wt) from LASV(Lassa virus/H.sapiens-wt/NGA/2016/ISTH_0779;Clade II)__AVO03655__GPC
MGQIITFFQEVPHVVEEVMNVVLIALSLLAILKGIYNIATCGLFGLISFLLLCGRSCSTTYKGVYELQTLELDMANLNMTMPLSCTKNNSHHYIMVGNETGLELTLTNTSIINHKFCNLSDAHKKNLYDHTLMSIISTFHLSIPNFNQYEAMSCDFNGGKISVQYNLSHGYAVDAANHCGTIANGVLQTFMRMAWGGSYIALDSGKGNWDCIMTSYQYLVIQNTTWEDHCQFSRPSPIGYLGLLSQRTRDIYISRRLLGTFTWTLSDSEGNDAPGGYCLTRWMLIEAELKCFGNTAIAKCNEKHDEEFCDMLRLFDFNRQAIKRLKTEAQMSIQLINKAVNALINDQLIMKNHLRDIMGIPYCNYSKYWYLNNTVTGKSSLPKCWLVSNGSYLNETHFSDDIEQQADNMITEMLQKEYIDRQGKTPLGLVDLFVFSTSFYLISIFLHLVRIPTHRHITGKPCPKPHRLNHMGICSCGLYKQPGVPVKWKR

SEQ ID NO: 84 - protein, 490 aa, Artificial Sequence
  derived and/or modified protein sequence (wt) from LASV(Lassa virus/H.sapiens-wt/NGA/2016/ISTH_0917;Clade II)__AVO03535__GPC
MGQIVTFFQEVPHVIEEIMNIVLITLSLLAILKGVYNLATCGLIGLITFLFLCGRSCSMTYKGNYQLETLELNMEMLNMTMPLSCTKNNSHHYIRVGNETGLELTLTNTSIIQHKFCNLSDAHKRNLYDHSLMSIVSTFHLSIPNFNQYEAMSCDFNGGKISIQYNLSHTYAGDAAKHCGTLANGILQTFMRMAWGGSYIALDSGRGGWDCIMTNYQYLIIQNVTWEDHCQFSRPSPIGYLGLLSQRTREVYISRRLLGTFTWTLSDSEGNEAPGGYCLTRWMLIEAELKCFGNTAVAKCNEKHDEEFCDMLRLFDFNKQAIRRLKAETQMSIQLINKAVNALINDQLIMKNHLRDIMGIPYCNYSKYWYLNHTITGRTSLPRCWLVSNGSYLNETHFSDDIEQQADNMITEMLQKEYIDRQGKTPLGLVDLFVFSTSFYLISIFLHLVKIPTHRHIVGKSCPKPHRLNHMGICSCGLYKRPGVSVRWKR

SEQ ID NO: 85 - protein, 490 aa, Artificial Sequence
  derived and/or modified protein sequence (wt) from LASV(Lassa virus/H.sapiens-wt/NGA/2016/ISTH_1006;Clade II)__AVO03643__GPC
MGQIITFFQEVPHVIEEVMNIVLIALSLLAILKGIYNVATCGLFGLVAFLLLCGRSCSTTYKGVYELQTLELDMASLNMTMPLSCTKNNSHHYIMVGNETGLELTLTNTSIINHKFCNLSDAHKKNLYDHALMSIISTFHLSIPNFNQYEAMGCDFNGGKISVQYNLSHSYAVDAANHCGTIANGVLQTFMRMAWGGSYIALDSGKGSWDCIMTSYQYLIIQNTTWEDHCQFSRPSPIGYLGLLSQRTRDIYISRRLLGTFTWTLSDSEGNETPGGYCLTRWMLIEAELKCFGNTAVAKCNEKHDEEFCDMLRLFDFNKQAIRRLKTEAQMSIQLINKAVNALINDQLIMKNHLRDIMGIPYCNYSKYWYLNHTVTGRTSLPRCWLVSNGSYLNETHFSDDIEQQADNMITELLQKEYMDRQGKTPLGLVDLFVFSTSFYLISIFLHLIKIPTHRHVIGKPCPKPHRLNHMGICSCGLYKHPGVPVKWKR

SEQ ID NO: 86 - protein, 490 aa, Artificial Sequence
  derived and/or modified protein sequence (wt) from LASV(Lassa virus/H.sapiens-wt/NGA/2016/ISTH_1026;Clade II)__AVO03589__GPC
MGQIITFFQEVPHVIEEVMNIVLIALSLLAILKGIYNVATCGLFGLVSFLLLCGRSCSTTYKGVYELQTLELDMASLNMTMPLSCTKNNSHHYIMVGNETGLELTLTNTSIINHKFCNLSDAHKKNLYDHALMSIISTFHLSIPNFNQYEAMSCDFNGGKISVQYNLSHAYAIDAASHCGTIANGVLQTFMRMAWGGSYIALDSGKGSWDCIMTSYQYLIIQNTTWEDHCQFSRPSPIGYLGLLSQRTRDIYISRRLLGTFTWTLSDSEGNETPGGYCLTRWMLIEAELKCFGNTAVAKCNEKHDEEFCDMLRLFDFNKQAIRRLKTEAQMSIQLINKAVNALINDQLIMKNHLRDIMGIPYCNYSKYWYLNHTVTGKTSLPRCWLVSNGSYLNETHFSDDIEQQADNMITELLQKEYLDRQGKTPLGLVDLFVFSTSFYLISIFLHLVKIPTHRHVIGRPCPKPHRLNHMGICSCGLYKHPGVPVKWKR

SEQ ID NO: 87 - protein, 490 aa, Artificial Sequence
  derived and/or modified protein sequence (wt) from LASV(Lassa virus/H.sapiens-wt/NGA/2016/ISTH_1070;Clade II)__AVO03651__GPC
MGQIITFFQEVPHVIEEVMNIVLIALSLLAILKGIYNVATCGLFGLVSFLLLCGRSCSTTYKGVYELQTLELDMASLNMTMPLSCTKNNSHHYIMVGNETGLELTLTNTSIINHKFCNLSDAHKKNLYDHALMSIISTFHLSIPNFNQYEAMSCDFNGGKISVQYNLSHTFAVDAANHCGTIANGVLQTFMRMAWGGSYIALDSGKGSWDCIMTSYQYLIIQNTTWEDHCQFSRPSPIGYLGLLSQRTRDIYISRRLLGTFTWTLSDSEGNETPGGYCLTRWMLIEAELKCFGNTAVAKCNEKHDEEFCDMLRLFDFNKQAIRRLKTEAQMSIQLINKAVNALINDQLIMKNHLRDIMGIPYCNYSKYWYLNHTVTGKTSLPRCWLVSNGSYLNETHFSDDIEQQADNMITELLQKEYMDRQGKTPLGLVDLFVFSTSFYLISIFLHLVKIPTHRHIIGKPCPKPHRLNHMGICSCGLYKHPGVPVKWKR

SEQ ID NO: 88 - protein, 490 aa, Artificial Sequence
  derived and/or modified protein sequence (wt) from LASV(Lassa virus/H.sapiens-wt/NGA/2016/ISTH_1123;Clade II)__AVO03645__GPC
MGQIITFFQEVPHVIEEVMNIVLIALSLLAILKGIYNVATCGLFGLVSFLLLCGRSCSTTYKGVYELQTLELDMGSLNMTMPLSCTKNNSHHYIMVGNETGLELTLTNTSIINHKFCNLSDAHKKNLYDHALMSIISTFHLSIPNFNQYEAMSCDFNGGKISVQYNLSHAYAVDAANHCGTIANGVLQTFMRMAWGGSYIALDSGKGSWDCIMTSYQYLIIQNTSWEDHCQFSRPSPIGYLGLLSQRTRDIYISRRLLGTFTWTLSDSEGNETPGGYCLTRWMLIEAELKCFGNTAVAKCNEKHDEEFCDMLRLFDFNKQAIRRLKTEAQMSIQLINKAVNALINDQLIMKNHLRDIMGIPYCNYSKYWYLNHTVTGKTSLPRCWLVSNGSYLNETHFSDDIEQQADNMITELLQKEYIDRQGKTPLGLVDLFVFSTSFYLISIFLHLVKIPTHRHVIGKPCPKPHRLNHMGICSCGLYKHPGVPVKWKR

SEQ ID NO: 89 - protein, 490 aa, Artificial Sequence
  derived and/or modified protein sequence (wt) from LASV(Lassa virus/H.sapiens-wt/NGA/2016/ISTH_1150;Clade II)__AVO03627__GPC
MGQVITFFQEIPHVIEEVMNIVLITLSLLAILKGIYNVATCGLFGLISFLLLCGRSCSTTYKGVYELQTLELDMANLNMTMPLSCTKNSSHHYIMVGNETGLELTLTNTSIINHKFCNLSDAHKKNLYDHALMSIISTFHLSIPNFNQYEAMSCDFNGGKISVQYNLSHAYAVDAANHCGTIANGVLQTFMRMAWGGSYIALDSGKGNWDCIMTSYQYLIIQNTTWEDHCQFSRPSPIGYLGLLSQRTRDIYISRRLLGTFTWTLSDSEGNEAPGGYCLTRWMLIEAELKCFGNTAIAKCNEKHDEEFCDMLRLFDFNKQAIRRLKTEAQKSIQLINKAVNALINDQLIMKNHLRDIMGIPYCNYSKYWYLNHTVTGKTSLPKCWLISNGSYLNETHFSDDIEQQADNMITELLQKEYMDRQGKTPLGLVDLFVFSTSFYLISIFLHLVKIPTHRHIVGRPCPKPHRLNHMGICSCGLYKHPGVPVKWKR

SEQ ID NO: 90 - protein, 490 aa, Artificial Sequence
  derived and/or modified protein sequence (wt) from LASV(Lassa virus/H.sapiens-wt/NGA/2016/ISTH_1174;Clade II)__AVO03555__GPC
MGQIITFFQEVPHVIEEVMNIVLIALSLLAILKGIYNVATCGFFGLVSFLLLCGRSCSTIYKGVYELQTLELDMASLNMTMPLSCTKNNSHHYIMVGNETGLELTLTNTSIINHKFCNLSDAHKKNLYDHALMSIISTFHLSIPHFNQYEAMSCDFNGGKISVQYNLSHTYAVDAANHCGTIANGVLQTFMRMAWGGSYIALDSGKGSWDCIMTSYQYLIIQNTTWEDHCQFSRPSPIGYLGLLSQRTRDIYISRRLLGTFTWTLSDSEGNETPGGYCLTRWMLIEAELKCFGNTAVAKCNEKHDEEFCDMLRLFDFNKQAIRKLKTEAQMSIQLINKAVNALINDQLIMKNHLRDIMGIPYCNYSKYWYLNHTVTGKTSLPRCWLVSNGSYLNETHFSDDIEQQADNMITELLQKEYMDRQGKTPLGLVDLFVFSTSFYLISIFLHLVKIPTHRHVIGKPCPKPHRLNHMGICSCGLYKHPGVPVKWKR

SEQ ID NO: 91 - protein, 490 aa, Artificial Sequence
  derived and/or modified protein sequence (wt) from LASV(Lassa virus/H.sapiens-wt/NGA/2016/ISTH_1207;Clade II)__AVO03599__GPC
MGQIITFFQEVPHVIEEVMNIVLIALSLLAILKGIYNVATCGLFGLVSFLLLCGRSCSTTYKGVYELQTLELDMTSLNMTMPLSCTKNNSHHYIMVGNETGLELTLTNTSIINHKFCNLSDAHKKNLYDHALMSIISTFHLSIPNFNQYEAMSCDFNGGKISVQYNLSHTYAVDAANHCGTIANGVLQTFMRMAWGGSYIALDSGKGSWDCIMTSYQYLIIQNTTWEDHCQFSRPSPIGYLGLLSQRTRDIYISRRLLGTFTWTLSDSEGNDTPGGYCLTRWMLIEAELKCFGNTAVAKCNEKHDEEFCDMLRLFDFNKQAIRRLKTEAQMSIQLINKAVNALINDQLIMKNHLRDIMGIPYCNYSKYWYLNHTVTGKTSLPRCWLVSNGSYLNETHFSDDIEQQADNMITELLQKEYIDRQGKTPLGLVDLFVFSTSFYLISIFLHLVKIPTHRHVIGKPCPKPHRLNHMGICSCGLYKHPGVPVKWKR

SEQ ID NO: 92 - protein, 490 aa, Artificial Sequence
  derived and/or modified protein sequence (wt) from LASV(Lassa virus/H.sapiens-wt/NGA/2016/ISTH_1306;Clade II)__AVO03623__GPC
MGQIITFFQEVPHVIEEVMNIVLIALSLLAILKGIYNVATCGLFGLVSFLLLCGRSCSTTYKGVYELQTLELDMASLNMTMPLSCTKNNSHHYIMVGNETGLELTLTNTSIINHKFCNLSDAHKKNLYDHALMSIISTFHLSIPNFNQYEAMSCDFNGGKISVQYNLSHTYAVDAANHCGTVANGVLQTFMRMAWGGSYIALDSGKGSWDCIMTSYQYLIIQNTTWEDHCQFSRPSPIGYLGLLSQRTRDIYISRRLLGTFTWTLSDSEGNETPGGYCLTRWMLIEAELKCFGNTAVAKCNEKHDEEFCDMLRLFDFNKQAIRRLKTEAQMSIQLINKAVNALINDQLIMKNHLRDIMGIPYCNYSKYWYLNHTVTGRTSLPRCWLVSNGSYLNETHFSDDIEQQADNMITELLQKEYIDRQGKTPLGLVDLFVFSTSFYLISIFLHLVKIPTHRHVIGKPCPKPHRLNHMGICSCGLYKHPGVPVKWKR

SEQ ID NO: 93 - protein, 490 aa, Artificial Sequence
  derived and/or modified protein sequence (wt) from LASV(Lassa virus/H.sapiens-wt/NGA/2016/ISTH_1311;Clade II)__AVO03575__GPC
MGQIVTFFQEVPHVIEEVMNIVLIALSLLAILKGIYNVATCGLFGLISFLLLCGRSCSTTYKGVYELQTLELDMANLNMTMPLSCTKNNSHHYIMVGNETGLELTLTNTSIINHKFCNLSDAHKKNLYDHALMSIISTFHLSIPNFNQYEAMSCDFNGGKISVQYNLSHAYAGDAASHCGTIANGVLQTFMRMAWGGSYIALDSGKGNWDCIMTSYQYLIIQNTTWEDHCQFSRPSPIGYLGLLSQRTRDIYISRRLLGTFTWTLSDSEGNDAPGGYCLTRWMLIEAELKCFGNTAIAKCNEKHDEEFCDMLRLFDFNKQAIKRLKTEAQMSIQLINKAVNALINDQLIMKNHLRDIMGIPYCNYSKYWYLNHTTTGKTSLPKCWLISNGSYLNETHFSDDIEQQADNMITELLQKEYLDRQGKTPLGLVDLFVFSTSFYLISIFLHLIKIPTHRHIVGRPCPKPHRLNHMGICSCGLYKHPGVPVKWKR

SEQ ID NO: 94 - protein, 490 aa, Artificial Sequence
  derived and/or modified protein sequence (wt) from LASV(Lassa virus/H.sapiens-wt/NGA/2016/ISTH_1423;Clade II)__AVO03577__GPC
MGQIVTFFQEVPHVIEEVMNIVLIALSLLAILKGIYNVATCGLFGLVSFLLLCGRSCSTTYKGVYELQTLELDMANLNMTMPLSCTKNNSHHYIMVGNETGLELTLTNTSIINHKFCNLSDAHKKNLYDHALMSIISTFHLSIPNFNQYEAMSCDFNGGKISVQYNLSHSYAVDAANHCGTVANGVLQTFMRMAWGGSYIALDSGKGSWDCIMTSYQYLIIQNITWEDHCQFSRPSPIGYLGLLSQRTRDIYISRRLLGTFTWTLSDSEGKETPGGYCLTRWMLIEAELKCFGNTAVAKCNEKHDEEFCDMLRLFDFNKQAIRRLKTEAQMSIQLINKAVNALINDQLIMKNHLRDIMGIPYCNYSKYWYLNHTVTGKTSLPRCWLVSNGSYLNETHFSDDIEQQADNMITELLQKEYIDRQGKTPLGLVDLFVFSTSFYLISIFLHLVKIPTHRHILGKPCPKPHRLNHMGICSCGLYKHPGVPVKWKR

SEQ ID NO: 95 - protein, 490 aa, Artificial Sequence
  derived and/or modified protein sequence (wt) from LASV(Lassa virus/H.sapiens-wt/NGA/2016/ISTH_1462;Clade II)__AVO03587__GPC
MGQIITFFQEVPHVIEEVMNIVLIALSLLAILKGIYNVATCGLFGLVSFLLLCGRSCSTTYKGVYELQTLELDMASLNMTMPLSCTKNNSHHYIMVGNETGLELTLTNTSIINHKFCNLSDAHKKNLYDHALMSIISTFHLSIPNFNQYEAMSCDFNGGKISVQYNLSHTYAVDAANHCGTIANGVLQTFMRMAWGGSYIALDSGKGSWDCIMTSYQYLIIQNTTWEDHCQFSRPSPIGYLGLLSQRTRDIYISRRLLGTFTWTLSDSEGNETPGGYCLTRWMLIEAELKCFGNTAVAKCNEKHDEEFCDMLRLFDFNKQAIRRLKTEAQMSIQLINKAVNALINDQLIMKNHLRDIMGIPYCNYSKYWYLNHTVTGRTSLPRCWLVSNGSYLNETHFSDDIEQQADNMITELLQKEYIERQGKTPLGLVDLFVFSTSFYLISIFLHLIKIPTHRHVIGKPCPKPHRLNHMGICSCGLYKHPGVPVKWKR

SEQ ID NO: 96 - protein, 490 aa, Artificial Sequence
  derived and/or modified protein sequence (wt) from LASV(Lassa virus/H.sapiens-wt/NGA/2016/ISTH_1472;Clade II)__AVO03605__GPC
MGQIITFFQEVPHVIEEVMNIVLIALSLLAILKGIYNVATCGLFGLVSFLLLCGRSCSTTYKGVYELQTLELDMASLNMTMPLSCTKNNSHHYIMVGNETGLELTLTNTSIINHKFCNLSDAHKKNLYDHALMSIISTFHLSIPNFNQYEAMSCDFNGGKISVQYNLSHTYAVDAANHCGTIANGVLQTFMRMAWGGSYIALDSGKGSWDCIMTSYQYLIIQNTTWEDHCQFSRPSPIGYLGLLSQRTRDIYISRRLLGTFTWTLSDSEGNETPGGYCLTRWMLIEAELKCFGNTAVAKCNEKHDEEFCDMLRLFDFNKQAIRRLKTEAQMSIQLINKAVNALINDQLIMKNHLRDIMGIPYCNYSKYWYLNHTVTGRTSLPRCWLVSNGSYLNETHFSDDIEQQADNMITELLQKEYIDRQGKTPLGLVDLFVFSTSFYLISIFLHLIKIPTHRHVIGKPCPKPHRLNHMGICSCGLYKHPGVPVKWKR

SEQ ID NO: 97 - protein, 490 aa, Artificial Sequence
  derived and/or modified protein sequence (wt) from LASV(Lassa virus/H.sapiens-wt/NGA/2016/ISTH_1474;Clade II)__AVO03613__GPC
MGQIITFFQEVPHVIEEVMNIVLIALSLLAILKGIYNVATCGLFGLVSFLLLCGRSCSTTYKGVYELQTLELDMASLNMTMPLSCTKNNSHHYIMVGNETGLELTLTNTSIIHHKFCNLSDAHKKNLYDHALMSIISTFHLSIPNFNQYEAMSCDFNGGKISVQYNLSHTYAVDAANHCGTIANGVLQTFMRMAWGGSYIALDSGKGSWDCIMTSYQYLIIQNTTWEDHCQFSRPSPIGYLGLLSQRTRDIYISRRLLGTFTWTLSDSEGNETPGGYCLTRWMLIEAELKCFGNTAVAKCNEKHDEEFCDMLRLFDFNKQAIRRLKTEAQMSIQLINKAVNALINDQLIMKNHLRDIMGIPYCNYSKYWYLNHTVTGRTSLPRCWLVSNGSYLNETHFSDDIEQQADNMITELLQKEYIDRQGKTPLGLVDLFVFSTSFYLISIFLHLIKIPTHRHVIGKPCPKPHRLNHMGICSCGLYKHPGVPVKWKR

SEQ ID NO: 98 - protein, 491 aa, Artificial Sequence
  derived and/or modified protein sequence (wt) from LASV(Lassa virus/H.sapiens-wt/NGA/2016/ISTH_1496;Clade II)__AVO03579__GPC
MGQIITFFQEVPHVIEEVMNIVLIALSLLAILKGVYNVATCGLFGLVSFLLLCGRSCSTTIYKGVYELQTLELDMASLNMTMPLSCTKNNSHHYIMVGNETGLELTLTNTSIINHKFCNLSDAHKKNLYDHALMSIISTFHLSIPNFNQYEAMSCDFNGGKISVQYNLSHAYAVDAANHCGTIANGVLQTFMRMAWGGSYIALDSGKRSWDCIMTSYQYLIIQNTTWEDHCQFSRPSPIGYLGLLSQRTRDIYISRRLLGTFTWTLSDSEGNETPGGYCLTRWMLIEAELKCFGNTAVAKCNEKHDEEFCDMLRLFDFNKQAIRRLKTEAQMSIQLINKAVNALINDQLIMKNHLRDIMGIPYCNYSKYWYLNHTVTGKTSLPRCWLVSNGSYLNETHFSDDIEQQADNMITELLQKEYIDRQGKTPLGLVDLFVFSTSFYLISIFLHLVKIPTHRHVIGKPCPKPHRLNHMGICSCGLYKHPGVPVKWKR

SEQ ID NO: 99 - protein, 490 aa, Artificial Sequence
  derived and/or modified protein sequence (wt) from LASV(Lassa virus/H.sapiens-wt/NGA/2016/ISTH_1541;Clade II)__AVO03553__GPC
MGQIVTFFQEVPHVIEEIMNIVLITLSLLAVLKGIYNFATCGLIGLITFLFLCGRSCSTIYKGNYQLQTLELNMETLNMTMPLSCTKNNSHHYIRVGNETGLELTLTNVSIINHRFCNLSDAHKRNLYDHTLMSIISTFHLSIPNFNQYEAMSCDFNGGKISVQYNLSHGYAVDAAKHCGTVANGVLQTFMRMAWGGSYIALDSGKGNWDCIMTSYQYLIIQNTTWEDHCQFSRPSPIGYLGLLSQRTRDIYISRRLLGTFTWTLSDSEGRETPGGYCLTRWMLIEAELKCFGNTAVAKCNEKHDEEFCDMLRLFDFNKQAIQRLKTEAQMSIQLINKAVNALINDQLIMKNHLRDIMGIPYCNYSKYWYLNHTTTGKTSLPKCWLVTNGSYLNETHFSDDIEQQADNMITEMLQKEYIDRQGKTPLGLVDLFVFSTSFYLISIFLHLIKIPNHRHIVGKPCPKPHRLNHMGICSCGFYKQPGVPVRWKR

SEQ ID NO: 100 - protein, 490 aa, Artificial Sequence
  derived and/or modified protein sequence (wt) from LASV(Lassa virus/H.sapiens-wt/NGA/2016/ISTH_1546;Clade II)__AVO03537__GPC
MGQIVTFFQEIPHVVEEIMNIVLITLSLLAILKGLYNFATCGLIGLITFLFLCGRSCSTIYKGSYQLQALELNMETLNMTMPLSCTKNNSHHYIRVGNETGLELTLTNTSIINHKFCNLSDAHKKNLYDHTLMSIISTFHLSIPNFNQYEAMSCDFNGGKISVQYNLSHSYAGDAARHCGTVANGVLQTFMRMAWGGSYIALDSGKGNWDCIMTSYQYLIIQNTTWEDHCQFSRPSPIGYLGLLSQRTRDIYISRRLLGTFTWTLSDSEGKETPGGYCLTRWMLIEAELKCFGNTAVAKCNEKHDEEFCDMLRLFDFNKQAIQRLKTEAQMSIQLINKAVNALINDQLIMKNHLRDIMGIPYCNYSKYWYLNHTTTGKTSLPRCWLVSNGSYLNETHFSDDIEQQADNMITEMLQKEYIDRQGKTPLGLVDLFVFSTSFYLISIFLHLIKIPTHRHIVGKSCPKPHRLNHMGICSCGLYKQPGVPVKWKR

SEQ ID NO: 101 - protein, 490 aa, Artificial Sequence
  derived and/or modified protein sequence (wt) from LASV(Lassa virus/H.sapiens-wt/NGA/2016/ISTH_1591;Clade II)__AVO03647__GPC
MGQIITFFQEVPHVIEEVMNIVLIALSLLAILKGIYNVATCGLFGLVSFLLLCGRSCSTTYKGVYELQTLELDMASLNMTMPLSCTKNNSHHYIMVGNETGLELTLTNTSIIQHKFCNLSDAHKKNLYDHALMSIVSTFHLSIPNFNQYEAMSCDFNGGKITVQYNLSHSYAIDAANHCGTVANGVLQTFMRMAWGGSYIALDSGRGSWDCIMTSYQYLIIQNTTWEDHCQFSRPSPIGYLGLLSQRTRDIYISRRLLGTFTWTLSDSEGNETPGGYCLTRWMLIEAELKCFGNTAVAKCNEKHDEEFCDMLRLFDFNKQAIRRLKAEAQMSIQLINKAVNALINDQLIMKNHLRDIMGIPYCNYSKYWYLNHTVTGRTSLPRCWLVSNGSYLNETHFSDDIEQQADNMITELLQKEYMDRQGKTPLGLVDLFVFSTSFYLISIFLHLVKIPTHRHIIGKPCPKPHRLNHMGVCSCGLYKHPGVPVKWKR

SEQ ID NO: 102 - protein, 490 aa, Artificial Sequence
  derived and/or modified protein sequence (wt) from LASV(Lassa virus/H.sapiens-wt/NGA/2016/ISTH_1604;Clade II)__AVO03541__GPC
MGQIVTFFQEVPHVIEEIMNIVLITLSLLAILKGVYNLATCGLIGLITFLFLCGRSCSMTYKGSYQLETLELNMETLNMTMPLSCTKNTSHHYIRVGNETGLELTLTNTSIINHKFCNLSDAHKKNLYDHSLMSIVSTFHLSIPNFNQYEAMSCDFNGGKISIQYNLSHAYAGDAAKHCGTLANGVLQTFMRMAWGGSYIALDSGRGNWDCIMTSYQYLIIQNTTWEDHCQFSRPSPIGYLGLLSQRTREIYISRRLLGTFTWTLSDSEGNEAPGGYCLTRWMLIEAELKCFGNAAVAKCNEKHDEEFCDMLRLFDFNKQAIQRLKTEAQMSIQLINKAVNALINDQLIMKNHLRDIMGIPYCNYSKYWYLNHTTTGRTSLPRCWLVSNGSYLNETHFSDDIEQQADNMITEMLQKEYIDRQGKTPLGLVDLFVFSTSFYLISIFLHLVKIPTHRHIVGKSCPKPHRLNHMGICSCGLYKQPGVPVRWKR

SEQ ID NO: 103 - protein, 490 aa, Artificial Sequence
  derived and/or modified protein sequence (wt) from LASV(Lassa virus/H.sapiens-wt/NGA/2016/ISTH_1609;Clade II)__AVO03661__GPC
MGQIVTFFQEIPHVIEEVMNIVLITLSLLAVLKGIYNFATCGLIGLITFLFLCGRSCSTIYKGSYQLQKLELNMETLNMTMPLSCTKNSSHHYIRVGNETGLELTLTNTSIISHKFCNLSDAHKKNLYDHALMSIISTFHLSIPNFNQYEAMSCDFNGGKISVQYNLSHSYAGDAARHCGTLANGVLQTFMRMAWGGSYIALDSGKGNWDCIMTSYQFLIIQNTTWEDHCQFSRPSPMGYLGLLSQRTRDIYISRRLLGTFTWTLSDSEGKETPGGYCLTRWMLIEAELKCFGNTAVAKCNEKHDEEFCDMLRLFDFNKQAIQRLKTEAQMSIQLINKAVNALINDQLIMKNHLRDIMGIPYCNYSQYWYLNHTITGKTSLPKCWLVSNGSYLNETHFSDDIEQQADNMITEMLQKEYIDRQGKTPLGLVDLFVFSTSFYLISIFLHLIKIPTHRHIVGKSCPKPHRLNRMGICSCGLYKQPGVPVKWKR

SEQ ID NO: 104 - protein, 490 aa, Artificial Sequence
  derived and/or modified protein sequence (wt) from LASV(Lassa virus/H.sapiens-wt/NGA/2016/ISTH_1610;Clade II)__AVO03603__GPC
MGQIITFFQEVPHVIEEVMNIVLIALSLLAILKGIYNVATCGLFGLVSFLFLCGRSCSTTYKGVYELQTLELDMASLNMTMPLSCTKNNSHHYIMVGNETGLELTLTNTSIINHKFCNLSDAHKKNLYDHALMSIISTFHLSIPNFNQYEAMSCDFNGGKISVQYNLSHTYAIDAANHCGTIANGVLQTFMRMAWGGSYIALDSGRGSWDCIMTSYQYLIIQNTTWEDHCQFSRPSPIGYLGLLSQRTRDIYISRRLLGTFTWTLSDSEGNETPGGYCLTRWMLIEAELKCFGNTAVAKCNEKHDEEFCDMLRLFDFNKQAIRRLKAEAQMNIQLINKAVNALINDQLIMKNHLRDIMGIPYCNYSKYWYLNHTVTGRTSLPRCWLVSNGSYLNETHFSDDIEQQADNMITELLQKEYMDRQGKTPLGLVDLFVFSTSFYLISIFLHLIKIPTHRHIVGKPCPKPHRLNHMGICSCGLYKHPGVPVKWKR

SEQ ID NO: 105 - protein, 490 aa, Artificial Sequence
  derived and/or modified protein sequence (wt) from LASV(Lassa virus/H.sapiens-wt/NGA/2018/ISTH_0959;Clade II)__AVV65099__GPC
MGQIITFFQEVPHVIEEVMNIVLIALSLLAILKGIYNVVTCGLFGLVSFLLLCGRSCSTTYKGVYELQTLELDMASLNMTMPLSCTKNNSHHYIMVGNETGLELTLTNTSIINHKFCNLSDAHKKNLYDHALMSIISTFHLSIPNFNQYEAMSCDFNGGKISVQYNLSHAYAIDAANHCGTIANGVLQTFMRMAWGGSYIALDSGKGSWDCIMTSYQYLIIQNTTWEDHCQFSRPSPIGYLGLLSQRTRDIYISRRLLGTFTWTLSDSEGNETPGGYCLTRWMLIEAELKCFGNTAVAKCNEKHDEEFCDMLRLFDFNKQAIRRLKTEAQMSIQLINKAVNALINDQLIMKNHLRDIMGIPYCNYSKYWYLNHTVTGKTSLPRCWLVSNGSYLNETHFSDDIEQQADNMITELLQKEYIDRQGKTPLGLVDLFVFSTSFYLISIFLHLVKIPTHRHVIGKPCPKPHRLNHMGICSCGLYKHPGVPVKWKR

SEQ ID NO: 106 - protein, 490 aa, Artificial Sequence
  derived and/or modified protein sequence (wt) from LASV(Lassa virus/H.sapiens-wt/NGA/2018/ISTH_1024;Clade II)__AVV65105__GPC
MGQIITFFQEVPHVIEEVMNIVLIALSLLAILKGVYNVATCGLFGLVSFLLLCGRSCSTTYKGVYELQTLELDMANLNMTMPLSCTKNNSHHYIRVGNETGLELTLTNTSIINHKFCNLSDAHKNNLYDHALMSIISTFHLSIPNFNQYEAMSCDFNGGKISVQYNLSHAYAVDAANHCGTIANGVLQTFMRMAWGGSYIALDSGRGSWDCIMTSYQYLIIQNTTWEDHCQFSRPSPIGYLGLLSQRTRDIYISRRLLGTFTWTLSDSEGNETPGGYCLTRWMLIEAELKCFGNTAVAKCNEKHDEEFCDMLRLFDFNKQAIRRLKTEAQMSIQLINKAVNALINDQLIMKNHLRDIMGIPYCNYSKYWYLNHTVTGKTSLPRCWLVSNGTYLNETHFSDDIEQQADNMITELLQKEYMDRQGKTPLGLVDLFVFSTSFYLISIFLHLVKIPTHRHVIGKPCPKPHRLNHMGICSCGLYKHPGVPVKWKR

SEQ ID NO: 107 - protein, 490 aa, Artificial Sequence
  derived and/or modified protein sequence (wt) from LASV(Lassa virus/H.sapiens-wt/NGA/2018/ISTH_1079;Clade II)__AVV65107__GPC
MGQIITFFQEVPHVIEEVMNIVLIALSLLAILKGIYNVATCGLFGLVAFLLLCGRSCSTTYKGVYELQTLELDMASLNMTMPLSCTKNNSHHYIMVGNETGLELTLTNTSIINHKFCNLSDAHKKNLYDHALMSIISTFHLSIPNFNQYEAMSCDFNGGKISVQYNLSHTYAVDAANHCGTIANGVLQTFMRMAWGGSYIALDSGKGSWDCIMTSYQYLIIQNTTWEDHCQFSRPSPIGYLGLLSQRTRDIYISRRLLGTFTWTLSDSEGNETPGGYCLTRWMLIEAELKCFGNTAVAKCNEKHDEEFCDMLRLFDFNKQAIRRLKTEAQMSIQLINKAVNALINDQLIMKNHLRDIMGIPYCNYSKYWYLNHTVTGRTSLPRCWLVSNGSYLNETHFSDDIEQQADNMITELLQKEYMDRQGKTPLGLVDLFVFSTSFYLISIFLHLIKIPTHRHVIGKPCPKPHRLNHMGICSCGLYKHPGVPVKWKR

SEQ ID NO: 108 - protein, 490 aa, Artificial Sequence
  derived and/or modified protein sequence (wt) from LASV(Lassa virus/H.sapiens-wt/NGA/2018/ISTH_1177;Clade II)__AVV65101__GPC
MGQIITFFQEVPHVIEEVMNIVLIALSLLAILKGIYNVATCGLFGLVSFLLLCGRSCSTTYKGVYELQTLELDMASLNMTMPLSCTKNNSHHYIRVGNETGLELTLTNTSIIDHKFCNLSDAHKKNLYDHALMSIISTFHLSIPNFNQYEAMSCDFNGGKISVQYNLSHTYAVDAANHCGTIANGVLQTFMRMAWGGSYIALDSGKGSWDCIMTSYQYLIIQNTTWEDHCQFSRPSPIGYLGLLSQRTRDIYISRRLLGTFTWTLSDSEGNETPGGYCLTRWMLIEAELKCFGNTAVAKCNEKHDEEFCDMLRLFDFNKQAIRRLKTEAQMSIQLINKAVNALINDQLIMKNHLRDIMGIPYCNYSKYWYLNHTITGRTSLPRCWLVSNGSYLNETHFSDDIEQQADNMITELLQKEYMDRQGKTPLGLVDLFVFSTSFYLISIFLHLVKIPTHRHVIGKPCPKPHRLNHMGICSCGLYKHPGVPVKWKR

SEQ ID NO: 109 - protein, 490 aa, Artificial Sequence
  derived and/or modified protein sequence (wt) from LASV(Lassa virus/H.sapiens-wt/NGA/2018/ISTH_1375;Clade II)__AVV65115__GPC
MGQIITFFQEVPHVIEEVMNIVLIALSLLAILKGIYNIATCGLFGLVSFLLLCGRSCSTTYKGVYELQTLELDMASLNMTMPLSCTKNNSHHYIMVGNETGLELTLTNTSIINHRFCNLSDAHKKNLYDHALMSIISTFHLSIPNFNQYEAMSCDFNGGKISVQYNLSHAYAVDAANHCGTIANGVLQTFMRMAWGGSYIALDSGKGSWDCIMTSYQYLIIQNTTWEDHCQFSRPSPIGYLGLLSQRTRDIYISRRLLGTFTWTLSDSEGNETPGGYCLTRWMLIEAELKCFGNTAVAKCNEKHDEEFCDMLRLFDFNKQAIRRLKTEAQMSIQLINKAVNALINDQLIMKNHLRDIMGIPYCNYSKYWYLNHTVTGKTSLPRCWLVSNGSYLNETHFSDDIEQQADNMITELLQKEYIDRQGKTPLGLVDLFVFSTSFYLISIFLHLVKIPTHRHVIGKPCPKPHRLNHMGICSCGLYKHPGVPVKWKR

SEQ ID NO: 110 - protein, 490 aa, Artificial Sequence
  derived and/or modified protein sequence (wt) from LASV(Lassa virus/H.sapiens-wt/NGA/2018/ISTH_1381;Clade II)__AVV65111__GPC
MGQIVTFFQEVPHVIEEVMNIVLIALSLLAILKGIYNVATCGLFGLVSFLLLCGRSCSTTYKGVYELQTLELDMASLNMTMPLSCTKNNSHHYIMVGNETGLELTLTNTSIINHKFCNLSDAHKKNLYDHALMSIISTFHLSIPNFNQYEAMSCDFNGGKISVQYNLSHTYAVDAANHCGTIANGVLQTFMRMAWGGSYIALDSGKGSWDCIMTSYQYLIIQNTTWEDHCQFSRPSPIGYLGLLSQRTRDIYISRRLLGTFTWTLSDSEGNETPGGYCLTRWMLIEAELKCFGNTAVAKCNEKHDEEFCDMLRLFDFNKQAIRRLKTEAQMSIQLINKAVNALINDQLIMKNHLRDIMGIPYCNYSKYWYLNHTVTGKTSLPRCWLVSNGSYLNETHFSDDIEQQADNMITELLQKEYMDRQGKTPLGLVDLFVFSTSFYLISIFLHLVKIPTHRHVVGKPCPKPHRLNHMGICSCGLYKHPGVPVRWKR

SEQ ID NO: 111 - protein, 490 aa, Artificial Sequence
  derived and/or modified protein sequence (wt) from LASV(Lassa virus/H.sapiens-wt/NGA/2018/ISTH_1643;Clade II)__AVV65119__GPC
MGQIITFFQEVPHVIEEVMNIVLIALSLLAILKGIYNVATCGLFGLVSFLLLCGRSCSTTYKGVYELQTLELDMASLNMTMPLSCTKNNSHHYIMVGNETGLELTLTNTSIINHKFCNLSDAHKKNLYDHALMSIISTFHLSIPNFNQYEAMSCDFNGGKISVQYNLSHTYAVDAANHCGTIANGVLQTFMRMAWGGSYIALDSGKGSWDCIMTSYQYLIIQNTSWEDHCQFSRPSPIGYLGLLSQRTRDIYISRRLLGTFTWTLSDSEGNETPGGYCLTRWMLIEAELKCFGNTAVAKCNEKHDEEFCDMLRLFDFNKQAIRRLKTEAQMSIQLINKAVNALINDQLIMKNHLRDIMGIPYCNYSKYWYLNHTVTGKTSLPRCWLVSNGTYLNETHFSDDIEQQADNMITELLQKEYIDRQGKTPLGLVDLFVFSTSFYLISIFLHLVKIPTHRHVIGKPCPKPHRLNHMGICSCGLYKHPGVPVKWKR

SEQ ID NO: 112 - protein, 490 aa, Artificial Sequence
  derived and/or modified protein sequence (wt) from LASV(LASV003-NIG-2008;Clade II)__AIT17580__GPC
MGQIITFFQEVPHVIEEVMNIVLIALSLLAILKGIYNVATCGLFGLVSFLLLCGRSCSTTYKGVYELQTLELDMASLNMTMPLSCTKNNSHHYIMVGNETGLELTLTNTSIINHKFCNLSDAHKKNLYDHALMSIISTFHLSIPNFNQYEAMSCDFNGGKISVQYNLSHTYAVDAANHCGTIANGVLQTFMRMAWGGSYIALDSGKGSWDCIMTSYQYLIIQNTTWEDHCQFSRPSPIGYLGLLSQRTRDIYISRRLLGTFTWTLSDSESNETPGGYCLTRWMLIEAELKCFGNTAVAKCNEKHDEEFCDMLRLFDFNKQAIRRLKAEAQMSIQLINKAVNALINDQLIMKNHLRDIMGIPYCNYSKYWYLNHTVTGRTSLPRCWLVSNGSYLNETHFSDDIEQQADNMITELLQKEYMDRQGKTPLGLVDLFVFSTSFYLISIFLHLVKIPTHRHVIGKPCPKPHRLNHMGICSCGLYKHPGVPVKWKR

SEQ ID NO: 113 - protein, 490 aa, Artificial Sequence
  derived and/or modified protein sequence (wt) from LASV(LASV006-NIG-2008;Clade II)__AIT17584__GPC
MGQIITFFQEVPQVIEEVMNIVLIALSLLAILKGIYNVATCGLFGLVSFLLLCGRSCSTTYKGVYELQTLELDMASLNMTMPLSCTKNNSHHYIMVGNETGLELTLTNQSIINHKFCNLSDAHKKNLYDHALMSIISTFHLSIPNFNQYEAMSCDFNGGKISVQYNLSHSFAVDAANHCGTIANGVLQTFMRMAWGGSYIALDSGKGSWDCIMTSYQYLIIQNTTWEDHCQFSRPSPIGYLGLLSQRTRDIYISRRLLGTFTWTLSDSEGNETPGGYCLTRWMLIEAELKCFGNTAVAKCNEKHDEEFCDMLRLFDFNKQAIRRLKTEAQMSIQLINKAVNALINDQLIMKNHLRDIMGIPYCNYSKYWYLNHTKTGKTSLPRCWLVSNGSYLNETHFSDDIEQQADNMITELLQKEYMDRQGKTPLGLVDLFVFSTSFYLISIFLHLVKIPTHRHVIGKPCPKPHRLNHMGICSCGLYKHPGVPVKWKR

SEQ ID NO: 114 - protein, 490 aa, Artificial Sequence
  derived and/or modified protein sequence (wt) from LASV(LASV035-NIG-2009;Clade II)__AIT17588__GPC
MGQIITFFQEVPHVIEEVMNIVLIALSLLAILKGIYNVATCGLFGLVSFLLLCGRSCSTTYKGVYELQTLELDMASLNMTMPLSCTKNNSHHYIMVGNETGLELTLTNTSIINHKFCNLSDAHKKNLYDHALMSIISTFHLSIPNFNQYEAMSCDFNGGKISVQYNLSHAYAVDAANHCGTIANGVLQTFMRMAWGGSYIALDSGKGSWDCIMTSYQYLIIQNTTWEDHCQFSRPSPIGYLGLLSQRTRDIYISRRLLGTFTWTLSDSEGNETPGGYCLTRWMLIEAELKCFGNTAVAKCNEKHDEEFCDMLRLFDFNKQAIRRLKAEAQMSIQLINKAVNALINDQLIMKNHLRDIMGIPYCNYSKYWYLNHTVTGKTSLPRCWLVSNGSYLNETHFSDDIEQQADNMITELLQKEYIDRQGKTPLGLVDLFVFSTSFYLISIFLHLVKIPTHRHVIGKPCPKPHRLNHMGICSCGLYKHPGVPVKWKR

SEQ ID NO: 115 - protein, 490 aa, Artificial Sequence
  derived and/or modified protein sequence (wt) from LASV(LASV042-NIG-2009;Clade II)__AIT17592__GPC
MGQIITFFQEVPHVIEEVMNIVLIALSLLAILKGIYNVATCGLFGLVSFLLLCGRSCSTTYKGVYELQTLELDMASLNMTMPLSCTKNNSHHYIMVGNETGLELTLTNTSIINHKFCNLSDAHKKNLYDHTLMSIISTFHLSIPNFNQYEAMSCDFNGGRISVQYNLSHAYAVDAANHCGTIANGVLQTFMRMAWGGSYIALDSGKGSWDCIMTSYQYLIIQNTTWEDHCQFSRPSPIGYLGLLSQRTRDIYISRRLLGTFTWTLSDSEGNETPGGYCLTRWMLIEAELKCFGNTAVAKCNEKHDEEFCDMLRLFDFNKQAIRRLKTEAQMSIQLINKAVNALINDQLIMKNHLRDIMGIPYCNYSKYWYLNHTITGKTSLPRCWLVSNGSYLNETHFSDDIEQQADNMITELLQKEYIDRQGKTPLGLVDLFVFSTSFYLISIFLHLVKIPTHRHVVGKPCPKPHRLNHMGICSCGLYKHPGVPVKWKR

SEQ ID NO: 116 - protein, 490 aa, Artificial Sequence
  derived and/or modified protein sequence (wt) from LASV(LASV045-NIG-2009;Clade II)__AIT17596__GPC
MGQIITFFQEVPHVIEEVMNIVLIALSLLAILKGIYNVATCGLFGLVSFLLLCGRSCSTTYKGVYELQTLELDMASLNMTMPLSCTKNNSHHYIMVGNETGLELTLTNTSIINHKFCNLSDAHKKNLYDHALMSIISTFHLSIPNFNQYEAMSCDFNGGKISVQYNLSHTYAVDAANHCGTIANGVLQTFMRMAWGGSYIALDSGKGSWDCIMTSYQYLIIQNTSWEDHCQFSRPSPIGYLGLLSQRTRDIYISRRLLGTFTWTLSDSEGNETPGGYCLTRWMLIEAELKCFGNTAVAKCNEKHDEEFCDMLRLFDFNKQAIRRLKTEAQMSIQLINKAVNALINDQLIMKNHLRDIMGIPYCNYSKYWYLNHTVTGKTSLPRCWLVSNGSYLNETHFSDDIEQQADNMITELLQKEYIDRQGKTPLGLVDLFVFSTSFYLISIFLHLVKIPTHRHVIGKPCPKPHRLNHMGICSCGLYKHPGVPVKWKR

SEQ ID NO: 117 - protein, 490 aa, Artificial Sequence
  derived and/or modified protein sequence (wt) from LASV(LASV046-NIG-2009;Clade II)__AIT17600__GPC
MGQIITFFQEVPHVIEEVMNIVLIALSLLAILKGIYNVATCGLFGLVSFLLLCGRSCSTTYKGVYELQTLELDMASLNMTMPLSCTKNNSHHYIMVGNETGLELTLTNTSIINHKFCNLSDAHKKNLYDHALMSIISTFHLSIPNFNQYEAMSCDFNGGKISVQYNLSHAYAGDAANHCGTIANGVLQTFMRMAWGGSYIALDSGKGSWDCIMTSYQYLIIQNTTWEDHCQFSRPSPIGYLGLLSQRTRDIYISRRLLGTFTWTLSDSEGNETPGGYCLTRWMLIEAELKCFGNTAVAKCNEKHDEEFCDMLRLFDFNKQAIRRLKTEAQMSIQLINKAVNALINDQLIMKNHLRDIMGIPYCNYSKYWYLNHTVTGKTSLPRCWLVSNGSYLNETHFSDDIEQQADNMITELLQKEYIDRQGKTPLGLVDLFVFSTSFYLISIFLHLVKIPTHRHVIGKPCPKPHRLNHMGICSCGLYKHPGVPVKWKR

SEQ ID NO: 118 - protein, 490 aa, Artificial Sequence
  derived and/or modified protein sequence (wt) from LASV(LASV049-NIG-2009;Clade II)__AIT17604__GPC
MGQIITFFQEVPHVIEEVMNIVLIALSLLAILKGIYNVATCGLFGLVSFLLLCGRSCSTTYKGVYELQTLELDMTSLNMTMPLSCTKNNSHHYIMVGNETGLELTLTNTSIINHKFCNLSDAHKKDLYDHALMSIISTFHLSIPNFNQYEAMSCDFNGGKISVQYNLSHTYAVDAAKHCGTIANGVLQTFMRMAWGGSYIALDSGKGSWDCIMTSYQYLIIQNTTWEDHCQFSRPSPVGYLGLLSQRTRDIYISRRLLGTFTWTLSDSEGNETPGGYCLTRWMLIEAELKCFGNTAVAKCNEKHDEEFCDMLRLFDFNKQAIRRLKTEAQMSIQLINKAVNALINDQLIMKNHLRDIMGIPYCNYSKYWYLNHTVTGKTSLPRCWLVSNGSYLNETHFSDDIEQQADNMITELLQKEYLDRQGKTPLGLVDLFVFSTSFYLISIFLHLVKIPTHRHVIGKPCPKPHRLNHMGICSCGLYKHPGVPVKWKR

SEQ ID NO: 119 - protein, 490 aa, Artificial Sequence
  derived and/or modified protein sequence (wt) from LASV(LASV052-NIG-2008;Clade II)__AIT17608__GPC
MGQIITFFQEVPHVIEEVMNIVLIALSLLAILKGIYNVATCGLFGLVSFLLLCGRSCSTTYKGVYELQTLELDMASLNMTMPLSCTKNNSHHYIMVGNETGLELTLTNTSIINHKFCNLSDAHKRNLYNHALMSIISTFHLSIPNFNQYEAMSCDFNGGKISVQYNLSHTYAVDAANHCGTIANGVLQTFMRMAWGGSYIALDSGKGSWDCIMTSYQYLIIQNTTWEDHCQFSRPSPIGYLGLLSQRTRDIYISRRLLGTFTWTLSDSEGNETPGGYCLTRWMLIEAELKCFGNTAVAKCNEKHDEEFCDMLRLFDFNKQAIRRLKTEAQMSIQLINKAVNALINDQLIMKNHLRDIMGIPYCNYSKYWYLNHTVTGKTSLPRCWLVSNGSYLNETHFSDDIEQQADNMITELLQKEYIDRQGKTPLGLVDLFVFSTSFYLISIFLHLVKIPTHRHIIGKPCPKPHRLNHMGICSCGLYKHPGVPVKWRR

SEQ ID NO: 120 - protein, 490 aa, Artificial Sequence
  derived and/or modified protein sequence (wt) from LASV(LASV056-NIG-2008;Clade II)__AIT17612__GPC
MGQIITFFQEVPHVIEEVMNIVLIALSLLAILKGIYNVATCGLFGLVSFLLLCGRSCSTTYKGVYELQTLELDMASLNMTMPLSCTKNNSHHYIRVGNETGLELTLTNTSIINHKFCNLSDAHKKNLYDHSLMSIISTFHLSIPNFNQYEAMSCDFNGGKISVQYNLSHTYAVDAANHCGTIANGVLQTFMRMAWGGSYIALDSGKGNWDCIMTSYQYLIIQNTTWEDHCQFSRPSPIGYLGLLSQRTRDIYISRRLLGTFTWTLSDSEGNETPGGYCLTRWMLIEAELKCFGNTAVAKCNEKHDEEFCDMLRLFDFNKQAIRRLKTEAQMSIQLINKAVNALINDQLIMKNHLRDIMGIPYCNYSKYWYLNHTVTGKTSLPRCWLVSNGSYLNETHFSDDIEQQADNMITELLQKEYIDRQGKTPLGLVDLFVFSTSFYLISIFLHLVKIPTHRHVVGKPCPKPHRLNHMGICSCGLYKHPGVPVKWKR

SEQ ID NO: 121 - protein, 490 aa, Artificial Sequence
  derived and/or modified protein sequence (wt) from LASV(LASV058-NIG-2008;Clade II)__AIT17616__GPC
MGQIITFFQEVPHVIEEVMNIVLIALSLLAILKGIYNVATCGLFGLVSFLLLCGRSCSTTYKGVYELQTLELDMASLNMTMPLSCTKNNSHHYIMVGNETGLELTLTNTSIINHKFCNLSDAHKKNLYDHALMSIISTFHLSIPNFNQYEAMSCDFNGGKISVQYNLSHAYAVDAANHCGTIANGVLQTFMRMAWGGSYIALDSGKGSWDCIMTSYQYLIIQNTTWEDHCQFSRPSPIGYLGLLSQRTRDIYISRRLLGTFTWTLSDSEGNETPGGYCLTRWMLIEAELKCFGNTAVAKCNEKHDEEFCDMLRLFDFNKQAIRRLKTEAQMSIQLINKAVNALINDQLIMKNHLRDIMGIPYCNYSKYWYLNHTVTGKTSLPRCWLVSNGSYLNETHFSDDIEQQADNMITELLQKEYIDRQGKTPLGLVDLFVFSTSFYLISIFLHLVKIPTHRHVIGKPCPKPHRLNHMGICSCGLYKHPGVPVKWKR

SEQ ID NO: 122 - protein, 490 aa, Artificial Sequence
  derived and/or modified protein sequence (wt) from LASV(LASV063-NIG-2009;Clade II)__AIT17620__GPC
MGQIITFFQEVPHVIEEVMNIVLIALSLLAILKGIYNVATCGLFGLVSFLLLCGRSCSTTYKGVYELQTLELDMASLNMTMPLSCTKNNSHHYIMVGNETGLELTLTNTSIISHKFCNLSDAHKKNLYDHALMSIISTFHLSIPNFNQYEAMSCDFNGGKISVQYNLSHAYAIDAANHCGTVANGVLQTFMRMAWGGSYIALDSGKGSWDCIMTSYQYLIIQNTTWEDHCQFSRPSPIGYLGLLSQRTRDIYISRRLLGTFTWTLSDSEGNETPGGYCLTRWMLIEAELKCFGNTAVAKCNEKHDEEFCDMLRLFDFNKQAIRRLKAEAQMSIQLINKAVNALINDQLIMKNHLRDIMGIPYCNYSKYWYLNHTVTGKTSLPRCWLVSNGSYLNETHFSDDIEQQADNMITELLQKEYMDRQGKTPLGLVDLFVFSTSFYLISIFLHLVKIPTHRHVIGKPCPKPHRLNHMGICSCGLYKHPGVPVKWKR

SEQ ID NO: 123 - protein, 490 aa, Artificial Sequence
  derived and/or modified protein sequence (wt) from LASV(LASV1000-NIG-2009;Clade II)__AIT17782__GPC
MGQIITFFQEVPHVIEEVMNIVLIALSLLAILKGIYNVATCGLFGLVSFLLLCGRSCSTTYKGVYELQTLELDMASLNMTMPLSCTKNNSHHYIMVGNETGLELTLTNTSIINHKFCNLSDAHKKNLYDHALMSIISTFHLSIPNFNQYEAMSCDFNGGKISVQYNLSHTYAVDAANHCGTIANGVLQTFMRMAWGGSYIALDSGKGSWDCIMTSYQYLIIQNTTWEDHCQFSRPSPIGYLGLLSQRTRDIYISRRLLGTFTWTLSDSEGNETPGGYCLTRWMLIEAELKCFGNTAVAKCNEKHDEEFCDMLRLFDFNKQAIKRLKTEAQMSIQLINKAVNALINDQLIMKNHLRDIMGIPYCNYSKYWYLNHTVTGKTSLPRCWLVSNGSYLNETHFSDDIEQQADNMITELLQKEYIDRQGKTPLGLVDLFVFSTSFYLISIFLHLVKIPTHRHVVGKPCPKPHRLNHMGICSCGLYKHPGVPVKWKR

SEQ ID NO: 124 - protein, 490 aa, Artificial Sequence
  derived and/or modified protein sequence (wt) from LASV(LASV1008-NIG-2009;Clade II)__AIT17786__GPC
MGQIITFFQEVPHVIEEVMNIVLIALSLLAILKGIYNVATCGLFGLVSFLLLCGRSCSTTYKGVYELQTLELDMASLNMTMPLSCTKNNSHHYIMVGNETGLELTLTNTSIINHKFCNLSDAHKKNLYDHALMSIISTFHLSIPNFNQYEAMSCDFNGGKISVQYNLSHAYAIDAADHCGTIANGVLQTFMRMAWGGSYIALDSGKGSWDCIMTSYQYLIIQNTTWEDHCQFSRPSPIGYLGLLSQRTRDIYISRRLLGTFTWTLSDSEGNETPGGYCLTRWMLIEAELKCFGNTAVAKCNEKHDEEFCDMLRLFDFNKQAIRRLKTEAQMSIQLINKAVNALINDQLIMKNHLRDIMGIPYCNYSKYWYLNHTVTGKTSLPRCWLVSNGSYLNETHFSDDIEQQADNMITELLQKEYMDRQGKTPLGLVDLFVFSTSFYLISIFLHLVKIPTHRHITGKPCPKPHRLNHMGICSCGLYKHPGVPVKWKR

SEQ ID NO: 125 - protein, 490 aa, Artificial Sequence
  derived and/or modified protein sequence (wt) from LASV(LASV1011-NIG-2009;Clade II)__AIT17790__GPC
MGQIITFFQEVPHVIEEVMNIVLIALSLLAILKGIYNVATCGLFGLVSFLLLCGRSCSTTYKGVYELQTLELDMASLNMTMPLSCTKNNSHHYIMVGNETGLELTLTNTSIINHKFCNLSDAHKKNLYDHALMSIISTFHLSIPNFNQYEAMSCDFNGGKISVQYNLSHTYAVDAANHCGTIANGVLQTFMRMAWGGSYIALDSGKGSWDCIMTSYQYLIIQNTTWEDHCQFSRPSPIGYLGLLSQRTRDIYISRRLLGTFTWTLSDSEGNETPGGYCLTRWMLIEAELKCFGNTAVAKCNEKHDEEFCDMLRLFDFNKQAIRRLKTEAQMSIQLINKAVNALINDQLIMKNHLRDIMGIPYCNYSKYWYLNHTVTGKTSLPRCWLVSNGSYLNETHFSDDIEQQADNMITELLQKEYMDRQGKTPLGLVDLFVFSTSFYLISIFLHLVKIPTHRHITGKPCPKPHRLNHMGICSCGLYKHPGVPVKWKR

SEQ ID NO: 126 - protein, 490 aa, Artificial Sequence
  derived and/or modified protein sequence (wt) from LASV(LASV1016-NIG-2009;Clade II)__AIT17798__GPC
MGQIITFFQEVPHVIEEVMNIVLIALSLLAILKGIYNVATCGLFGLVSFLLLCGRSCSTTYKGVYELQTLELDMASLNMTMPLSCTKNNSHHYIMVGNETGLELTLTNTSIINHKFCNLSDAHKKNLYDHALMSIISTFHLSIPNFNQYEAMSCDFNGGKISVQYNLSHTYAVDAANHCGTIANGVLQTFMRMAWGGSYIALDSGKGSWDCIMTSYQYLIIQNTTWEDHCQFSRPSPIGYLGLLSQRTRDIYISRRLLGTFTWTLSDSEGNETPGGYCLTRWMLIEAELKCFGNTAVAKCNEKHDEEFCDMLRLFDFNKQAIMRLKTEAQMSIQLINKAVNALINDQLIMKNHLRDIMGIPYCNYSKYWYLNHTVTGKTSLPRCWLVSNGSYLNETHFSDDIEQQADNMITEMLQKEYLDRQGKTPLGLVDLFVFSTSFYLISIFLHLVKIPTHRHIIGKPCPKPHRLNHMGICSCGLYKHPGVPVKWKR

SEQ ID NO: 127 - protein, 490 aa, Artificial Sequence; identical to SEQ ID NO: 39
  derived and/or modified protein sequence (wt) from LASV(LASV221-NIG-2010;Clade II)__AIT17624__GPC

SEQ ID NO: 128 - protein, 490 aa, Artificial Sequence
  derived and/or modified protein sequence (wt) from LASV(LASV224-NIG-2010;Clade II)__AIT17626__GPC
MGQIITFFQEVPHVIEEVMNIVLIALSLLAILKGVYNVATCGLFGLVSFLLLCGRSCSTTYKGVYELQTLELDMASLNMTMPLSCTKNNSHHYIMVGNETGLELTLTNTSIIQHKFCNLSDAHKKNLYDHALMSIISTFHLSIPNFNQYEAMSCDFNGGKITVQYNLSHSYAIDAANHCGTIANGVLQTFMRMAWGGSYIALDSGKGSWDCIMTSYQYLIIQNTTWEDHCQFSRPSPIGYLGLLSQRTRDIYISRRLLGTFTWTLSDSEGNETPGGYCLTRWMLIEAELKCFGNTAVAKCNEKHDEEFCDMLRLFDFNKQAIRRLKTEAQMSIQLINKAVNALINDQLIMKNHLRDIMGIPYCNYSKYWYLNHTVTGRTSLPRCWLVSNGSYLNETHFSDDIEQQADNMITELLQKEYMDRQGKTPLGLVDLFVFSTSFYLISIFLHLVKIPTHRHIIGKPCPKPHRLNHMGVCSCGLYKHPGVPVKWKR

SEQ ID NO: 129 - protein, 490 aa, Artificial Sequence
  derived and/or modified protein sequence (wt) from LASV(LASV225-NIG-2010;Clade II)__AIT17630__GPC
MGQIITFFQEVPHVIEEVMNIVLIALSLLAILKGIYNVATCGLFGLLSFLLLCGRSCSTTYKGVYELQTLELDMASLNMTMPLSCTKNNSHHYIMVGNETGLELTLTNTSIINHKFCNLSDAHKKNLYDHALMSIISTFHLSIPNFNQYEAMSCDFNGGKISVQYNLSHAYAVDAAEHCGTIANGVLQTFMRMAWGGSYIALDSGKGSWDCVMTSYQYLIIQNTSWEDHCQFSRPSPIGYLGLLSQRTRDIYISRRLLGTFTWTLSDSEGNETPGGYCLTRWMLIEAELKCFGNTAVAKCNEKHDEEFCDMLRLFDFNKQAIRRLKTEAQMSIQLINKAVNALINDQLIMKNHLRDIMGIPYCNYSKYWYLNHTVTGKTSLPRCWLVSNGSYLNETHFSDDIEQQADNMITELLQKEYIDRQGKTPLGLVDLFVFSTSFYLISIFLHLVKIPTHRHVIGKPCPKPHRLNHMGICSCGLYKHPGVPVKWKR

SEQ ID NO: 130 - protein, 490 aa, Artificial Sequence
  derived and/or modified protein sequence (wt) from LASV(LASV229-NIG-2010;Clade II)__AIT17634__GPC
MGQIITFFQEVPHVIEEVMNIVLIALSLLAILKGIYNVATCGLFGLVSFLLLCGRSCSTIYKDVYELQTLELDMASLNMTMPLSCTKNNSHHYIMVGNETGLELTLTNTSIINHKFCNLSDAHKKNLYDHALMSIISTFHLSIPNFNQYEAMSCDFNGGKISVQYNLSHTYAIDAANHCGTIANGVLQTFMRMAWGGSYIALDSGKGSWDCIMTSYQYLIIQNTTWEDHCQFSRPSPIGYLGLLSQRTRDIYISRRLLGTFTWTLSDSEGNETPGGYCLTRWMLIEAELKCFGNTAVAKCNEKHDEEFCDMLRLFDFNKQAIRRLKTEAQMSIQLINKAVNALINDQLIMKNHLRDIMGIPYCNYSRYWYLNHTVTGRTSLPRCWLVSNGSYLNETHFSDDIEQQADNMITELLQKEYMDRQGKTPLGLVDLFVFSTSFYLISIFLHLVKIPTHRHVIGKPCPKPHRLNHMGICSCGLYNHPGVPVKWKR

SEQ ID NO: 131 - protein, 490 aa, Artificial Sequence
  derived and/or modified protein sequence (wt) from LASV(LASV237-NIG-2010;Clade II)__AIT17638__GPC
MGQIITFFQEVPHVIEEVMNIVLIALSLLAILKGIYNVATCGLFGLVSFLLLCGRSCSTTYKGVYELQTLELDMASLNMTMPLSCTKNNSHHYIMVGNETGLELTLTNTSIINHKFCNLSDAHKKDLYDHALMSIISTFHLSIPNFNQYEAMSCDFNGGKISVQYNLSHTYAVDAANHCGTIANGVLQTFMRMAWGGSYIALDSGKGSWDCIMTSYQYLIIQNTTWEDHCQFSRPSPIGYLGLLSQRTRDIYISRRLLGTFTWTLSDSEGNETPGGYCLTRWMLIEAELKCFGNTAVAKCNEKHDEEFCDMLRLFDFNKQAIRRLKTEAQMSIQLINKAVNALINDQLIMKNHLRDIMGIPYCNYSKYWYLNHTVTGKTSLPRCWLVSNGSYLNETHFSDDIEQQADNMITELLQKEYMDRQGKTPLGLVDLFVFSTSFYLISIFLHLIKIPTHRHITGKPCPKPHRLNHMGICSCGLYKHPGVPVKWKR

SEQ ID NO: 132 - protein, 490 aa, Artificial Sequence
  derived and/or modified protein sequence (wt) from LASV(LASV239-NIG-2010;Clade II)__AIT17642__GPC
MGQIITFFQEVPHVIEEVMNIVLIALSLLAILKGVYNVATCGLFGLVSFLLLCGRSCSTTYKGVYELQTLELDMASLNMTMPLSCTKNNSHHYIMVGNDTGLELTLTNTSIINHKFCNLSDAHKKNLYDHALMSIISTFHLSIPNFNQYEAMSCDFNGGKISVQYNLSHAYAVDAASHCGTIANGVLQTFMRMAWGGSYIALDSGKGSWDCIMTSYQYLIIQNTTWEDHCQFSRPSPIGYLGLLSQRTRDIYISRRLLGTFTWTLSDSEGNETPGGYCLTRWMLIEAELKCFGNTAVAKCNEKHDEEFCDMLRLFDFNKQAIRRLKTEAQMSIQLINKAVNALINDQLIMKNHLRDIMGIPYCNYSKYWYLNHTVTGKTSLPRCWLVSNGSYLNETHFSDDIEQQADNMITELLQKEYMDRQGKTPLGLVDLFVFSTSFYLISIFLHLVKIPTHRHIIGKPCPKPHRLNHMGICSCGLYKHPGVPVKWKR

SEQ ID NO: 133 - protein, 490 aa, Artificial Sequence
  derived and/or modified protein sequence (wt) from LASV(LASV241-NIG-2011;Clade II)__AIT17646__GPC
MGQIITFFQEVPHVIEEVMNIVLIALSLLAILKGIYNVATCGLFGLVSFLLLCGRSCSTTYKGVYELQTLELDMASLNMTMPLSCTKNNSHHYIMVGNETGLELTLTNTSIINHKFCNLSDAHKKNLYDHALMSIISTFHLSIPNFNQYEAMSCDFNGGKISVQYNLSHAYAVDAASHCGTVANGVLQTFMRMAWGGSYIALDSGKGSWDCIMTSYQYLIIQNTTWEDHCQFSRPSPIGYLGLLSQRTRDIYISRRLLGTFTWTLSDSEGNETPGGYCLTRWMLIEAELKCFGNTAVAKCNEKHDEEFCDMLRLFDFNKQAIRRLKTEAQMSIQLINKAVNALINDQLIMKNHLRDIMGIPYCNYSKYWYLNHTVTGKTSLPRCWLVSNGSYLNETHFSDDIEQQADNMITELLQKEYMDRQGKTPLGLVDLFVFSTSFYLISIFLHLVKIPTHRHVIGKPCPKPHRLNHMGICSCGLYKHPGVPVKWKR

SEQ ID NO: 134 - protein, 490 aa, Artificial Sequence
  derived and/or modified protein sequence (wt) from LASV(LASV242-NIG-2010;Clade II)__AIT17650__GPC
MGQIITFFQEVPHVIEEVMNIVLIALSLLAILKGIYNVATCGLFGLVSFLLLCGRSCSTTYKGVYELQTLELDMASLNMTMPLSCTKNNSHHYIMVGNETGLELTLTNISIINHKFCNLSDAHKKNLYDHALMSIISTFHLSIPNFNQYEAMSCDFNGGKISVQYNLSHTYAVDAANHCGTIANGVLQTFMRMAWGGSYIALDSGKGSWDCIMTSYQYLIIQNTTWEDHCQFSRPSPIGYLGLLSQRTRDIYISRRLLGTFTWTLSDSEGNETPGGYCLTRWMLIEAELKCFGNTAVAKCNEKHDEEFCDMLRLFDFNKQAIRRLKAEAQMSIQLINKAVNALINDQLIMKNHLRDIMGIPYCNYSKYWYLNHTVTGRTSLPRCWLVSNGSYLNETHFSDDIEQQADNMITELLQKEYIDRQGKTPLGLVDLFVFSTSFYLISIFLHLVKIPTHRHIIGKPCPKPHRLNHMGICSCGLYKHPGVPVKWKR

SEQ ID NO: 135 - protein, 490 aa, Artificial Sequence
  derived and/or modified protein sequence (wt) from LASV(LASV246-NIG-2010;Clade II)__AIT17658__GPC
MGQIITFFQEVPHVIEEVMNIVLIALSLLAILKGVYNVATCGLFGLVSFLLLCGRSCSITYKGVYELQTLELDMANLNMTMPLSCTKNNSHHYIMVGNETGLELTLTNTSIINHKFCNLSDAHKKNLYDHALMSIISTFHLSIPNFNQYEAMSCDFNGGKISVQYNLSHTYAGDAADHCGTIANGVLQTFMRMAWGGSYIALDSGKGSWDCIMTSYQYLIIQNTTWEDHCQFSRPSPMGYLGLLSQRTRDIYISRRLLGTFTWTLSDSEGNETPGGYCLTRWMLIEAELKCFGNTAVAKCNEKHDEEFCDMLRLFDFNKQAIRRLKTEAQMSIQLINKAVNALINDQLIMKNHLRDIMGIPYCNYSKYWYLNHTITGKTSLPRCWLVSNGSYLNETHFSDDIEQQADNMITELLQKEYIDRQGKTPLGLVDLFVFSTSFYLISIFLHLVKIPTHRHITGKPCPKPHRLNHMGICSCGLYKHPGVPVRWKR

SEQ ID NO: 136 - protein, 490 aa, Artificial Sequence
  derived and/or modified protein sequence (wt) from LASV(LASV251-NIG-2010;Clade II)__AIT17666__GPC
MGQIVTFFQEVPHVIEEVMNIVLIALSLLAILKGIYNVATCGLFGLVSFLLLCGRSCSTTYKGVYELQTLELDMASLNMTMPLSCTKNNSHHYIMVGNETGLELTLTNTSIINHKFCNLSDAHKKNLYDHALMSIISTFHLSIPNFNQYEAMSCDFNGGKISVQYNLSHTYAVDAANHCGTIANGVLQTFMRMAWGGSYIALDSGKGSWDCIMTSYQYLIIQNTTWEDHCQFSRPSPIGYLGLLSQRTRDIYISRRLLGTFTWTLSDSEGNETPGGYCLTRWMLIEAELKCFGNTAVAKCNEKHDEEFCDMLRLFDFNKQAIRRLKTEAQMSIQLINKAVNALINDQLIMKNHLRDIMGIPYCNYSKYWYLNHTVTGKTSLPRCWLVSNGSYLNETHFSDDIEQQADNMITELLQKEYMDRQGKTPLGLVDLFVFSTSFYLISIFLHLVKIPTHRHITGKPCPKPHRLNHMGICSCGLYKHPGVPVKWKR

SEQ ID NO: 137 - protein, 490 aa, Artificial Sequence
  derived and/or modified protein sequence (wt) from LASV(LASV253-NIG-2011;Clade II)__AIT17670__GPC
MGQIITFFQEVPHVIEEVMNIVLIALSLLAILKGIYNVATCGLFGLVSFLLLCGRSCSTTYKGVYELQTLELDMASLNMTMPLSCTKNNSHHYIMVGNETGLELTLTNTSIINHKFCNLSDAHKKNLYDHALMSIISTFHLSIPNFNQYEAMSCDFNGGKISVQYNLSHTYAVDAANHCGTIANGVLQTFMRMAWGGSYIALDSGKGSWDCIMTSYQYLIIQNTTWEDHCQFSRPSPIGYLGLLSQRTRDIYISRRLLGTFTWTLSDSEGNETPGGYCLTRWMLIEAELKCFGNTAVAKCNEKHDEEFCDMLRLFDFNKQAIRRLKAEAQMSIQLINKAVNALINDQLIMKNHLRDIMGIPYCNYSKYWYLNHTVTGRTSLPRCWLVSNGSYLNETHFSDDIEQQADNMITELLQKEYIDRQGKTPLGLVDLFVFSTSFYLISIFLHLVKIPTHRHIIGKPCPKPHRLNHMGICSCGLYKHPGVPVKWKR

SEQ ID NO: 138 - protein, 490 aa, Artificial Sequence
  derived and/or modified protein sequence (wt) from LASV(LASV254-NIG-2011;Clade II)__AIT17674__GPC
MGQIITFFQEVPHVIEEVMNIVLIALSLLAILKGIYNVATCGLFGLVSFLLLCGRSCSTTYKGVYELQTLELDMTNLNMTMPLSCTKNNSHHYIMVGNETGLELTLTNTSIINHKFCNLSDAHKKNLYNHALMSIISTFHLSIPNFNQYEAMSCDFNGGKISVQYNLSHSYAVDAANHCGTIANGVLQTFMRMAWGGSYIALDSGKGNWDCIMTSYQYLIIQNTTWEDHCQFSRPSPIGYLGLLSQRTRDIYISRRLLGTFTWTLSDSEGNETPGGYCLTRWMLIEAELKCFGNTAVAKCNEKHDEEFCDMLRLFDFNKQAIRRLKTEAQANIQLINKAVNALINDQLIMKNHLRDIMGIPYCNYSKYWYLNHTVTGKTSLPRCWLVSNGSYLNETHFSDDIEQQADNMITELLQKEYMDRQGKTPLGLVDLFVFSTSFYLISIFLHLVKIPTHRHVIGKPCPKPHRLNHMGICSCGLYKHPGVPVKWKR

SEQ ID NO: 139 - protein, 490 aa, Artificial Sequence
  derived and/or modified protein sequence (wt) from LASV(LASV256-NIG-2010;Clade II)__AIT17678__GPC
MGQIITFFQEVPHVIEEVMNIVLITLSLLAILKGIYNIATCGLFGLVSFLLLCGRSCSTTYKGVYELQTLELDMTSLNMTMPLSCTKNNSHHYIMVGNETGLELTLTNTSIINHKFCNLSDAHKKNLYDHALMSIISTFHLSIPNFNQYEAMSCDFNGGKISVQYNLSHTYAVDAANHCGTIANGVLQTFMRMAWGGSYIALDSGKGSWDCIMTSYQYLIIQNTTWEDHCQFSRPSPIGYLGLLSQRTRDIYISRRLLGTFTWTLSDSEGNETPGGYCLTRWMLIEAELKCFGNTAVAKCNEKHDEEFCDMLRLFDFNKQAIRRLKTEAQMSIQLINKAVNALINDQLIMKNHLRDIMGIPYCNYSKYWYLNHTVTGKTSLPRCWLVSNGSYLNETHFSDDIEQQADNMITELLQKEYIDRQGKTPLGLVDLFVFSTSFYLISIFLHLVKIPTHRHIIGKPCPKPHRLNHMGICSCGLYKHPGIPVKWKR

SEQ ID NO: 140 - protein, 490 aa, Artificial Sequence
  derived and/or modified protein sequence (wt) from LASV(LASV267-NIG-2010;Clade II)__AIT17686__GPC
MGQIITFFQEVPHVIEEVMNIVLIALSLLAILKGIYNVATCGLFGLVSFLLLCGRSCSTTYKGVYELQTLELDMASLNMTMPLSCTKNNSHHYIMVGNETGLELTLTNTSIINHKFCNLSDAHKKNLYDHALMSIISTFHLSIPNFNQYEAMSCDFNGGKISVQYNLSHTYAVDAANHCGTIANGVLQTFMRMAWGGSYIALDSRKGSWDCIMTSYQYLIIQNTTWEDHCQFSRPSPIGYLGLLSQRTRDIYISRRLLGTFTWTLSDSEGNETPGGYCLTRWMLIEAELKCFGNTAVAKCNEKHDEEFCDMLRLFDFNKQAIRRLKTEAQMSIQLINKAVNALINDQLIMKNHLRDIMGIPYCNYSKYWYLNHTVTGKTSLPRCWLVSNGSYLNETHFSDDIEQQADNMITELLQKEYMDRQGKTPLGLVDLFVFSTSFYLISIFLHLIKIPTHRHVIGKPCPKPHRLNHMGICSCGLYKHPGVPVKWKR

SEQ ID NO: 141 - protein, 490 aa, Artificial Sequence
  derived and/or modified protein sequence (wt) from LASV(LASV271-NIG-2010;Clade II)__AIT17690__GPC
MGQIITFFQEVPHVIEEVMNIVLIALSLLAILKGIYNVATCGLFGLVSFLLLCGRSCSTTYKGVYELQTLELDMASLNMTMPLSCTKNNSHHYIMVGNETGLELTLTNTSIINHKFCNLSDAHKKNLYDHALMSIISTFHLSIPNFNQYEAMSCDFNGGKISVQYNLSHAYAVDAASHCGTVANGVLQTFMRMAWGGSYIALDSGKGSWDCIMTSYQYLIIQNTTWEDHCQFSRPSPIGYLGLLSQRTRDIYISRRLLGTFTWTLSDSEGNETPGGYCLTRWMLIEAELKCFGNTAVAKCNEKHDEEFCDMLRLFDFNKQAIRRLKTEAQMSIQLINKAVNALINDQLIMKNHLRDIMGIPYCNYSKYWYLNHTVTGRTSLPRCWLVSNGSYLNETHFSDDIEQQADNMITELLQKEYMDRQGKTPLGLVDLFVFSTSFYLISIFLHLVKIPTHRHVIGKPCPKPHRLNHMGICSCGLYKHPGVPVKWKR

SEQ ID NO: 142 - protein, 490 aa, Artificial Sequence
  derived and/or modified protein sequence (wt) from LASV(LASV274-NIG-2010;Clade II)__AIT17694__GPC
MGQIITFFQEVPHVIEEVMNIVLIALSLLAILKGIYNVATCGLFGLVSFLLLCGRSCSTIYKGVYELQTLELDMASLNMTMPLSCTKNNSHHYIMVGNETGLELTLTNTSIINHKFCNLSDAHKKNLYDHALMSIISTFHLSIPNFNQYEAMSCDFNGGKISVQYNLSHTYAVDAANHCGTIANGVLQTFMRMAWGGSYIALDSGKGSWDCIMTSYQYLIIQNTTWEDHCQFSRPSPIGYLGLLSQRTRDIYISRRLLGTFTWTLSDSEGNETPGGYCLTRWMLIEAELKCFGNTAVAKCNEKHDEEFCDMLRLFDFNKQAIRRLKTEAQMSIQLINKAVNALINDQLIMKNHLRDIMGIPYCNYSKYWYLNHTVTGKTSLPRCWLVSNGSYLNETHFSDDIEQQADNMITELLQKEYIDRQGKTPLGLVDLFVFSTSFYLISIFLHLVKIPTHRHVVGKPCPKPHRLNHMGICSCGLYKHPGVPVKWKR

SEQ ID NO: 143 - protein, 490 aa, Artificial Sequence
  derived and/or modified protein sequence (wt) from LASV(LASV719-NIG-2009;Clade II)__AIT17704__GPC
MGQIITFFQEVPHVIEEVMNIVLIALSLLAILKGIYNVATCGLFGLVSFLLLCGRSCSTTYKGVYELQTLELDMASLNMTMPLSCTKNNSHHYIMVGNETGLELTLTNTSIINHKFCNLSDAHKKNLYDHALMSIISTFHLSIPNFNQYEAMSCDFNGGKISVQYNLSHTYAVDAANHCGTIANGVLQTFMRMAWGGSYIALDSGKGSWDCIMTSYQYLIIQNTTWEDHCQFSRPSPIGYLGLLSQRTRDIYISRRLLGTFTWTLSDSEGNETPGGYCLTRWMLIEAELKCFGNTAVAKCNEKHDEEFCDMLRLFDFNKQAIRRLKTEAQMSIQLINKAVNALINDQLIMKNHLRDIMGIPYCNYSKYWYLNHTVTGKTSLPRCWLVSNGSYLNETHFSDDIEQQADNMITELLQKEYIDRQGKTPLGLVDLFVFSTSFYLISIFLHLVKIPTHRHVIGKPCPKPHRLNHMGICSCGLYKHPGVPVKWKR

SEQ ID NO: 144 - protein, 490 aa, Artificial Sequence
  derived and/or modified protein sequence (wt) from LASV(LASV738-NIG-2009;Clade II)__AIT17712__GPC
MGQIITFFQEVPHVIEEVMNIVLIALSLLAILKGIYNVATCGLFGLVSFLLLCGRSCSTTYKGVYELQTLELDMASLNMTMPLSCTKNNSHHYIMVGNETGLELTLTNTSIINHKFCNLSDAHKKNLYDHALMSIISTFHLSIPNFNQYEAMSCDFNGGKISVQYNLSHTYAVDAANHCGTIANGVLQTFMRMAWGGSYIALDSGKGAWDCIMTSYQYLIIQNTTWEDHCQFSRPSPIGYLGLLSQRTRDIYISRRLLGTFTWTLSDSEGNETPGGYCLTRWMLIEAELKCFGNTAVAKCNEKHDEEFCDMLRLFDFNKQAIMRLKTEAQMSIQLINKAVNALINDQLIMKNHLRDIMGIPYCNYSKYWYLNHTVTGKTSLPRCWLVSNGSYLNETHFSDDIEQQADNMITEMLQKEYIDRQGKTPLGLVDLFVFSTSFYLISIFLHLVKIPTHRHVIGKPCPKPHRLNHMGICSCGLYKHPGVPVRWKR

SEQ ID NO: 145 - protein, 490 aa, Artificial Sequence
  derived and/or modified protein sequence (wt) from LASV(LASV966-NIG-2009;Clade II)__AIT17718__GPC
MGQIITFFQEVPHVIEEVMNIVLIALSLLAILKGIYNVATCGLFGLVSFLLLCGRSCSTTYKGVYELQTLELDMASLNMTMPLSCTKNNSHHYIRVGNETGLELTLTNASIINHKFCNLSDAHKKNLYDHALMSIISTFHLSIPNFNQYEAMSCDFNGGKISVQYNLSHAYAIDAANHCGTVANGVLQTFMRMAWGGSYIALDSGRGNWDCIMTSYQYLIIQNTTWEDHCQFSRPSPIGYLGLLSQRTRDIYISRRLLGTFTWTLSDSEGNETPGGYCLTRWMLIEAELKCFGNTAVAKCNEKHDEEFCDMLRLFDFNKQAIRRLKTEAQMSIQLINKAVNALINDQLIMKNHLRDIMGIPYCNYSKYWYLNHTVTGKTSLPRCWLVSNGSYLNETHFSDDIEQQADNMITELLQKEYMDRQGKTPLGLVDLFVFSTSFYLISIFLHLVKIPTHRHVIGKPCPKPHRLNHMGICSCGFYKHPGVPVKWKR

SEQ ID NO: 146 - protein, 490 aa, Artificial Sequence
  derived and/or modified protein sequence (wt) from LASV(LASV969-NIG-2009;Clade II)__AIT17724__GPC
MGQIITFFQEVPHVIEEVMNIVLIALSLLAILKGIYNVATCGLFGLVSFLLLCGRSCSTTYKGVYELQTLELDMANLNMTMPLSCTKNNSHHYIMVGNETGLELTLTNTSIINHKFCNLSDAHKKNLYDHALMSIISTFHLSIPNFNQYEAMSCDFNGGKISVQYNLSHTYAVDAANHCGTVANGVLQTFMRMAWGGSYIALDSGKGSWDCIMTSYQYLIIQNTTWEDHCQFSRPSPIGYLGLLSQRTRDIYISRRLLGTFTWTLSDSEGNETPGGYCLTRWMLIEAELKCFGNTAVAKCNEKHDEEFCDMLRLFDFNKQAIRRLKTEAQMSIQLINKAVNALINDQLIMKNHLRDIMGIPYCNYSKYWYLNHTVTGKTSLPRCWLVSNGSYLNETHFSDDIEQQADNMITELLQKEYMDRQGKTPLGLVDLFVFSTSFYLISIFLHLVKIPTHRHIMGKPCPKPHRLNHMGICSCGLYKHPGVPVKWKR

SEQ ID NO: 147 - protein, 490 aa, Artificial Sequence
  derived and/or modified protein sequence (wt) from LASV(LASV971-NIG-2009;Clade II)__AIT17728__GPC
MGQIITFFQEVPHVIEEVMNIVLIALSLLAILKGIYNVATCGLFGLVSFLLLCGRSCSTTYKGVYELQTLELDMGSLNMTMPLSCTKNNSHHYIMVGNETGLELTLTNTSIINHKFCNLSDAHKKNLYDHALMSIISTFHLSIPNFNQYEAMSCDFNGGKISVQYNLSHTYAVDAANHCGTIANGVLQTFMRMAWGGSYIALDSGKGSWDCIMTSYQYLIIQNTTWEDHCQFSRPSPIGYLGLLSQRTRDIYISRRLLGTFTWTLSDSEGNETPGGYCLTRWMLIEAELKCFGNTAVAKCNEKHDEEFCDMLRLFDFNKQAIRRLKTEAQMSIQLINKAVNALINDQLIMKNHLRDIMGIPYCNYSKYWYLNHTVTGKTSLPRCWLVSNGSYLNETHFSDDIEQQADNMITELLQKEYMDRQGKTPLGLVDLFVFSTSFYLISIFLHLVKIPTHRHVIGKPCPKPHRLNHMGICSCGLYKHPGVPVKWKR

SEQ ID NO: 148 - protein, 490 aa, Artificial Sequence
  derived and/or modified protein sequence (wt) from LASV(LASV975-NIG-2009;Clade II)__AIT17732__GPC
MGQIITFFQEVPHVIEEVMNIVLIALSLLAILKGIYNVATCGLFGLVSFLLLCGRSCSTTYKGVYELQTLELDMASLNMTMPLSCTKNNSHHYIMVGNETGLELTLTNTSIINHKFCNLSDAHKKNLYDHALMSIISTFHLSIPNFNQYEAMSCDFNGGKISVQYNLSHTYAVDAANHCGTIANGVLQTFMRMAWGGSYIALDSGKGSWDCIMTSYQYLIIQNTTWEDHCQFSRPSPIGYLGLLSQRTRDIYISRRLLGTFTWTLSDSEGNETPGGYCLTRWMLIEAELKCFGNTAVAKCNEKHDEEFCDMLRLFDFNKQAIRRLKTEAQMSIQLINKAVNALINDQLIMKNHLRDIMGIPYCNYSKYWYLNHTVTGKTSLPRCWLVSNGSYLNETHFSDDIEQQADNMITELLQKEYIDRQGKTPLGLVDLFVFSTSFYLISIFLHLVKIPTHRHIVGKPCPKPHRLNHMGICSCGLYKHPGVPVKWKR

SEQ ID NO: 149 - protein, 490 aa, Artificial Sequence
  derived and/or modified protein sequence (wt) from LASV(LASV976-NIG-2009;Clade II)__AIT17736__GPC
MGQIVTFFQEVPHVIEEVMNIVLIALSLLAILKGIYNVATCGLFGLVSFLLLCGRSCSTTYKGVYELQTLELDMASLNMTMPLSCTKNNSHHYIMVGNETGLELTLTNTSIINHKFCNLSDAHKKDLYDHALMSIISTFHLSIPNFNQYEAMSCDFNGGKISVQYNLSHTYAVDAANHCGTIANGVLQTFMRMAWGGSYIALDSGKGSWDCIMTSYQYLIIQNTTWEDHCQFSRPSPIGYLGLLSQRTRDIYISRRLLGTFTWTLSDSEGNETPGGYCLTRWMLIEAELKCFGNTAVAKCNEKHDEEFCDMLRLFDFNKQAIMRLKTEAQMSIQLINKAVNALINDQLIMKNHLRDIMGIPYCNYSKYWYLNHTVTGKTSLPRCWLVSNGSYLNETRFSDDIEQQADNMITEMLQKEYLDRQGKTPLGLVDLFVFSTSFYLISIFLHLVKIPTHRHIIGKPCPKPHRLNHMGICSCGLYKHPGVPVKWKR

SEQ ID NO: 150 - protein, 490 aa, Artificial Sequence
  derived and/or modified protein sequence (wt) from LASV(LASV978-NIG-2009;Clade II)__AIT17744__GPC
MGQIITFFQEVPHVIEEVMNIVLIALSLLAILKGIYNVATCGLFGLMSFLLLCGRSCSTTYKGVYELQTLELDMANLNMTMPLSCTKNNSHHYIMVGNETGLELTLTNTSIINHKFCNLSDAHKKNLYDHALMSIISTFHLSIPNFNQYEAMSCDFNGGKISVQYNLSHAYAVDAANHCGTIANGVLQTFMRMAWGGSYIALDSGKGSWDCIMTSYQYLIIQNTSWEDHCQFSRPSPIGYLGLLSQRTRDIYISRRLLGTFTWTLSDSEGNETPGGYCLTRWMLIEAELKCFGNTAVAKCNEKHDEEFCDMLRLFDFNKQAIRRLKTEAQMSIQLINKAVNALINDQLIMKNHLRDIMGIPYCNYSKYWYLNHTVTGKTSLPRCWLVSNGSYLNETHFSDDIEQQADNMITELLQKEYIDRQGKTPLGLVDLFVFSTSFYLISIFLHLVKIPTHRHVIGKPCPKPHRLNHMGICSCGLYKHPGVPVKWKR

SEQ ID NO: 151 - protein, 490 aa, Artificial Sequence
  derived and/or modified protein sequence (wt) from LASV(LASV981-NIG-2009;Clade II)__AIT17752__GPC
MGQIITFFHEVPHVIEEVMNIVLIALSLLAILKGIYNVATCGLFGLVSFLLLCGRSCSTTYKGVYELQTLELDMASLNMTMPLSCTKNNSHHYIMVGNETGLELTLTNTSIINHKFCNLSDAHKKNLYDHALMSIISTFHLSIPNFNQYEAMSCDFNGGKISVQYNLSHTYAIDAANHCGTIANGVLQTFMRMAWGGSYIALDSGRGSWDCIMTSYQYLIIQNTTWEDHCQFSRPSPIGYLGLLSQRTRDIYISRRLLGTFTWTLSDSEGNETPGGYCLTRWMLIEAELKCFGNTAVAKCNEKHDEEFCDMLRLFDFNKQAIRRLKTEAQMSIQLINKAVNALINDQLIMKNHLRDIMGIPYCNYSKYWYLNHTVTGKTSLPRCWLVSNGSYLNETHFSDDIEQQADNMITELLQKEYIDRQGKTPLGLVDLFVFSTSFYLISIFLHLVKIPTHRHVIGKPCPKPHRLNHMGICSCGLYKHPGVPVKWKR

SEQ ID NO: 152 - protein, 490 aa, Artificial Sequence
  derived and/or modified protein sequence (wt) from LASV(LASV982-NIG-2009;Clade II)__AIT17756__GPC
MGQIITFFQEVPHVIEEVMNIVLIALSLLAILKGIYNVATCGLFGLVSFLLLCGRSCSITYKGVYELQTLELDMASLNMTMPLSCTKNNSHHYIMVGNETGLELTLTNTSIINHKFCNLSDAHKKNLYDHALMSIISTFHLSIPNFNQYEAMSCDFNGGKISVQYNLSHTYAVDAANHCGTIANGVLQTFMRMAWGGSYIALDSGRGSWDCIMTSYQYLIIQNTTWEDHCQFSRPSPIGYLGLLSQRTRDIYISRRLLGTFTWTLSDSEGNETPGGYCLTRWMLIEAELKCFGNTAVAKCNEKHDEEFCDMLRLFDFNKQAIRRLKAEAQMSIQLINKAVNALINDQLIMKNHLRDIMGIPYCNYSKYWYLNHTVTGRTSLPRCWLVSNGSYLNETHFSDDIEQQADNMITELLQKEYIDRQGKTPLGLVDLFVFSTSFYLISIFLHLVKIPTHRHIIGKPCPKPHRLNHMGICSCGLYKHPGVPVKWKR

SEQ ID NO: 153 - protein, 490 aa, Artificial Sequence
  derived and/or modified protein sequence (wt) from LASV(LASV988-NIG-2009;Clade II)__AIT17758__GPC
MGQIITFFQEVPHVIEEVMNIVLIALSLLAILKGIYNVATCGLFGLVSFLLLCGRSCSTTYKGVYELQTLELNMASLNMTMPLSCTKNNSHHYIMVGNETGLELTLTNTSIINHKFCNLSDAHKRNLYDHALMSIISTFHLSIPNFNQYEAMSCDFNGGKISVQYNLSHTYAVDAAKHCGTIANGVLQTFMRMAWGGSYIALDSGKGSWDCIMTSYQYLIIQNTTWEDHCEFSRPSPIGYLGLLSQRTRDIYISRRLLGTFTWTLSDSEGNETPGGYCLTRWMLIEAELKCFGNTAVAKCNEKHDEEFCDMLRLFDFNKQAIRRLKAEAQMSIQLINKAVNALINDQLIMKNHLRDIMGIPYCNYSKYWYLNHTVTGKTSLPRCWLVSNGSYLNETHFSDDIEQQADNMITELLQKEYIDRQGKTPLGLVDLFVFSTSFYLISIFLHLVKIPTHRHVIGKPCPKPHRLNHMGICSCGLYKHPGVPVKWKR

SEQ ID NO: 154 - protein, 490 aa, Artificial Sequence
  derived and/or modified protein sequence (wt) from LASV(LASV989-NIG-2009;Clade II)__AIT17762__GPC
MGQIITFFQEVPHVIEEVMNIVLIALSLLAILKGIYNVATCGLFGLVSFLLLCGRSCSTTYKGVYELQTLELDMASLNMTMPLSCTKNNSHHYIMVGNETGLELTLTNTSIISHKFCNLSDAHKKNLYDHALMSIISTFHLSIPNFNQYEAMSCDFNGGKISVQYNLSHTYAVDAANHCGTIANGVLQTFMRMAWGGSYIALDSGKGSWDCIMTSYQYLIIQNTTWEDHCQFSRPSPIGYLGLLSQRTRDIYISRRLLGTFTWTLSDSEGNEAPGGYCLTRWMLIEAELKCFGNTAVAKCNEKHDEEFCDMLRLFDFNKQAIRRLKTEAQMSIQLINKAVNALINDQLIMKNHLRDIMGIPYCNYSRYWYLNHTVTGKTSLPRCWLVSNGSYLNETHFSDDIEQQADNMITELLQKEYMDRQGKTPLGLVDLFVFSTSFYLISIFLHLVKIPTHRHVIGKPCPKPHRLNHMGICSCGLYKHPGVPVKWKR

SEQ ID NO: 155 - protein, 490 aa, Artificial Sequence
  derived and/or modified protein sequence (wt) from LASV(LASV991-NIG-2009;Clade II)__AIT17770__GPC
MGQIVTFFQEVPHVIEEVMNIVLIALSLLAILKGIYNVATCGLFGLVSFLLLCGRSCSTTYKGVYELQALELDMSSLNMTMPLSCTKNNSHHYIMVGNETGLELTLTNTSIIHHKFCNLSDAHKKDLYDHALMSIISTFHLSIPNFNQYEAMSCDFNGGKISVQYNLSHTYAVDAANHCGTIANGVLQTFMRMAWGGSYIALDSGKGGWDCIMTSYQFLIIQNTTWEDHCQFSRPSPIGYLGLLSQRTRDIYISRRLLGTFTWTLSDSEGNETPGGYCLTRWMLIEAELKCFGNTAVAKCNEKHDEEFCDMLRLFDFNKQAIKRLKTEAQMSIHLINKAVNALINDQLIMKNHLRDIMGIPYCNYSKYWYLNHTVTGKTSLPRCWLVSNGSYLNETHFSDDIEQQADNMITELLQKEYIDRQGKTPLGLVDLFVFSTSFYLISIFLHLVKIPTHRHVIGKPCPKPHRLNHMGICSCGLYKHPGVPVRWKR

SEQ ID NO: 156 - protein, 490 aa, Artificial Sequence
  derived and/or modified protein sequence (wt) from LASV(LASV993-NIG-2009;Clade II)__AIT17778__GPC
MGQIITFFQEVPHVIEEVMNIVLIALSLLAILKGIYNVATCGLFGLVSFLLLCGRSCSTTYKGVYELQTLELDMANLNMTMPLSCTKNNSHHYIMVGNETGLELTLTNTSIINHKFCNLSDAHKKNLYDHALMSIISTFHLSIPNFNQYEAMSCDFNGGKISVQYNLSHTYARDAANHCGTIANGVLQTFMRMAWGGSYIALDSGKGSWDCIMTSYQYLIIQNTTWEDHCQFSRPSPIGYLGLLSQRTRDIYISRRLLGTFTWTLSDSEGNETPGGYCLTRWMLIEAELKCFGNTAVAKCNEKHDEEFCDMLRLFDFNKQAIRRLKTEAQMNIQLINKAVNALINDQLIMKNHLRDIMGIPYCNYSKYWYLNHTVTGKTSLPRCWLVSNGSYLNETHFSDDIEQQADNMITELLQKEYMDRQGKTPLGLVDLFVFSTSFYLISIFLHLVKIPTHRHVIGKPCPKPHRLNHMGICSCGLYKHPGVPVKWKR

SEQ ID NO: 157 - protein, 490 aa, Artificial Sequence
  derived and/or modified protein sequence (wt) from LASV(Nig08-04;Clade II)__ADU56610__GPC
MGQIVTFFQEVPHVIEEVMNIVLIALSLLAILKGIYNVATCGLFGLISFLLLCGRSCSTTYKGVYELQTLELDMANLNMTMPLSCTKNSSHHYIMVGNETGLELTLTNTSIINHKFCNLSDAHKKNLYDHALMSIISTFHLSIPNFNQYEAMSCDFNGGKISVQYNLSHAYAVDAANHCGTIANGVLQTFMRMAWGGSYIALDSGKGNWDCIMTSYQYLIIQNTTWEDHCQFSRPSPIGYLGLLSQRTRDIYISRRLLGTFTWTLSDSEGNEAPGGYCLTRWMLIEAELKCFGNTAIAKCNEKHDEEFCDMLRLFDFNKQAIKRLKAEAQMSIQLINKAVNALINDQLIMKNHLRDIMGIPYCNYSKYWYLNHTVTGKTSLPRCWLISNGSYLNETHFSDDIEQQADNMITELLQKEYMDRQGKTPLGLVDLFVFSTSFYLISIFLHLVKIPTHRHIVGRPCPKPHRLNHMGICSCGLYKHPGVPVKWKR

SEQ ID NO: 158 - protein, 490 aa, Artificial Sequence
  derived and/or modified protein sequence (wt) from LASV(Nig08-A41;Clade II)__ADU56626__GPC
MGQIITFFQEVPHVIEEVMNIVLIALSLLAILKGIYNVATCGLFGLVSFLLLCGRSCSTTYKGVYELQTLELNMASLNMTMPLSCTKNNSHHYIMVGNETGLELTLTNTSIINHKFCNLSDAHKRNLYDHALMSIISTFHLSIPNFNQYEAMSCDFNGGKISVQYNLSHTYAVDAAKHCGTIANGVLQTFMRMAWGGSYIALDSGKGSWDCIMTSYQYLIIQNTTWEDHCQFSRPSPIGYLGLLSQRTRDIYISRRLLGTFTWTLSDSEGNETPGGYCLTRWMLIEAELKCFGNTAVAKCNEKHDEEFCDMLRLFDFNKQAIRRLKAEAQMSIQLINKAVNALINDQLIMKNHLRDIMGIPYCNYSKYWYLNHTVTGKTSLPRCWLVSNGSYLNETHFSDDIEQQADNMITELLQKEYIDRQGKTPLGLVDLFVFSTSFYLISIFLHLVKIPTHRHVIGKPCPKPHRLNHMGICSCGLYKHPGVPVKWKR

SEQ ID NO: 159 - protein, 490 aa, Artificial Sequence
  derived and/or modified protein sequence (wt) from LASV(Nig08-A47;Clade II)__ADU56630__GPC
MGQIITFFQEVPHVIEEVMNIVLIALSLLAILKGIYNVATCGLFGLVSFLLLCGRSCSTTYKGVYELQTLELDMASLNMTMPLSCTKNNSHHYIMVGNETGLELTLTNTSIINHKFCNLSDAHKKNLYDHALMSIISTFHLSIPNFNQYEAMSCDFNGGKISVQYNLSHAYAVDAANHCGTIANGVLQTFMRMAWGGSYIALDSGKGSWDCIMTSYQYLIIQNTTWEDHCQFSRPSPIGYLGLLSQRTRDIYISRRLLGTFTWTLSDSEGNETPGGYCLTRWMLIEAELKCFGNTAVAKCNEKHDEEFCDMLRLFDFNKQAIRRLKTEAQMSIQLINKAVNALINDQLIMKNHLRDIMGIPYCNYSKYWYLNHTVTGKTSLPRCWLVSNGSYLNETHFSDDIEQQADNMITELLQKEYMDRQGKTPLGLVDLFVFSTSFYLISIFLHLVRIPTHRHVIGKPCPKPHRLNHMGICSCGLYKHPGVPVKWKR

SEQ ID NO: 160 - protein, 490 aa, Artificial Sequence
  derived and/or modified protein sequence (wt) from LASV(CSF;Clade III)__AAL13212__GPC
MGQIVTFFQEVPHVIEEIMNIVLITLSLLAILKGVYNLATCGLIGLITFLFLCGRSCSMTYKGSYQLETLELNMETLNMTMPLSCTKNTSHHYIRVGNETGLELTLTNTSIINHKFCNLSDAHKKNLYDHSLMSIISTFHLSIPNFNQYEAMSCDFNGGKISIQYNLSHTYAGDAAKHCGTLANGILQTFMRMAWGGSYIALDSGRGNWDCIMTSYQYLIIQNTTWEDHCQFSRPSPIGYLGLLSQRTREIYISRRLLGTFTWTLSDSEGNENPGGYCLTRWMLIEAELKCFGNTAVAKCNEKHDEEFCDMLRLFDFNKQAIQRLKAEAQMSIQLINKAVNALINDQLIMKNHLRDIMGIPYCNYSKYWYLNHTTTGRTSLPRCWLVSNGSYLNETRFSDDIEQQADNMITEMLQKEYIDRQGKTPLGLVDLFVFSTSFYLISIFLHLIKIPTHRHIVGGPCPKPHRLNHKGICSCGLYKRPGVSVRWKR

SEQ ID NO: 161 - protein, 490 aa, Artificial Sequence
  derived and/or modified protein sequence (wt) from LASV(ISTH2121-NIG-2012;Clade III)__AIT17540__GPC
MGQIVTFFQEVPHVIEEIMNIVLITLSLLAILKGIYNFATCGLIGLITFLFLCGRSCSTIYKGSYQLQTLELNMETLNMTMPLSCTKNNSHHYIRVGNETGLELTLTNTSIINHKFCNLSEAHKKNLYDHALMSIISTFHLSIPNFNQYEAMSCDFNGGKISVQYNLSHSYAVDAANHCGTVANGVLQTFMRMAWGGSYIALDSGRGNWDCIMTSYQYLIIQNTTWEDHCQFSRPSPIGYLGLLSQRTRDIYISRRLLGTFTWTLSDSEGKETPGGYCLTRWMLIEAELKCFGNTAVAKCNEKHDEEFCDMLRLFDFNKQAIQRLKTEAQMSIQLINKAVNALINDQLIMKNHLRDIMGIPYCNYSKYWYLNHTSTGRTSLPKCWLVSNGSYLNETHFSDDIEQQADNMITEMLQKEYIDRQGKTPLGLVDLFVFSTSFYLISIFLHLVKIPTHRHIVGKSCPKPHRLNHMGICSCGLYKQPGVPVKWKR

SEQ ID NO: 162 - protein, 490 aa, Artificial Sequence
  derived and/or modified protein sequence (wt) from LASV(Nig08-A19;Clade III)__ADU56618__GPC
MGQIVTFFQEVPHVIEEVMNIVLIALSILAILKGLYNIATCGLIGLVTFLLLSGRSCSMTYKGVYELQTLELNMNTLNMTMPLSCTKNNSHHYIMVGNETGLELTLTNTSLLHHKFCNLSDAHKKNLYDHTLMSIISTFHLSIPNFNQYEAMSCDFNGGKITVQYNLSHSYAIDAANHCGTVANGVLQTFMRMAWGGSYIALDSGRGKWDCIMTSYQYLIIQNTTWEDHCQFSRPSPIGYLGLLSQRTRDIYISRRLLGTFTWTLSDSEGNETPGGYCLTRWMLIEAELKCFGNTAVAKCNEKHDEEFCDMLRLFDFNKQAIRRLKAEAQMSIQLINKAVNALINDQLIMKNHLRDIMGIPYCNYSKYWYLNHTSTGRTSLPRCWLVSNGSYLNETHFSDDIEQQADNMITEMLQKEYLDRQGKTPLGLVDLFVFSTSFYLISIFLHLVKIPTHRHIVGKPCPKPHRLNHMGICSCGLYKQPGVPVRWKR

SEQ ID NO: 163 - protein, 490 aa, Artificial Sequence
  derived and/or modified protein sequence (wt) from LASV(ONM-299;Clade III)__ANH09734__GPC
MGQIVTFFQEVPHVIEEIMNIVLITLSLLAILKGLYNFATCGLIGLITFLFLCGRSCSMIYKGSYQLETLELNMETLNMTMPLSCTKNNSHHYIRVGNETGLELTLTNTSIIGHKFCNLSDAHKKNLYDHSLMSIISTFHLSIPNFNQYEAMSCDFNGGKISIQYNLSHTYAGDAAKHCGTVANGVLQTFMRMAWGGSYIALDSGRGNWDCIMTSYQYLIIQNTTWEDHCQFSRPSPIGYLGLLSQRTRDIYISRRLLGTFTWTLSDSEGKETPGGYCLTRWMLIEAELKCFGNTAVAKCNEKHDEEFCDMLRLFDFNKQAIQRLKTEAQMSIQLINKAVNALINDQLIMKNHLRDIMGIPYCNYSKYWYLNHTSTGRTSLPKCWLVSNGSYLNETHFSDDIEQQADNMITEMLQKEYIDRQGKTPLGLVDVFVFSTSFYLISIFLHLVKIPTHRHIVGKSCPKPHRLNHMGICSCGLYKQPGVPVRWKR

SEQ ID NO: 164 - protein, 490 aa, Artificial Sequence
  derived and/or modified protein sequence (wt) from LASV(ONM-700;Clade III)__ANH09738__GPC
MGQIVTFFQEVPHVIEEIMNIVLITLSLLAILKGLYNFATCGLIGLITFLFLCGRSCSMIYKGSYQLETLELNMETLNMTMPLSCTKNNSHHYIRVGNETGLELTLTNTSIINHKFCNLSDAHKRNLYDHSLMSIISTFHLSIPNFNQYEAMSCDFNGGKISIQYNLSHTYAGDAAKHCGTVANGVLQTFMRMAWGGSYIALDSGRGNWDCIMTSYQYLIIQNTTWEDHCQFSRPSPIGYLGLLSQRTRDIYISRRLLGTFTWTLSDSEGKETPGGYCLTRWMLIEAELKCFGNTAVAKCNEKHDEEFCDMLRLFDFNKQAIQRLKTEAQMSIQLINKAVNALINDQLIMKNHLRDIMGIPYCNYSKYWYLNHTSTGRTSLPKCWLVSNGSYLNETHFSDDIEQQADNMITEMLQKEYIDRQGKTPLGLVDVFMFSTSFYLISIFLHLVKIPTHRHIVGKSCPKPHRLNHMGICSCGLYKQPGVPVRWKR

SEQ ID NO: 165 - protein, 490 aa, Artificial Sequence
  derived and/or modified protein sequence (wt) from LASV(Weller;Clade III)__AAT49010__GPC
MGQIVTFFQEVPHVIEEVMNIVLIALSVLAILKGLYNFATCGLIGLVTFLLLSGRSCSMIYKGVYELQTLELNMETLNMTMPLSCTKNTSHHYIRVGNDTGLELTLTNETLLHHKFCNLSDAHKRNLYDHALMSIISTFHLSIPNFNQYEAMSCDFNGGKITVQYNLSHSYAVDAAKHCGTVANGVLQTFMRMAWGGSYIALDSRHGNWDCIMTSYQYLIIQNTTWEDHCQFSRPSPIGYLGLLSQRTRDIYISRRLLGTFTWTLSDSEGNETPGGYCLTRWMLIEAELKCFGNTAVAKCNEKHDEEFCDMLRLFDFNKQAIRRLKTEAQMSIQLINKAVNALINDQLIMKNHLRDIMGIPYCNYSKYWYLNHTSTGKTSLPRCWLVSNGSYLNETHFSDDIEQQADNMITEMLQKEYLDRQGKTPLGLVDLFVFSTSFYLISIFLHLIKIPTHRHIVGKPCPKPHRLNHMGICSCGLYKQPGVPVRWKR

SEQ ID NO: 166 - protein, 491 aa, Artificial Sequence
  derived and/or modified protein sequence (wt) from LASV(BA366;Clade IV)__ADI39451__GPC
MGQIVTFFQEVPHVIEEVMNIVLIALSVLAVLKGLYNVATCGLIGLIAFLLLCGRSCTTTLYKGVYELQALELNMETLNMTMPLSCTKNNSHHYIMVGNETGLELTLTNTSIINHKFCNLSDAHKKNLYDHALMSIISTFHLSIPNFNQYEAMSCDFNGGKISVQYNLSHTYAVDAANHCGTVANGVLQTFMRMAWGGSYIALDSGRGSWDCIMTSYQYLIIQNTTWEDHCQFSRPSPIGYLGLLSQRTRDIYISRRLLGTFTWTLSDSEGKDTPGGYCLTRWMLIEAELKCFGNTAVAKCNEKHDEEFCDMLRLFDFNKQAIQRLKAEAQMSIQLINKAVNALINDQLIMKNHLRDIMGIPYCNYSKYWYLNHTITGRTSLPKCWLVSNGSYLNETHFSDDIEQQADNMITEMLQKEYIERQGKTPLGLVDLFVFSTSFYLISIFLHLIKIPTHRHIVNKPCPKPHRLNHMGVCSCGLYKQPGVPVRWKR

SEQ ID NO: 167 - protein, 491 aa, Artificial Sequence
  derived and/or modified protein sequence (wt) from LASV(G1180-SLE-2010;Clade IV)__AIT17168__GPC
MGQIVTFFQEVPHVIEEVMNIVLIALSILAVLKGLYNFATCGLVGLLTFLLLCGRSCTASRYKGVYELQTLELNMETLNMTMPLSCTKNNSHHYIMVGNETGLELTLTNTSIINHKFCNLSDAHKKNLYDHALMSIISTFHLSIPNFNQYEAMSCDFNGGKISVQYNLSHSYAGDAANHCGTVANGVLQTFMRMAWGGSYIALDSGHGSWDCIMTSYQYLIIQNTTWEDHCQFSRPSPIGYLGLLSQRTRDIYISRRLLGTFTWTLSDSEGKDTPGGYCLTRWMLIEAELKCFGNTAVAKCNEKHDEEFCDMLRLFDFNKQAIQRLKAEAQMSIQLINKAVNALINDQLIMKNHLRDIMGIPYCNYSKYWYLNHTTTGKTSLPKCWLVSNGSYLNETHFSDDIEQQADNMITEMLQKEYMERQGKTPLGLVDLFVFSTSFYLISIFLHLVKIPTHRHIVGKSCPKPHRLNHMGICSCGLYKQPGVPVKWKR

SEQ ID NO: 168 - protein, 491 aa, Artificial Sequence
  derived and/or modified protein sequence (wt) from LASV(G1190-SLE-2010;Clade IV)__AIT17172__GPC
MGQIVTFFQEVPHVIEEVMNIVLIALSILAVLKGLYNFATCGLVGLVTFLLLCGRSCTTSLYKGVYELQTLELNMETLNMTMPLSCTKNNSHHYIMVGNETGLELTLTNTSIINHKFCNLSDAHKKNLYDHALMSIISTFHLSIPNFNQYEAMSCDFNGGKISVQYNLSHSYAGDAANHCGTVANGVLQTFMRMAWGGSYIALDSGRGRWDCIMTSYQYLIIQNTTWEDHCQFSRPSPIGYLGLLSQRTRDIYISRRLLGTFTWTLSDSEGKDTPGGYCLTRWMLIEAELKCFGNTAVAKCNEKHDEEFCDMLRLFDFNKQAIQRLKAEAQMSIQLINKAVNALINDQLIMKNHLRDIMGIPYCNYSKYWYLNHTTTGKTSLPKCWLVSNGSYLNETHFSDDIEQQADNMITEMLQKEYMERQGKTPLGLVDLFVFSTSFYLISIFLHLVKIPTHRHIVGKPCPRPHRLNHMGICSCGLYKQPGVPVKWKR

SEQ ID NO: 169 - protein, 491 aa, Artificial Sequence
  derived and/or modified protein sequence (wt) from LASV(G1200-LIB-2010;Clade IV)__AIT17176__GPC
MGQIVTFFQEVPHVIEEVMNIVLIALSLLAVLKGLYNVATCGLIGLITFLLLCGRSCTTNLYKGVYELQALELNMETLNMTMPLSCTKNNSHHYIMVGNETGLELTLTNTSIINHKFCNLSDAHKKNLYDHALMSIISTFHLSIPNFNQYEAMSCDFNGGRISVQYNLSHSYAGDAASHCGTIANGVLQTFMRMAWGGSYIALDSGHGGWDCIMTSYQYLIIQNTTWEDHCQFSRPSPIGYLGLLSQRTRDIYISRRLLGTFTWTLSDSEGKDTPGGYCLTRWMLIEAELKCFGNTAVAKCNEKHDEEFCDMLRLFDFNKQAIQRLKAEAQMSIQLINKAVNALINDQLIMKNHLRDIMGIPYCNYSKYWYLNHTVTGKTSLPKCWLVSNGSYLNETHFSDDIEQQADNMITEMLQKEYMERQGKTPLGLVDLFVFSTSFYLISIFLHLVKIPTHRHVVGKPCPKPHRLNHMGICSCGLYKQPGVPVRWKR

SEQ ID NO: 170 - protein, 491 aa, Artificial Sequence
  derived and/or modified protein sequence (wt) from LASV(G1442-SLE-2011;Clade IV)__AIT17180__GPC
MGQIVTFFQEVPHVIEEVMNIVLIALSILAVLKGLYNVATCGLIGLVTFLLLCGRSCTTTLYKGVYELQTLELNMETLNMTMPLSCTKNNSHHYIRVGNETGLELTLTNTSIINHKFCNLSDAHKKNLYDHALMSIISTFHLSIPNFNQYEAMSCDFNGGKISVQYNLSHSYAGDAANHCGTVANGVLQTFMRMAWGGSYIALDSGRGNWDCIMTSYQYLIIQNTTWDDHCQFSRPSPIGYLGLLSQRTRDVYISRRLLGTFTWTLSDSEGKDTPGGYCLTRWMLIEAELKCFGNTAVAKCNEKHDEEFCDMLRLFDFNKQAIQRLKAEAQMSIQLINKAVNALINDQLIMKNHLRDIMGIPYCNYSKYWYLNNTATGKTSLPKCWLISNGSYLNETHFSDDIEQEADNMITEMLQKEYMERQGKTPLGLVDLFVFSTSFYLISIFLHLVKIPTHRHIVGKSCPKPHRLNHMGICSCGLYKQPGVPVRWKR

SEQ ID NO: 171 - protein, 491 aa, Artificial Sequence
  derived and/or modified protein sequence (wt) from LASV(G1529-SLE-2011;Clade IV)__AIT17184__GPC
MGQIVTFFQEVPHVIEEVMNIVLIALSILAVLKGLYNVATCGLIGLVTFLLLCGRSCTTTLYKGVYELQALELNMETLNMTMPLSCTKNNSHHYIRVGNETGLELTLTNTSIIDHKFCNLSDAHKKNLYDHALMSIISTFHLSIPNFNQYEAMSCDFNGGKISVQYNLSHSYAGDAANHCGTVANGVLQTFMRMAWGGSYIALDSGRNGWDCIMTSYQYLIIQNTTWDDHCQFSRPSPIGYLGLLSQRTRDIYISRRLLGTFTWTLSDSEGKDTPGGYCLTRWMLIEAELKCFGNTAVAKCNEKHDEEFCDMLRLFDFNKQAIRRLKAEAQMSIQLINKAVNALINDQLIMKNHLRDIMGIPYCNYSKYWYLNNTATGKTSLPRCWLVSNGSYLNETHFSDDIEQQADNMITEMLQREYMERQGKTPLGLVDLFVFSTSFYLISIFLHLVKIPTHRHIVGKPCPKPHRLNHMGICSCGLYKQPGVPVKWKR

SEQ ID NO: 172 - protein, 491 aa, Artificial Sequence
  derived and/or modified protein sequence (wt) from LASV(G1618-SLE-2011;Clade IV)__AIT17188__GPC
MGQIVTFFQEVPHVIEEVMNIVLIALSILAVLKGLYNFATCGFVGLVSFLLLCGRSCTTSLYKGVYELQTLELNMETLNMTMPLSCTKNNSHHYIMVGNETGLELTLTNTSIINHKFCNLSDAHKKNLYDHALMSIISTFHLSIPNFNQYEAMSCDFNGGKISVQYNLSHSYAVDAANHCGTVANGVLQTFMRMAWGGSYIALDSGHGSWDCIMTSYQYLIIQNTTWEDHCQFSRPSPIGYLGLLSQRTRDIYISRRLLGTFTWTLSDSEGKDTPGGYCLTRWMLIEAELKCFGNTAVAKCNEKHDEEFCDMLRLFDFNKQAIQRLRAEAQMSIQLINKAVNALINDQLIMKNHLRDIMGIPYCNYSKYWYLNHTTTGRTSLPKCWLVSNGSYLNETHFSDDIEQQADNMITEMLQKEYMERQGKTPLGLVDLFVFSTSFYLISIFLHLVKIPTHRHIVGKSCPKPHRLNHMGICSCGLYGQPGVPVKWKR

SEQ ID NO: 173 - protein, 491 aa, Artificial Sequence
  derived and/or modified protein sequence (wt) from LASV(G1646-SLE-2011;Clade IV)__AIT17192__GPC
MGQIVTFFQEVPHVIEEVMNIVLIALSILAVLKGLYNFATCGFIGLVSFLLLCGRSCTTSLYKGVYELQTLELNMETLNMTMPLSCTKNNSHHYIMVGNETGLELTLTNTSIINHKFCNLSDAHKKNLYDHALMSIISTFHLSIPNFNQFEAMSCDFNGGKISVQYNLSHSYAVDAANHCGTVANGVLQTFMRMAWGGSYIALDSGHGSWDCIMTSYQYLIIQNTTWEDHCQFSRPSPIGYLGLLSQRTRDIYISRRLLGTFTWTLSDSEGKDTPGGYCLTRWMLIEAELKCFGNTAVAKCNEKHDEEFCDMLRLFDFNKQAIQRLKAEAQMSIQLINKAVNALINDQLIMKNHLRDIMGIPYCNYSKYWYLNHTTTGRTSLPKCWLVSNGSYLNETHFSDDIEQQADNMITEMLQKEYMERQGKTPLGLVDLFVFSTSFYLISIFLHLVKIPTHRHIVGKSCPKPHRLNHMGICSCGLYGQPGVPVKWKR

SEQ ID NO: 174 - protein, 491 aa, Artificial Sequence
  derived and/or modified protein sequence (wt) from LASV(G1647-SLE-2011;Clade IV)__AIT17196__GPC
MGQIVTFFQEVPHVIEEVMNIVLIALSILAVLKGLYNLATCGLVGLVTFLLLCGRSCTTSLYKGVYELQTLELNMETLNMTMPLSCTKNNSHHYIMVGNETGLELTLTNTSIINHKFCNLSDAHKKNLYDHALMSIISTFHLSIPNFNQYEAMSCDFNGGKISVQYNLSHSYAGDAANHCGTVANGVLQTFMRMAWGGSYIALDSGRGRWDCIMTSYQYLIIQNTTWEDHCQFSRPSPIGYLGLLSQRTRDIYISRRLLGTFTWTLSDSEGKDTPGGYCLTRWMLIEAELKCFGNTAVAKCNEKHDEEFCDMLRLFDFNKQAIQRLKAEAQMNIQLINKAVNALINDQLIMKNHLRDIMGIPYCNYSKYWYLNHTTTGKTSLPRCWLVSNGSYLNETHFSDDIEQQADNMITEMLQKEYMERQGKTPLGLVDLFVFSTSFYLISIFLHLVKIPTHRHIVGKPCPKPHRLNHMGICSCGFYKQPGVPVKWKR

SEQ ID NO: 175 - protein, 491 aa, Artificial Sequence
  derived and/or modified protein sequence (wt) from LASV(G1774-SLE-2011;Clade IV)__AIT17204__GPC
MGQIVTFFQEVPHVIEEVMNIVLIALSILAVLKGLYNLATCGLVGLVTFLLLCGRSCTSSLYKGVYELQTLELNMETLNMTMPLSCTKNSSHHYIRVGNETGLELTLTNTSIINHKFCNLSDAHKKNLYDHALMSIISTFHLSIPNFNQYEAMSCDFNGGKISVQYNLSHSYAGDAANHCGTVANGVLQTFMRMAWGGSYIALDSGHDRWDCIMTSYQYLIIQNTTWEDHCQFSRPSPIGYLGLLSQRTRDIYISRRLLGTFTWTLSDSEGKDTPGGYCLTRWMLIEAELKCFGNTAVAKCNEKHDEEFCDMLRLFDFNKQAIQRLKAEAQMSIQLINKAVNALINDQLIMKNHLRDIMGIPYCNYSKYWYLNHTITGKTSLPKCWLVSNGSYLNKTHFSDDIEQQADNMITEMLQKEYMERQGKTPLGLVDLFVFSTSFYLISIFLHLIKIPTHRHIVGKPCPKPHRLNHMGICSCGLYKQPGVPVKWKR

SEQ ID NO: 176 - protein, 491 aa, Artificial Sequence
  derived and/or modified protein sequence (wt) from LASV(G1792-SLE-2011;Clade IV)__AIT17208__GPC
MGQIVTFFQEVPHVIEEVMNIVLIALSILAVLKGLYNFATCGLIGLVTFLLLCGRSCTTSLYKGVYELQTLELNMETLNMTMPLSCTKNNSHHYIMVGNETGLELTLTNTSIINHKFCNLSDAHKKNLYDHALMSIISTFHLSIPNFNQYEAMSCDFNGGKISVQYNLSHSYAGDAANHCGTVANGVLQTFMRMAWGGSYIALDSGRGQWDCIMTSYQYLIIQNTTWEDHCQFSRPSPIGYLGLLSQRTRDIYISRRLLGTFTWTLSDSEGKDTPGGYCLTRWMLIEAELKCFGNTAVAKCNEKHDEEFCDMLRLFDFNKQAIQRLKAEAQMSIQLINKAVNALINDQLIMKNHLRDIMGIPYCNYSKYWYLNHTTTGKTSLPKCWLVSNGSYLNETHFSDDIEQQADNMITEMLQKEYMERQGKTPLGLVDLFVFSTSFYLISIFLHLVKIPTHRHIVGKSCPKPHRLNHMGICSCGLYKQPGVPVKWKR

SEQ ID NO: 177 - protein, 491 aa, Artificial Sequence
  derived and/or modified protein sequence (wt) from LASV(G1897-SLE-2011;Clade IV)__AIT17210__GPC
MGQIVTFFQEVPHVIEEVMNIVLIALSILAVLKGLYNLATCGLVGLVTFLLLCGRSCTTSLYKGVYELQTLELNMETLNMTMPLSCTKNNSHHYIMVGNETGLELTLTNTSIINHKFCNLSDAHKKNLYDHALMSIISTFHLSIPNFNQYEAMSCDFNGGKISVQYNLSHSYAGDAANHCGTVANGVLQTFMRMAWGGSYIALDSGRDRWDCIMTSYQYLIIQNTTWEDHCQFSRPSPIGYLGLLSQRTRDIYISRRLLGTFTWTLSDSEGKDTPGGYCLTRWMLIEAELKCFGNTAVAKCNEKHDEEFCDMLRLFDFNKQAIQRLKAEAQMSIQLINKAVNALINDQLIMKNHLRDIMGIPYCNYSKYWYLNHTTTGKTSLPKCWLVSNGSYLNETHFSDDIEQQADNMITEMLQKEYMERQGKTPLGLVDLFVFSTSFYLISIFLRLVKIPTHRHIVGKPCPKPHRLNHMGICSCGLYKQPGVPVKWKR

SEQ ID NO: 178 - protein, 491 aa, Artificial Sequence
  derived and/or modified protein sequence (wt) from LASV(G1932-SLE-2011;Clade IV)__AIT17212__GPC
MGQIVTFFQEVPHVIEEVMNIVLIALSILAVLKGLYNLATCGLVGLVTFLLLCGRSCTTSLYKGVYELQTLELNMETLNMTMPLSCTKNNSHHYIMVGNETGLELTLTNTSIINHKFCNLSDAHRKNLYDHALMSIISTFHLSIPNFNQYEAMSCDFNGGKISVQYNLSHSYAGDAANHCGTVANGVLQTFMRMAWGGSYIALDSGRGKWDCIMTSYQYLIIQNTTWEDHCQFSRPSPIGYLGLLSQRTRDIYISRRLLGTFTWTLSDSEGKDTPGGYCLTRWMLIEAELKCFGNTAVAKCNEKHDEEFCDMLRLFDFNKQAIQRLKAEAQMSIQLINKAVNALINDQLIMKNHLRDIMGIPYCNYSKYWYLNHTTTGKTSLPRCWLVSNGSYLNETHFSDDIEQQADNMITEMLQKEYMERQGKTPLGLVDLFVFSTSFYLISIFLHLVKIPTHRHIVGKPCPKPHRLNHMGICSCGLYKQPGVPVKWKR

SEQ ID NO: 179 - protein, 491 aa, Artificial Sequence
  derived and/or modified protein sequence (wt) from LASV(G1959-SLE-2011;Clade IV)__AIT17216__GPC
MGQIVTFFQEVPHVIEEVMNIVLIALSILAVLKGLYNFATCGLVGLVTFLLLCGRSCTTSLYKGVYELQTLELNMETLNMTMPLSCTKNNSHHYIMVGNETGLELTLTNTSIINHKFCNLSDAHKKNLYDHALMSIISTFHLSIPNFNQYEAMSCDFNGGKISVQYNLSHSYAGDAANHCGTVANGVLQTFMRMAWGGSYIALDSGHGRWDCIMTSYQYLIIQNTTWEDHCQFSRPSPIGYLGLLSQRTRDIYISRRLLGTFTWTLSDSEGKDTPGGYCLTRWMLIEAELKCFGNTAVAKCNEKHDEEFCDMLRLFDFNKQAIQRLKAEAQMSIQLINKAVNALINDQLIMKNHLRDIMGIPYCNYSKYWYLNHTTTGKTSLPKCWLVSNGSYLNETHFSDDIEQQADNMITEMLQKEYMERQGKTPLGLVDLFVFSTSFYLISIFLHLVKIPTHRHIVGKPCPKPHRLNYMGICSCGLYKQPGVPVRWKR

SEQ ID NO: 180 - protein, 491 aa, Artificial Sequence
  derived and/or modified protein sequence (wt) from LASV(G2141-SLE-2011;Clade IV)__AIT17224__GPC
MGQIVTFFQEVPHVIEEVMNIVLIALSILAVLKGLYNVATCGLIGLVTFLLLCGRSCTTTLYKGVYELQALELNMETLNMTMPLSCTKNNSHHYIRVGNDTGLELTLTNTSIIQHKFCNLSDAHKKNLYDHTLMSIISTFHLSIPNFNQYEAMSCDFNGGKISVQYNLSHSYAGDAASHCGTVANGVLQTFMRMAWGGSYIALDSGRGNWDCIMTSYQYLIIQNTTWEDHCQFSRPSPIGYLGLLSQRTRDIYISRRLLGTFTWTLSDSEGRDTPGGYCLTRWMLIEAELKCFGNTAVAKCNEKHDEEFCDMLRLFDFNKQAIQRLKTEAQMSIQLINKAVNALINDQLIMKNHLRDIMGIPYCNYSKYWYLNNTITGKSSLPKCWLVSNGSYLNETHFSDDIEQEADNMITEMLQKEYMERQGKTPLGLVDLFVFSTSFYLISIFLHLVKIPTHRHIVGKPCPKPHRLNHMGVCSCGLYKQPGVPVRWKR

SEQ ID NO: 181 - protein, 491 aa, Artificial Sequence
  derived and/or modified protein sequence (wt) from LASV(G2147-SLE-2011;Clade IV)__AIT17228__GPC
MGQIVTFFQEVPHVIEEVMNIVLIALSILAVLKGLYNFATCGLVGLLTFLLLCGRSCTTSLYKGVYELQTLELNMETLNMTMPLSCTKNNSHHYIMVGNETGLELTLTNTSIIDHKFCNLSDAHKKNLYDHALMSIISTFHLSIPNFNQYEAMSCDFNGGKISVQYNLSHSYAGDAANHCGTVANGVLQTFMRMAWGGSYIALDSGRGGWDCIMTSYQYLIIQNTTWEDHCQFSRPSPIGYLGLLSQRTRDIYISRRLLGTFTWTLSDSEGKDTPGGYCLTRWMLIEAELKCFGNTAVAKCNEKHDEEFCDMLRLFDFNKQAIQRLKAEAQMSIQLINKAVNALINDQLIMKNHLRDIMGIPYCNYSKYWYLNHTTTGKTSLPKCWLVSNGSYLNETHFSDDIEQQADNMITEMLQKEYMERQGKTPLGLVDLFVFSTSFYLISIFLHLVKIPTHRHIVGKSCPKPHRLNHMGICSCGLYKQPGVPVKWKR

SEQ ID NO: 182 - protein, 491 aa, Artificial Sequence
  derived and/or modified protein sequence (wt) from LASV(G2165-SLE-2011;Clade IV)__AIT17232__GPC
MGQIVTFFQEVPHVIEEVMNIVLIALSILAVLKGLYNFATCGLVGLVTFLLLCGRSCTTSLYKGVYELQTLELNMETLNMTMPLSCTKNNSHHYIRVGNETGLELTLTNTSIINHKFCNLSDAHKKNLYDHALMSIISTFHLSIPNFNQYEAMSCDFNEGKISVQYNLSHSYAGDAANHCGTVANGVLQTFMRMAWGGSYIALDSGRGKWDCIMTSYQYLIIQNTTWEDHCQFSRPSPIGYLGLLSQRTRDIYISRRLLGTFTWTLSDSEGKDTPGGYCLTRWMLIEAELKCFGNTAVAKCNEKHDEEFCDMLRLFDFNKQAIERLKAEAQMSIQLINKAVNALINDQLIMKNHLRDIMGIPYCNYSKYWYLNHTTTGKTSLPKCWLVSNGSYLNETHFSDDIEQQADNMITEMLQKEYMERQGKTPLGLVDLFVFSTSFYLISIFLHLVKIPTHRHIVGKSCPKPHRLNHMGICSCGLYKQPGVPVKWKR

SEQ ID NO: 183 - protein, 491 aa, Artificial Sequence
  derived and/or modified protein sequence (wt) from LASV(G2184-SLE-2011;Clade IV)__AIT17236__GPC
MGQIVTFFQEVPHVIEEVMNIVLIALSILAVLKGLYNFATCGLVGLVTFLLLCGRSCTTSLYKGVYELQTLELNMETLNMTMPLSCTKNNSHHYIMVGNETGLELTLTNTSIINHKFCNLSDAHKKNLYDHALMSIISTFHLSIPNFNQYEAMSCDFNGGRISVQYNLSHSYAGEAANHCGTVANGVLQTFMRMAWGGSYIALDSGRGKWDCIMTSYQYLIIQNTTWEDHCQFSRPSPIGYLGLLSQRTRDIYISRRLLGTFTWTLSDSEGKDTPGGYCLTRWMLIEAELKCFGNTAVAKCNEKHDEEFCDMLRLFDFNKQAIQRLKAEAQMSIQLINKAVNALINDQLIMKNHLRDIMGIPYCNYSRYWYLNHTTTGKTSLPKCWLVSNGSYLNETHFSDDIEQQADNMITEMLQKEYMERQGKTPLGLVDLFVFSTSFYLISIFLHLVKIPTHRHIVGKSCPKPHRLNHMGICSCGLYKQPGVPVKWKR

SEQ ID NO: 184 - protein, 491 aa, Artificial Sequence
  derived and/or modified protein sequence (wt) from LASV(G2197-SLE-2011;Clade IV)__AIT17240__GPC
MGQIVTFFQEVPHVIEEVMNIVLIALSILAVLKGLYNLATCGLVGLVTFLLLCGRSCTTSLYKGFYELQTLELNMETLNMTMPLSCTKNNSHHYIRVGNETGLELTLTNTSIIDHKFCNLSDAHKKNLYDHALMSIISTFHLSIPNFNQYEAMSCDFNGGKISVQYNLSHSYAGDAANHCGTVANGVLQTFMRMAWGGSYIALDSGRGRWDCIMTSYQYLIIQNTTWEDHCQFSRPSPIGYLGLLSQKTRDIYISRRLLGTFTWTLSDSEGKDTPGGYCLTRWMLIEAELKCFGNTAVAKCNEKHDEEFCDMLRLFDFNKQAIQRLKAEAQMSIQLINKAVNALINDQLIMKNHLRDIMGIPYCNYSKYWYLNHTTTGKTSLPKCWLVSNGSYLNETHFSDDIEQQADNMITEMLQKEYMERQGKTPLGLVDLFVFSTSFYLISIFLHLVKIPTHRHIVGKSCPKPHRLNHMGICSCGLYKQPGVPVKWKR

SEQ ID NO: 185 - protein, 491 aa, Artificial Sequence
  derived and/or modified protein sequence (wt) from LASV(G2222-SLE-2011;Clade IV)__AIT17244__GPC
MGQIVTFFQEVPHVIEEVMNIVLIALSILAVLKGLYNLATCGLVGLVTFLLLCGRSCTTNLYKGVYELQTLELNMETLNMTMPLSCTKNSSHHYIRVGNETGLELTLTNTSIIDHKFCNLSDAHKKNLYDHALMSIISTFHLSIPNFNQYEAMSCDFNGGKISVQYNLSHSYVGDAADHCGTVANGVLQTFMRMAWGGSYIALDSGRGKWDCIITSYQYLIIQNTTWEDHCQFSRPSPIGYLGLLSQRTRDIYISRRLLGTFTWTLSDSEGKDTPGGYCLTRWMLIEAELKCFGNTAVAKCNEKHDEEFCDMLRLFDFNKQAIQRLKAEAQMSIQLINKAVNALINDQLIMKNHLRDIMGIPYCNYSKYWYLNHTITGKTSLPRCWLVSNGSYLNETRFSDDIEQQADNMITEMLQKEYMERQGKTPLGLVDLFVFSTSFYLISIFLHLVKIPTHRHIVGKPCPKPHRLNHMGICSCGLYKQPGVPVKWKR

SEQ ID NO: 186 - protein, 491 aa, Artificial Sequence
  derived and/or modified protein sequence (wt) from LASV(G2230-SLE-2012;Clade IV)__AIT17246__GPC
MGQIVTFFQEVPHVIEEVMNIVLIALSLLAVLKGLYNVATCGLIGLITFLLLCGRSCTTNLYKGVYELQTLELNMETLNMTMPLSCTKNSSHHYIMVGNETGLELTLTNTSIINHKFCNLSDAHKKNLYDHTLMSIISTFHLSIPNFNQYEAMSCDFNGGKISVQYNLSHSYAVDAANHCGTVANGILQTFMRMAWGGSYIALDSGRGNWDCIMTSYQYLIIQNTTWEDHCQFSRPSPIGYLGLLSQRTRDIYISRRLLGTFTWTLSDSEGNDTPGGYCLTRWMLIEAELKCFGNTAVAKCNEKHDEEFCDMLRLFDFNKQAIQRLKAEAQMSIQLINKAVNALINDQLIMKNHLRDIMGIPYCNYSKYWYLNHTTTGKTSLPKCWLVSNGSYLNETHFSDDIEQQADNMITEMLQKEYMERQGKTPLGLVDLFVFSTSFYLISIFLHLVKIPTHRHIVGKPCPKPHRLNHMGICSCGLYKQPGVPVRWKR

SEQ ID NO: 187 - protein, 491 aa, Artificial Sequence
  derived and/or modified protein sequence (wt) from LASV(G2259-SLE-2012;Clade IV)__AIT17250__GPC
MGQIVTFFQEVPHVIEEVMNIVLIALSLLAVLKGLYNVATCGLIGLVTFLLLCGRSCTTNLYKGVYELQTLELNMETLNMTMPLSCTKNNSHHYIMVGNETGLELTLTNTSIINHKFCNLSDAHKKNLYDHTLMSIISTFHLSIPNFNQYEAMSCDFNGGKISVQYNLSHSYAVDAANHCGTVANGVLQTFMRMAWGGSYIALDSGRGNWDCIMTSYQYLIIQNTTWEDHCQFSRPSPIGYLGLLSQRTRDIYISRRLLGTFTWTLSDSEGNDTPGGYCLTRWMLIEAELKCFGNTAVAKCNEKHDEEFCDMLRLFDFNKQAIQRLKAEAQMSIQLINKAVNALINDQLIMKNHLRDIMGIPYCNYSKYWYLNHTTTGKTSLPKCWLVSNGSYLNETHFSDDIEQQADNMITEMLQKEYMERQGKTPLGLVDLFVFSTSFYLISIFLHLVKIPTHRHIVGKPCPKPHRLNHMGICSCGLYKQPGVPVRWKR

SEQ ID NO: 188 - protein, 491 aa, Artificial Sequence
  derived and/or modified protein sequence (wt) from LASV(G2263-SLE-2012;Clade IV)__AIT17254__GPC
MGQIVTFFQEVPHVIEEVMNIVLIALSILAVLKGLYNFATCGIVGLVTFLLLCGRSCTTSLYKGVYELQTLELNMETLNMTMPLSCTKNNSHHYIMVGNETGLELTLTNTSIINHKFCNLSDAHKKNLYDHALMSIISTFHLSIPNFNQYEAMSCDFNGGKISVQYNLSHSYAGDAANHCGTVANGVLQTFMRMAWGGSYIALDSGRDRWDCIMTSYQYLIIQNTTWEDHCQFSRPSPIGYLGLLSQRTRDIYISRRLLGTFTWTLSDSEGKNTPGGYCLTRWMLIEAELKCFGNTAVAKCNEKHDEEFCDMLRLFDFNKQAIQRLKAEAQMSISLINKAVNALINDQLIMKNHLRDIMGIPYCNYSKYWYLNHTTTGKTSLPRCWLVSNGSYLNETHFSDDIEQQADNMITEMLQKEYMDRQGKTPLGLVDLFVFSTSFYLISIFLHLVKIPTHRHIVGKTCPKPHRLNHMGICSCGLYKQPGVPVKWKR

SEQ ID NO: 189 - protein, 491 aa, Artificial Sequence
  derived and/or modified protein sequence (wt) from LASV(G2280-SLE-2012;Clade IV)__AIT17258__GPC
MGQIVTFFQEVPHVIEEVMNIVLIALSILAVLKGLYNIATCGLVGLVTFLLLCGRSCTTSLYKGVYELQTLELNMETLNMTMPLSCTKNNSHHYIMVGNETGLELTLTNTSIINHKFCNLSDAHKKNLYDHALMSIVSTFHLSIPNFNQYEAMSCDFNGGKISVQYNLSHSYAVDAANHCGTVANGVLQTFMRMAWGGSYIALDSGRGGWDCIMTSYQYLIIQNVTWEDHCQFSRPSPIGYLGLLSQRTRDVYISRRLLGTFTWTLSDSEGNDTPGGYCLTRWMLIEAELKCFGNTAVAKCNEKHDEEFCDMLRLFDFNKQAIQRLKAEAQMSIQLINKAVNALINDQLIMKNHLRDIMGIPYCNYSKYWYLNHTTTGKTSLPKCWLVSNGSYLNETHFSDDIEQQADNMITEMLQKEYMERQGKTPLGLVDLFVFSTSFYLISIFLHLVKIPTHRHIVGKPCPKPHRLNHMGICSCGLYKQPGVPVKWKR

SEQ ID NO: 190 - protein, 491 aa, Artificial Sequence
  derived and/or modified protein sequence (wt) from LASV(G2295-SLE-2012;Clade IV)__AIT17262__GPC
MGQIVTFFQEVPHVIEEVMNIVLIALSILAVLKGLYNLATCGLVGLVTFLLLCGRSCTTSLYKGVYELQTLELNMETLNMTMPLSCTKNNSHHYIMVGNETGLELTLTNTSIINHKFCNLSDAHKKNLYDHALMSIISTFHLSIPNFNQYEAMSCDFNGGKISVQYNLSHSYAGDAATHCGTVANGVLQTFMRMAWGGSYIALDSGRGKWDCIMTSYQYLIIQNTTWEDHCQFSRPSPIGYLGLLSQRTRDIYISRRLLGTFTWTLSDSEGKDTPGGYCLTRWMLIEAELKCFGNTAVAKCNEKHDEEFCDMLRLFDFNKQAIQRLKTEAQMSIQLINKAVNALINDQLIMKNHLRDIMGIPYCNYSKYWYLNHTTTGKTSLPRCWLVSNGSYLNETHFSDDIEQQADNMITEMLQKEYMERQGKTPLGLVDLFVFSTSFYLISIFLHLVKIPTHRHIVGKPCPKPHRLNHMGICSCGLYKQPGVPVKWKR

SEQ ID NO: 191 - protein, 491 aa, Artificial Sequence
  derived and/or modified protein sequence (wt) from LASV(G2315-SLE-2012;Clade IV)__AIT17266__GPC
MGQIVTFFQEVPHVIEEVMNIVLIALSILAVLKGLYNLATCGLVGLVTFLLLCGRSCTTSLYKGVYELQTLELNMETLNMTMPLSCTKNNSHHYIMVGNETGLELTLTNTSLINHKFCNLSDAHKKNLYDHALMSIISTFHLSIPNFNQYEAMSCDFNGGKISVQYNLSHSYAVDAANHCGTVANGVLQTFMRMAWGGSYIALDSGRGGWDCIMTSYQYLIIQNTTWEDHCQFSRPSPIGYLGLLSQRTRDIYISRRLLGTFTWTLSDSEGKDTPGGYCLTRWMLIEAELKCFGNTAVAKCNEKHDEEFCDMLRLFDFNKQAIQRLKAEAQMSIQLINKAVNALINDQLIMKNHLRDIMGIPYCNYSKYWYLNHTTTGRTSLPRCWLVSNGSYLNETHFSDDIEQQADNMITEMLQKEYMERQGKTPLGLVDLFVFSTSFYLISIFLHLVKIPTHRHIVGKSCPKPHRLNHMGICSCGLYKQPGVPVKWKR

SEQ ID NO: 192 - protein, 491 aa, Artificial Sequence
  derived and/or modified protein sequence (wt) from LASV(G2318-SLE-2012;Clade IV)__AIT17270__GPC
MGQIVTFFQEVPHVIEEVMNIVLIALSVLAVLKGLYNFATCGLVGLVTFLLLCGRSCSTSVYKGVYELQTLELNMETLNMTMPLSCTKNNSHHYIMVGNETGLELTLTNTSIINHKFCNLSDAHKKNLYDHALMSIISTFHLSIPNFNQYEAMSCDFNGGKISVQYNLSHSYAVDAANHCGTVANGVLQTFMRMAWGGSYIALDSGHGGWDCIMTNYQYLIIQNTTWEDHCQFSRPSPIGYLGLLSQRTRDIYISRRLLGTFTWTLSDSEGKDTPGGYCLTRWMLIEAELKCFGNTAVAKCNEKHDEEFCDMLRLFDFNKQAIQRLKAEAQMSIQLINKAVNALINDQLIMKNHLRDIMGIPYCNYSKYWYLNHTTTGRTSLPKCWLVSNGSYLNETHFSDDIEQQADNMITEMLQREYMERQGKTPLGLVDLFVFSTSFYLISIFLHLVKIPTHRHIVGKSCPKPHRLNHMGICSCGLYKQPGVPVKWKR

SEQ ID NO: 193 - protein, 491 aa, Artificial Sequence
  derived and/or modified protein sequence (wt) from LASV(G2363-SLE-2012;Clade IV)__AIT17274__GPC
MGQIVTFFQEVPHVIEEVMNIVLIALSILAVLKGLYNVATCGLTGLVAFLLLCGRSCTTTLYKGVYELQALELNMETLNMTMPLSCTKNNSHHYIRVGNETGLELTLTNTSIIEHRFCNLSDAHKKNLYDHALMSIISTFHLSIPNFNQYEAMSCDFNGGKISVQYNLSHSYAVDAANHCGTVANGVLQTFMRMAWGGSYIALDSGRNGWDCIMTSYQYLIIQNTTWEDHCQFSRPSPIGYLGLLSQRTRDIYISRRLLGTFTWTLSDSEGKDTPGGYCLTRWMLIEAELKCFGNTAVAKCNEKHDEEFCDMLRLFDFNKQAIQRLKAEAQMSIQLINKAVNALINDQLIMKNHLRDIMGIPYCNYSKYWYLNNTATGKTSLPRCWLVSNGSYLNETHFSDDIEQQADNMITEMLQKEYMERQGKTPLGLVDLFVFSTSFYLISIFLHLVKIPTHRHIVGKPCPKPHRLNHMGICSCGLYKQPGAPVRWKR

SEQ ID NO: 194 - protein, 491 aa, Artificial Sequence
  derived and/or modified protein sequence (wt) from LASV(G2384-SLE-2012;Clade IV)__AIT17276__GPC
MGQIVTFFQEVPHVIEEVMNIVLIALSILAVLKGLYNFATCGLVGLVTFLLLCGRSCTTSLYKGVYELQTLELNMETLNMTMPLSCTKNNSHHYIMVGNETGLELTLTNTSIINHKFCNLSDAHKKNLYDHALMSIISTFHLSIPNFNQYEAMSCDFNGGKISVQYNLSHSYAGDAANHCGTVANGVLQTFMRMAWGGSYIALDSGHGKWDCIMTSYQYLIIQNTTWEDHCQFSRPSPIGYLGLLSQRTRDIYISRRLLGTFTWTLSDSEGKDTPGGYCLTRWMLIEAELKCFGNTAVAKCNEKHDEEFCDMLRLFDFNKQAIQRLKAEAQMSIQLINKAVNALINDQLIMKNHLRDIMGIPYCNYSKYWYLNHTTTGKTSLPKCWLVSNGSYLNETHFSDDIEQQADNMITEMLQKEYMERQGKTPLGLVDLFVFSTSFYLISIFLHLVKIPTHRHIVGKSCPKPHRLNHMGICSCGLYKQPGVPVRWKR

SEQ ID NO: 195 - protein, 490 aa, Artificial Sequence
  derived and/or modified protein sequence (wt) from LASV(G2392-SLE-2012;Clade IV)__AIT17280__GPC
MGQIVTFFQEVPHVIEEVMNIVLIALSILAVLKGLYNFATCGLVGLVTFLLLCGRSCTTSLYKGVYELQTLELNMETLNMTMPLSCTKNNSHHYIRVGNETGLELTLTNTSIIDHKFCNLSDAHKKNLYDHALMSIISTFHLSIPNFNQYEAMSCDFNGGKISVQYNLSHSYAGDAANHCGTVANGVLQTFMRMAWGGSYIALDSGHEWDCIMTSYQYLIIQNTTWDNHCQFSRPSPIGYLGLLSQRTRDIYISRRLLGTFTWTLSDSEGKDTPGGYCLTRWMLIEAELKCFGNTAVAKCNEKHDEEFCDMLRLFDFNKQAIQRLKVEAQMSIQLINKAVNALINDQLIMKNHLRDIMGIPYCNYSKYWYLNHTTTGKTSLPKCWLVSNGSYLNETHFSDDIEQQADNMITEMLQKEYMERQGKTPLGLVDLFVFSTSFYLISIFLHLVKIPTHRHIVGKSCPKPHRLNHMGICSCGFYKQPGVPVKWKR

SEQ ID NO: 196 - protein, 491 aa, Artificial Sequence
  derived and/or modified protein sequence (wt) from LASV(G2405-SLE-2012;Clade IV)__AIT17284__GPC
MGQIVTFFQEVPHVIEEVMNIVLIALSVLAVLKGLYNFATCGIVGLVTFLLLCGRSCTTSLYKGVYELQTLELNMETLNMTMPLSCTKNNSHHYIMVGNDTGLELTLTNTSIINHKFCNLSDAHKKNLYDHALMSIISTFHLSIPNFNQYEAMSCDFNGGKISVQYNLSHSYAGDAADHCGTVANGVLQTFMRMAWGGSYIALDSGRGRWDCIMTSYQYLIIQNTTWEDHCQFSRPSPIGYLGLLSQRTRDIYISRRLLGTFTWTLSDSEGKDTPGGYCLTRWMLIEAELKCFGNTAVAKCNEKHDEEFCDMLRLFDFNKQAIQRLKAEAQMSIQLINKAVNALINDQLIMKNHLRDIMGIPYCNYSKYWYLNHTTTGKTSLPKCWLVSNGSYLNETHFSDDIEQQADNMITEMLQKEYMERQGKTPLGLVDLFVFSTSFYLISIFLHLVKIPTHRHIVGKPCPKPHRLNHMGICSCGLYKQPGVPVKWKR

SEQ ID NO: 197 - protein, 491 aa, Artificial Sequence
  derived and/or modified protein sequence (wt) from LASV(G2427-SLE-2012;Clade IV)__AIT17288__GPC
MGQIVTFFQEVPHVIEEVMNIVLIALSILAVLKGLYNFATCGLVGLVTFLLLCGRSCTTSLYKGVYELQTLELNMETLNMTMPLSCTKNNSHHYIMVGNETGLELTLTNTSIINHKFCNLSDAHKKNLYDHALMSIISTFHLSIPNFNQYEAMSCDFNGGKISVQYNLSHSYAVDAANHCGTVANGVLQTFMRMAWGGGYIALDSGRGNWDCIMTSYQYLIIQNTTWEDHCQFSRPSPIGYLGLLSQRTRDIYISRRLLGTFTWTLSDSEGKDTPGGYCLTRWMLIEAELKCFGNTAVAKCNEKHDEEFCDMLRLFDFNKQAIQRLKAEAQMSIQLINKAVNALINDQLIMKNHLRDIMGIPYCNYSKYWYLNHTVTGKTSLPKCWLVSNGSYLNETHFSDDIEQQADNMITEMLQKEYMERQGKTPLGLVDLFVFSTSFYLISIFLHLVKIPTHRHIVGKSCPKPHRLNHMGICSCGLYKQPGVPVRWKR

SEQ ID NO: 198 - protein, 491 aa, Artificial Sequence
  derived and/or modified protein sequence (wt) from LASV(G2431-SLE-2012;Clade IV)__AIT17292__GPC
MGQIVTFFQEVPHVIEEVMNIVLIALSIMAVLKGLYNIATCGLVGLVTFLLLCGRSCTTTLYKGVYELQTLELNMETLNMTMPLSCTKNNSHHYIMVGNETGLELTLTNTSIINHKFCNLSDAHKKNLYDHALMSIISTFHLSIPNFNQYEAMSCDFNGGKISVQYNLSHSYAGDAANHCGTVANGVLQTFMRMAWGGSYIALDSGHGGWDCIMTSYQYLIIQNTTWEDHCQFTRPSPIGYLGLLSQRTRDIYISRRLLGTFTWTLSDSEGNDTPGGYCLTRWMLIEAELKCFGNTAVAKCNEKHDEEFCDMLRLFDFNKQAIQRLRAEAQMSIQLINKAVNALINDQLIMKNHLRDIMGIPYCNYSKYWYLNHTTTGRTSLPRCWLVSNGSYLNETHFSDDIEQQADNMITEMLQKEYMERQGKTPLGLVDLFVFSTSFYLISIFLHLIKIPTHRHIVGKPCPKPHRLNHMGVCSCGLYKQPGVPVRWKR

SEQ ID NO: 199 - protein, 491 aa, Artificial Sequence
  derived and/or modified protein sequence (wt) from LASV(G2511-SLE-2012;Clade IV)__AIT17294__GPC
MGQIVTFFQEVPHVIEEVMNIVLIALSILAVLKGLYNLATCGLVGLVTFLLLCGRSCTTSLYKGVYELQTLELNMETLNMTMPLSCTKNNSHHYIMVGNETGLELTLTNTSIIDHKFCNLSDAHKKNLYDHALMSIISTFHLSIPNFNQYEAMSCDFNGGKISVQYNLSHSYAGDAANHCGTVANGVLQTFMRMAWGGSYIALDSGRGGWDCIMTSYQYLIIQNTTWEDHCQFSRPSPVGYLGLLSQRTRDIYISRRLLGTFTWTLSDSEGKDTPGGYCLTRWMLIEAELKCFGNTAVAKCNEKHDEEFCDMLRLFDFNKQAIQRLKTEAQMSIQLINKAVNALINDQLIMKNHLRDIMGIPYCNYSKYWYLNHTTTGKTSLPRCWLVSNGSYLNETHFSDDIEQQADNMITEMLQKEYMERQGKTPLGLVDLFVFSTSFYLISIFLHLVKIPTHRHIVGKPCPKPHRLNHMGICSCGLYKQPGVPVKWKR

SEQ ID NO: 200 - protein, 491 aa, Artificial Sequence
  derived and/or modified protein sequence (wt) from LASV(G2554-SLE-2012;Clade IV)__AIT17298__GPC
MGQIVTFFQEVPHVIEEVMNIVLIALSILAVLKGLYNIATCGLLGLVCFLLLCGRSCTTSLYKGVYELQTLELNMETLNMTMPLSCTKNNSHHYIMVGNETGLELTLTNTSIINHKFCNLSDAHKKNLYDHALMSIISTFHLSIPNFNQYEAMSCDFNGGKISVQYNLSHSYAVDAASHCGTIANGVLQTFMRMAWGGSYIALDSGHGGWDCIMTSYQYLIIQNTTWEDHCQFSRPSPIGYLGLLSQRTRDIYISRRLLGTFTWTLSDSEGKDTPGGYCLTRWMLIEAELKCFGNTAVAKCNEKHDEEFCDMLRLFDFNKQAIQRLKAEAQMSIQLINKAVNALINDQLIMKNHLRDIMGIPYCNYSKYWYLNHTTTGKTSLPKCWLVSNGSYLNETHFSDDIEQQADNMITEMLQKEYMERQGKTPLGLVDLFVFSTSFYLISIFLHLVKIPTHRHVVGKPCPKPHRLNHMGICSCGLYGQPGVPVKWKR

SEQ ID NO: 201 - protein, 491 aa, Artificial Sequence
  derived and/or modified protein sequence (wt) from LASV(G2557-SLE-2012;Clade IV)__AIT17302__GPC
MGQIVTFFQEVPHVIEEVMNIVLIALSLLAVLKGLYNVATCGLIGLVTFLLLCGRSCTTNLYKGVYELQTLELNMETLNMTMPLSCTKNNSHHYIMVGNETGLELTLTNTSIISHKFCNLSDAHKKNLYDHTLMSIISTFHLSIPNFNQYEAMSCDFNGGKISVQYNLSHSYAVDAANHCGTVANGVLQTFMRMAWGGSYIALDSGRGNWDCIMTSYQYLIIQNTTWEDHCQFSRPSPIGYLGLLSQRTRDIYISRRLLGTFTWTLSDSEGNDTPGGYCLTRWMLIEAELKCFGNTAVAKCNEKHDEEFCDMLRLFDFNKQAIQRLKAEAQMSIQLINKAVNALINDQLIMKNHLRDIMGIPYCNYSKYWYLNHTTTGKTSLPKCWLVSNGSYLNETHFSDDIEQQADNMITEMLQKEYMERQGKTPLGLVDLFVFSTSFYLISIFLHLVKIPTHRHIVGKPCPKPHRLNHMGICSCGLYKQPGVPVRWKR

SEQ ID NO: 202 - protein, 491 aa, Artificial Sequence
  derived and/or modified protein sequence (wt) from LASV(G2587-SLE-2012;Clade IV)__AIT17310__GPC
MGQIVTFFQEVPHVIEEVMNIVLIALSILAVLKGLYNLATCGLVGLVTFLLLCGRSCTTSLYKGVYELQTLELNMETLNMTMPLSCTKNNSHHYIMVGNETGLELTLTNTSIINHKFCNLSDAHKKNLYDHALMSIISTFHLSIPNFNQYEAMSCDFNGGKISVQYNLSHSYAGDAATHCGTVANGVLQTFMRMAWGGSYIALDSGRGKWDCIMTSYQYLIIQNTTWEDHCQFSRPSPIGYLGLLSQRTRDIYISRRLLGTFTWTLSDSEGKDTPGGYCLTRWMLIEAELKCFGNTAVAKCNEKHDEEFCDMLRLFDFNKQAIQRLKTEAQMSIQLINKAVNALINDQLIMKNHLRDIMGIPYCNYSKYWYLNHTTTGKTSLPRCWLVSNGSYLNETHFSDDIEQQADNMITEMLQKEYMERQGKTPLGLVDLFVFSTSFYLISIFLHLVKIPTHRHIVGKPCPKPHRLNYMGICSCGLYKQPGVPVKWKR

SEQ ID NO: 203 - protein, 491 aa, Artificial Sequence
  derived and/or modified protein sequence (wt) from LASV(G2612-SLE-2012;Clade IV)__AIT17314__GPC
MGQIVTFFQEVPHVIEEVMNIVLITLSILAVLKGLYNVATCGLVGLVTFLLLCGRSCTTSLYKGVYELQTLELNMETLNMTMPLSCTKNNSHHYIMVGNETGLELTLTNTSIINHKFCNLSDAHKKDLYDHALMSIISTFHLSIPNFNQYEAMSCDFNGGKISVQYNLSHSYAVDAANHCGTVANGVLQTFMRMAWGGSYIALDSGRGGWDCIMTSYQYLIIQNTTWEDHCQFSRPSPIGYLGLLSQRTRDIYISRRLLGTFTWTLSDSEGNDTPGGYCLTRWMLIEAELKCFGNTAVAKCNEKHDEEFCDMLRLFDFNKQAIQRLKAEAQMSIQLINKAVNALINDQLIMKNHLRDIMGIPYCNYSKYWYLNHTTTGKTSLPKCWLVSNGSYLNETHFSDDIEQQADNMITEMLQKEYMERQGKTPLGLVDLFVFSTSFYLISIFLHLVKIPTHRHIVGKPCPKPHRLNHMGICSCGLYKQPGVPVKWKR

SEQ ID NO: 204 - protein, 491 aa, Artificial Sequence
  derived and/or modified protein sequence (wt) from LASV(G2615-SLE-2012;Clade IV)__AIT17318__GPC
MGQIVTFFQEVPHVIEEVMNIVLIALSLLAVLKGLYNVATCGLIGLVTFLLLCGRSCTTNLYKGVYELQTLELNMETLNMTMPLSCTKNNSHHYIMVGNETGLELTLTNTSIINHKFCNLSDAHKKNLYDHALMSIISTFHLSIPNFNQYEAMSCDFNGGKISVQYNLSHSYAVDAANHCGTVANGVLQTFMRMAWGGSYIALDSGRGNWDCIMTSYQYLIIQNITWEDHCQFSRPSPIGYLGLLSQRTRDIYISRRLLGTFTWTLSDSEGNDTPGGYCLTRWMLIEAELKCFGNTAVAKCNEKHDEEFCDMLRLFDFNKQAIQRLKAEAQMSIQLINKAVNALINDQLIMKNHLRDIMGIPYCNYSKYWYLNHTTTGKTSLPKCWLVSNGSYLNETHFSDDIEQQADNMITEMLQKEYMERQGKTPLGLVDLFVFSTSFYLISIFLHLVKIPTHRHIVGKPCPKPHRLNHMGICSCGLYKQPGVPVRWKR

SEQ ID NO: 205 - protein, 491 aa, Artificial Sequence
  derived and/or modified protein sequence (wt) from LASV(G2723-SLE-2012;Clade IV)__AIT17322__GPC
MGQIVTFFQEVPHVIEEVMNIVLIALSLLAVLKGLYNVATCGLIGLVTFLLLCGRSCTTNLYKGAYELQTLELNMETLNMTMPLSCTKNNSHHYIMVGNETGLELTLTNTSIINHKFCNLSDAHKKNLYDHTLMSIISTFHLSIPNFNQYEAMSCDFNGGKISVQYNLSHSYAVDAANHCGTVANGVLQTFMRMAWGGSYIALDSGRGNWDCIMTSYQYLIIQNTTWEDHCQFSRPSPIGYLGLLSQRTRDIYISRRLLGTFTWTLSDSEGNDTPGGYCLTRWMLIEAELKCFGNTAVAKCNEKHDEEFCDMLRLFDFNKQAIQRLKAEAQMSIQLINKAVNALINDQLIMKNHLRDIMGIPYCNYSKYWYLNHTTTGKTSLPKCWLVSNGSYLNETHFSDDIEQQADNMITEMLQKEYMERQGKTPLGLVDLFVFSTSFYLISIFLHLVKIPTHRHIVGKPCPKPHRLNHMGICSCGLYKQPGVPVRWKR

SEQ ID NO: 206 - protein, 491 aa, Artificial Sequence
  derived and/or modified protein sequence (wt) from LASV(G2868-SLE-2012;Clade IV)__AIT17328__GPC
MGQIVTFFQEVPHVIEEVMNIVLITLSILAVLKGLYNIATCGLVGLVTFLLLCGKSCTTSLYKGVYELQTLELNMETLNMTMPLSCTKNNSHHYIRVGNETGLELTLTNTSIINHKFCNLSDAHKKNLYDHALMSIISTFHLSIPNFNQYEAMSCDFNGGKISVQYNLSHSYAVDAANHCGTVANGVLQTFMRMAWGGSYIALDSGHGNWDCIMTSYQYLIIQNTTWEDHCQFSRPSPIGYLGLLSQRTRDIYISRRLLGTFTWTLSDSEGNDAPGGYCLTRWMLIEAELKCFGNTAVAKCNEKHDEEFCDMLRLFDFNKQAIQRLKAEAQMSIQLINKAVNALINDQLIMKNHLRDIMGIPYCNYSKYWYLNHTTTGKTSLPKCWLVSNGSYLNETHFSDDIEQQADNMITEMLQKEYMERQGKTPLGLVDLFVFSTSFYLISIFLHLVKIPTHRHVVGKSCPKPHRLNHMGICSCGLYKQPGVPVKWKR

SEQ ID NO: 207 - protein, 491 aa, Artificial Sequence
  derived and/or modified protein sequence (wt) from LASV(G2903-SLE-2012;Clade IV)__AIT17332__GPC
MGQIVTFFQEVPHVIEEVMNIVLIALSILAVLKGLYNLATCGLVGLVTFLLLCGRSCTTSLYKGVYELQTLELNMETLNMTMPLSCTKNNSHHYIRVGNETGLELTLTNTSIINHKFCNLSDAHKKNLYDHALMSIISTFHLSIPNFNQYEAMSCDFNGGKISVQYNLSHSYAVDAANHCGTVANGVLQTFMRMAWGGSYIALDSGHGRWDCIMTSYQYLIIQNTTWEDHCLFSRPSPIGYLGLLSQRTRDIYISRRLLGTFTWTLSDSEGRDTPGGYCLTRWMLIEAELKCFGNTAVAKCNEKHDEEFCDMLRLFDFNKQAIQRLKAEAQMSIQLINKAVNALINDQLIMKNHLRDIMGIPYCNYSKYWYLNHTTTGRTSLPRCWLVSNGSYLNETHFSDDIEQQADNMITEMLQKEYMERQGKTPLGLVDLFVFSTSFYLISIFLHLVKIPTHRHIVGKSCPKPHRLNHMGICSCGLYKQPGVPVKWKR

SEQ ID NO: 208 - protein, 491 aa, Artificial Sequence
  derived and/or modified protein sequence (wt) from LASV(G2944-SLE-2012;Clade IV)__AIT17340__GPC
MGQIVTFFQEVPHVIEEVMNIVLIALSILAVLKGLYNFATCGLVGLVTFLLLCGRSCTTSLYKGVYELQTLELNMETLNMTMPLSCTKNNSHHYIMVGNETGLELTLTNISIINHKFCNLSDAHKKNLYDHALMSIISTFHLSIPNFNQYEAMSCDFNGGKISVQYNLSHSYAGDAANHCGTVANGVLQTFMRMAWGGSYIALDSGRGEWDCIMTSYQYLIIQNTTWEDHCQFSRPSPIGYLGLLSQRTRDIYISRRLLGTFTWTLSDSEGKDTPGGYCLTRWMLIEAELKCFGNTAVAKCNEKHDEEFCDMLRLFDFNKQAIQRLKAEAQMSIQLINKAVNALINDQLIMKNHLRDIMGIPYCNYSKYWYLNHTTTGKTSLPKCWLVSNGSYLNETHFSDDIEQQADNMITEMLQKEYMERQGKTPLGLVDLFVFSTSFYLISIFLHLVKIPTHRHIVGKPCPRPHRLNHMGICSCGLYKQPGVPVKWKR

SEQ ID NO: 209 - protein, 491 aa, Artificial Sequence
  derived and/or modified protein sequence (wt) from LASV(G3010-SLE-2013;Clade IV)__AIT17344__GPC
MGQIVTFFQEVPHVIEEVMNIVLIALSILAVLKGLYNFATCGLVGLVTFLLLCGRSCTTSLYKGVYELQTLELNMETLNMTMPLSCTKNNSHHYIMVGNETGLELTLTNTSIINHKFCNLSDAHKKNLYNHALMSIISTFHLSIPNFNQYEAMSCDFNGGKISVQYNLSHSYAGDAASHCGTVANGVLQTFMRMAWGGSYIALDSGYGKWDCIMTSYQYLIIQNTTWEDHCQFSRPSPIGYLGLLSQRTRDIYISRRLLGTFTWTLSDSEGKDTPGGYCLTRWMLIEAELKCFGNTAVAKCNEKHDEEFCDMLRLFDFNKQAIQRLKTEAQMSIQLINKAVNALINDQLIMKNHLRDIMGIPYCNYSKYWYLNHTTTGKTSLPKCWLVSNGSYLNETHFSDDIEQQADNMITEMLQKEYMERQGKTPLGLVDLFVFSTSFYLISIFLHLVKIPTHRHIVGKSCPKPHRLNHMGICSCGLYKQPGVPVRWKR

SEQ ID NO: 210 - protein, 491 aa, Artificial Sequence
  derived and/or modified protein sequence (wt) from LASV(G3016-SLE-2013;Clade IV)__AIT17348__GPC
MGQIVTFFQEVPHVIEEVMNIVLIALSILAVLKGLYNIATCGLIGLVTFLLLCGRSCTTSLYKGVYELQTLELNMETLNMTMPLSCTKNNSHHYIMVGNETGLELTLTNTSIINHKFCNLSDAHKKNLYDHALMSIISTFHLSIPNFNQYEAMSCDFNGGKISVQYNLSHSYAGDAANHCGTVANGVLQTFMRMAWGGSYIALDSGRGRWDCIMTSYQYLIIQNTTWEDHCQFSRPSPIGYLGLLSQRTRDIYISRRLLGTFTWTLSDSEGNDTPGGYCLTRWMLIEAELKCFGNTAVAKCNEKHDEEFCDMLRLFDFNKQAIQRLKAEAQMSIQLINKAVNALINDQLIMKNHLRDIMGIPYCNYSKYWYLNHTTTGKTSLPKCWLVSNGSYLNETHFSDDIEQQADNMITEMLQKEYMERQGKTPLGLVDLFVFSTSFYLISIFLHLVKIPTHRHIVGKPCPKPHRLNHMGICSCGLYKQPGVPVKWKR

SEQ ID NO: 211 - protein, 491 aa, Artificial Sequence
  derived and/or modified protein sequence (wt) from LASV(G3034-SLE-2013;Clade IV)__AIT17350__GPC
MGQIVTFFQEVPHVIEEVMNIVLIALSILAVLKGLYNVATCGLIGLVTFLLLCGRSCTTTLYKGVYELQALELNMETLNMTMPLSCTKNNSHHYIMVGNETGLELTLTNTSIIDHKFCNLSDAHKKNLYDHALMSIISTFHLSIPNFNQYEAMSCDFNGGKISVQYNLSHSYAGDAAKHCGTVANGVLQTFMRMAWGGSYIALDSGRNGWDCVMTSYQYLIIQNTTWEDHCQFSRPSPIGYLGLLSQRTRDIYISRRLLGTFTWTLSDSEGKDTPGGYCLTRWMLIEAELKCFGNTAVAKCNEKHDEEFCDMLRLFDFNKQAIQRLKTEAQMSIQLINKAVNALINDQLIMKNHLRDIMGIPYCNYSKYWYLNHTVTGKTSLPRCWLVSNGSYLNETHFSDDIEQQADNMITEMLQKEYIERQGKTPLGLVDLFVFSTSFYLISIFLHLVKIPTHRHIIGKPCPKPHRLNHMGICSCGLYKQPGVPVRWKR

SEQ ID NO: 212 - protein, 491 aa, Artificial Sequence
  derived and/or modified protein sequence (wt) from LASV(G3101-SLE-2013;Clade IV)__AIT17354__GPC
MGQIVTFFQEVPHVIEEVMNIVLIALSILAVLKGLYNFATCGLVGLVTFLLLCGRSCTTSLYKGVYELQTLELNMETLNMTMPLSCTKNNSHHYIMVGNETGLELTLTNISIINHKFCNLSDAHKKNLYDHALMSIISTFHLSIPNFNQYEAMSCDFNGGKISVQYNLSHSYAGDAANHCGTVANGVLQTFMRMAWGGSYIALDSGHGGWDCIMTSYQYLIIQNTTWEDHCQFSRPSPIGYLGLLSQRTRDIYISRRLLGTFTWTLSDSEGKDTPGGYCLTRWMLIEAELKCFGNTAVAKCNEKHDEEFCDMLRLFDFNKQAIQRLKAEAQMSIQLINKAVNALINDQLIMKNHLRDIMGIPYCNYSKYWYLNHTTTGKTSLPKCWLVSNGSYLNETHFSDDIEQQADNMITEMLQKEYMERQGKTPLGLVDLFVFSTSFYLISIFLHLVKIPTHRHIVGKPCPRPHRLNHMGICSCGLYKQPGVPVKWKR

SEQ ID NO: 213 - protein, 491 aa, Artificial Sequence
  derived and/or modified protein sequence (wt) from LASV(G3110-SLE-2013;Clade IV)__AIT17360__GPC
MGQIVTFFQEVPHVIEEVMNIVLIALSILAVLKGLYNFATCGLVGLVTFLLLCGRSCTTSLYKGVYELQTLELNMETLNMTMPLSCTKNNSHHYIRVGNETGLELTLTNTSIINHRFCNLSDAHKKNLYDHALMSIISTFHLSIPNFNQYEAMSCDFNGGKISVQYNLSHSYAGDAANHCGTVANGVLQTFMRMAWGGSYIALDSGHGKWDCIMTSYQYLIIQNTTWDDHCQFSRPSPIGYLGLLSQRTRDIYISRRLLGTFTWTLSDSEGKDTPGGYCLTRWMLIEAELKCFGNTAVAKCNEKHDEEFCDMLRLFDFNKQAIRRLKAEAQMSIQLINKAVNALINDQLIMKNHLRDIMGIPYCNYSKYWYLNHTTTGKTSLPRCWLVSNGSYLNETHFSDDIEQQADNMITEMLQKEYMERQGKTPLGLVDLFVFSTSFYLISIFLHLVKIPTHRHIVGKSCPKPHRLNHMGICSCGFYKQPGVPVKWKR

SEQ ID NO: 214 - protein, 491 aa, Artificial Sequence
  derived and/or modified protein sequence (wt) from LASV(G3148-SLE-2013;Clade IV)__AIT17364__GPC
MGQIVTFFQEVPHVIEEVMNIVLIALSILAVLKGLYNFATCGLVGLVTFLLLCGRSCTTSLYKGVYELQTLELNMETLNMTMPLSCTKNNSHHYIMVGNETGLELTLTNTSIINHKFCNLSDAHKKNLYDHALMSIISTFHLSIPNFNQYEAMSCDFNGGKISVQYNLSHSYAGDAANHCGTVANGVLQTFMRMAWGGSYIALDSGRDRWDCIMTSYQYLIIQNTTWEDHCQFSRPSPIGYLGLLSQRTRDIYISRRLLGTFTWTLSDSEGKDTPGGYCLTRWMLIEAELKCFGNTAVAKCNEKHDEEFCDMLRLFDFNKQAIQRLKAEAQMSIQLINKAVNALINDQLIMKNHLRDIMGIPYCNYSKYWYLNHTTTGKTSLPKCWLVSNGSYLNETHFSDDIEQQADNMITEMLQKEYIERQGKTPLGLVDLFVFSTSFYLISIFLHLVKIPTHRHIVGKPCPKPHRLNHMGICSCGLYKQPGVSVKWKR

SEQ ID NO: 215 - protein, 491 aa, Artificial Sequence
  derived and/or modified protein sequence (wt) from LASV(G3151-SLE-2013;Clade IV)__AIT17368__GPC
MGQIVTFFQEVPHVIEEVMNIVLIALSILAVLKGLYNFATCGLVGLVTFLLLCGRSCTTSLYKGVYELQTLELNMETLNMTMPLSCTKNNSHHYIMVGNETGLELTLTNTSIINHKFCNLSDAHKKNLYDHALMSIISTFHLSIPNFNQFEAMSCDFNGGKISVQYNLSHSYAGDAANHCGTVANGVLQTFMRMAWGGSYIALDSGHSKWDCIMTSYQYLIIQNTTWDDHCQFSRPSPIGYLGLLSQRTRDIYISRRLLGTFTWTLSDSEGKDTPGGYCLTRWMLIEAELKCFGNTAVAKCNEKHDEEFCDMLRLFDFNKQAIQRLKAEAQMSIQLINKAVNALINDQLIMKNHLRDIMGIPYCNYSKYWYLNHTTTGKTSLPKCWLVSNGSYLNETHFSDDIEQQADNMITEMLQKEYMERQGKTPLGLVDLFVFSTSFYLISIFLHLVKIPTHRHIVGKSCPKPHRLNYMGICSCGFYKQPGVPVKWKR

SEQ ID NO: 216 - protein, 491 aa, Artificial Sequence
  derived and/or modified protein sequence (wt) from LASV(G3157-SLE-2013;Clade IV)__AIT17370__GPC
MGQIVTFFQEVPHVIEEVMNIVLIALSILAVLKGLYNFATCGLVGLVTFLLLCGRSCTTSLYKGVYELQTLELNMETLNMTMPLSCTKNNSHHYIMVGNETGLELTLTNTSIINHKFCNLSDAHKKNLYDHALMSIISTFHLSIPNFNQYEAMSCDFNGGKISVQYNLSHSYAGDAANHCGTVANGVLQTFMRMAWGGSYIALDSGRDRWDCIMTSYQYLIIQNTTWEDHCQFSRPSPIGYLGLLSQRTRDIYISRRLLGTFTWTLSDSEGKDTPGGYCLTRWMLIEAELKCFGNTAVAKCNEKHDEEFCDMLRLFDFNKQAIQRLKAEAQMSIQLINKAVNALINDQLIMKNHLRDIMGIPYCNYSKYWYLNHTTTGKTSLPKCWLVSNGSYLNETHFSDDIEQQADNMITEMLQKEYMERQGKTPLGLVDLFVFSTSFYLISIFLHLVKIPTHRHIVGKPCPKPHRLNHMGICSCGLYKQPGVSVKWKR

SEQ ID NO: 217 - protein, 491 aa, Artificial Sequence
  derived and/or modified protein sequence (wt) from LASV(G3206-SLE-2013;Clade IV)__AIT17378__GPC
MGQIVTFFQEVPHVIEEVMNIVLIALSILAVLKGLYNLATCGLVGLVTFLLLCGRSCTTSLYKGVYELQTLELNMETLNMTMPLSCTKNNSHHYIMVGNETGLELTLTNTSIINHKFCNLSDAHKKNLYDHTLMSIISTFHLSIPNFNQYEAMSCDFNGGKISVQYNLSHSYAVDAANHCGTVANGVLQTFMRMAWGGSYIALDSGRSGWDCIMTSYQYLVIQNTTWEDHCQFSRPSPIGYLGLLSQRTRDIYISRRLLGTFTWTLSDSEGKNTPGGYCLTRWMLIEAELKCFGNTAVAKCNEKHDEEFCDMLRLFDFNKQAIQRLKAEAQMSIQLINKAVNALINDQLIMKNHLRDIMGIPYCNYSKYWYLNHTTTGRTSLPRCWLVSNGSYLNETHFSDDIEQQADNMITEMLQKEYMERQGKTPLGLVDLFVFSTSFYLISIFLHLVKIPTHRHIVGKSCPKPHRLNHMGICSCGFYKQPGVPVKWKR

SEQ ID NO: 218 - protein, 491 aa, Artificial Sequence
  derived and/or modified protein sequence (wt) from LASV(G3234-SLE-2013;Clade IV)__AIT17388__GPC
MGQIVTFFQEVPHVIEEVMNIVLIALSILAVLKGLYNVATCGLIGLVTFLLLCGRSCTTTLYKGVYELQALELNMETLNMTMPLSCTKNNSHHYIRVGNETGLELTLTNTSIINHKFCNLSDAHKKNLYDHALMSIISTFHLSIPNFNQYEAMSCDFNGGIISVQYNLSHSYAGDAANHCGTVANGVLQTFMRMAWGGSYIALDSGRNGWDCIMTSYQYLIIQNTTWDDHCQFSRPSPIGYLGLLSQRTRDIYISRRLLGTFTWTLSDSEGKDTPGGYCLTRWMLIEAELKCFGNTAVAKCNEKHDEEFCDMLRLFDFNKQAIQRLKTEAQMNIQLINKAVNALINDQLIMKNHLRDIMGIPYCNYSKYWYLNNTATGKTSLPRCWLVSNGSYLNETHFSDDIEQQADNMITEMLQKEYMERQGKTPLGLVDLFVFSTSFYLISIFLHLVKIPTHRHIVGKPCPKPHRLNHIGICSCGLYKQPGVPVKWKR

SEQ ID NO: 219 - protein, 491 aa, Artificial Sequence
  derived and/or modified protein sequence (wt) from LASV(G502-SLE-2009;Clade IV)__AIT17126__GPC
MGQIVTFFQEVPHVIEEVMNIVLIALSILAVLKGLYNFATCGLVGLLTFLLLCGRSCTTGLYKGVYELQTLELNMETLNMTMPLSCTKNNSHHYIMVGNETGLELTLTNTSIINHKFCNLSDAHKKNLYDHALMSIISTFHLSIPNFNQYEAMSCDFNGGKISVQYNLSHSYAGDAADHCGTVANGVLQTFMRMAWGGSYIALDSGRGRWDCIMTSYQYLIIQNTTWEDHCQFSRPSPIGYLGLLSQRTRDIYISRRLLGTFTWTLSDSEGKDTPGGYCLTRWMLIEAELKCFGNTAVAKCNEKHDEEFCDMLRLFDFNKQAIQRLKAEAQMSIQLINKAVNALINDQLVMKNHLRDIMGIPYCNYSRYWYLNHTTTGRTSLPKCWLVSNGSYLNETHFSDDIEQQADNMITEMLQKEYMERQGKTPLGLVDLFVFSTSFYLISIFLHLVKIPTHRHIVGKSCPKPHRLNHMGICSCGLYKQPGVPVKWKR

SEQ ID NO: 220 - protein, 491 aa, Artificial Sequence
  derived and/or modified protein sequence (wt) from LASV(G503-SLE-2009;Clade IV)__AIT17130__GPC
MGQIVTFFQEVPHVIEEVMNIVLIALSILAVLKGLYNFATCGFVGLVTFLLLCGRSCTTSLYKGVYELQTLELNMETLNMTMPLSCTKNNSHHYIRVGNDTGLELTLTNTSIINHKFCNLSDAHKKNLYDHALMSIISTFHLSIPNFNQYEAMSCDFNGGKISVQYNLSHSYAVDAASHCGTIANGVLQTFMRMAWGGSYIALDSGRDRWDCIMTSYQYLIIQNTTWEDHCQFSRPSPIGYLGLLSQRTRDIYISRRLLGTFTWTLSDSEGKDTPGGYCLTRWMLIEAELKCFGNTAVAKCNEKHDEEFCDMLRLFDFNKQAIQRLKAEAQMSIQLINKAVNALINDQLIMKNHLRDIMGIPYCNYSKYWYLNHTTTGKTSLPKCWLVSNGSYLNETHFSDDIEQQADNMITEMLQKEYMERQGKTPLGLVDLFVFSTSFYLISIFLHLVKIPTHRHIVGKSCPKPHRLNHMGICSCGLYKQPGVPVKWKR

SEQ ID NO: 221 - protein, 491 aa, Artificial Sequence
  derived and/or modified protein sequence (wt) from LASV(G610-SLE-2009;Clade IV)__AIT17134__GPC
MGQIVTFFQEVPHVIEEVMNIVLIALSILAVLKGLYNFATCGLVGLVTFLLLCGRSCTTSLYKGVYELQTLELNMETLNMTMPLSCTKNNSHHYIMVGNETGLELTLTNTSIINHKFCNLSDAHKKNLYDHALMSIISTFHLSIPNFNQYEAMSCDFNGGKISVQYNLSHSYAGDAANHCGTVANGVLQTFMRMAWGGSYIALDSGRGRWDCIMTSYQYLIIQNTTWEDHCQFSRPSPIGYLGLLSQRTRDIYISRRLLGTFTWTLSDSEGKDTPGGYCLTRWMLIEAELKCFGNTAVAKCNEKHDEEFCDMLRLFDFNKQAIQRLKAEAQMSIQLINKAVNALINDQLIMKNHLRDIMGIPYCNYSKYWYLNHTTTGKTSLPKCWLVSNGSYLNETHFSDDIEQQADNMITEMLQKEYMERQGKTPLGLVDLFVFSTSFYLISIFLHLVKIPTHRHIVGKSCPKPHRLNHMGICSCGLYKQPGVPVKWKR

SEQ ID NO: 222 - protein, 491 aa, Artificial Sequence
  derived and/or modified protein sequence (wt) from LASV(G636-SLE-2009;Clade IV)__AIT17138__GPC
MGQIVTFFQEVPHVIEEVMNIVLIALSILAVLKGLYNLATCGLVGLVTFLLLCGRSCTTSLYKGVYELQTLELNMETLNMTMPLSCTKNNSHHYIMVGNETGLELTLTNTSLINHKFCNLSDAHKKNLYDHALMSIISTFHLSIPNFNQYEAMSCDFNGGKISVQYNLSHSYAVDAASHCGTVANGVLQTFMRMAWGGSYIALDSGRGGWDCIMTSYQYLIIQNTTWEDHCQFSRPSPIGYLGLLSQRTRDIYISRRLLGTFTWTLSDSEGKDTPGGYCLTRWMLIEAELKCFGNTAVAKCNEKHDEEFCDMLRLFDFNKQAIQRLKAEAQMSIQLINKAVNALINDQLIMKNHLRDIMGIPYCNYSKYWYLNHTTTGRTSLPRCWLVSNGSYLNETHFSDDIEQQADNMITEMLQKEYMERQGKTPLGLVDLFVFSTSFYLISIFLHLVKIPTHRHIVGKSCPKPHRLNHMGICSCGLYKQPGVPVKWKR

SEQ ID NO: 223 - protein, 491 aa, Artificial Sequence
  derived and/or modified protein sequence (wt) from LASV(G692-SLE-2009;Clade IV)__AIT17146__GPC
MGQIVTFFQEVPHVIEEVMNIVLIALSILAVLKGLYNLATCGLVGLVTFLLLCGRSCTTSLYKGVYELQTLELNMETLNMTMPLSCTKNNSHHYIMVGNETGLELTLTNTSIINHKFCNLSDAHKKNLYDHALMSIISTFHLSIPNFNQYEAMSCDFNGGKISVQYNLSHSYAGDAANHCGTVANGVLQTFMRMAWGGSYIALDSGRGRWDCIMTSYQYLIIQNTTWEDHCSFSRPSPIGYLGLLSQRTRDIYISRRLLGTFTWTLSDSEGKDTPGGYCLTRWMLIEAELKCFGNTAVAKCNEKHDEEFCDMLRLFDFNKQAIQRLKAEAQMSIQLINKAVNALINDQLIMKNHLRDIMGIPYCNYSKYWYLNHTTTGKTSLPKCWLVSNGSYLNETHFSDDIEQQADNMITEMLQKEYMERQGKTPLGLVDLFVFSTSFYLISIFLHLVKIPTHRHIVGKSCPKPHRLNHMGICSCGFYKQPGVPVKWKR

SEQ ID NO: 224 - protein, 491 aa, Artificial Sequence
  derived and/or modified protein sequence (wt) from LASV(G733-SLE-2010;Clade IV)__AIT17154__GPC
MGQIVTFFQEVPHVIEEVMNIVLIALSILAVLKGLYNFATCGIVGLVSFLLLCGRSCTTSLYKGVYELQTLELNMETLNMTMPLSCTKNNSHHYIMVGNETGLELTLTNTSIINHKFCNLSDAHKKNLYDHALMSIISTFHLSIPNFNQYEAMSCDFNGGKISVQYNLSHSYAGDAANHCGTIANGVLQTFMRMAWGGSYIALDSGRDRWDCIMTSYQYLIIQNTTWEDHCQFSRPSPIGYLGLLSQRTRDIYISRRLLGTFTWTLSDSEGKDTPGGYCLTRWMLIEAELKCFGNTAVAKCNEKHDEEFCDMLRLFDFNKQAIQRLKAEAQMSIQLINKAVNALINDQLIMKNHLRDIMGIPYCNYSKYWYLNHTTTGKTSLPKCWLVSNGSYLNETHFSDDIEQQADNMITEMLQKEYMERQGKTPLGLVDLFVFSTSFYLISIFLHLVKIPTHRHVVGKSCPKPHRLNHMGICSCGLYGQPGVPVKWKR

SEQ ID NO: 225 - protein, 491 aa, Artificial Sequence
  derived and/or modified protein sequence (wt) from LASV(G771-SLE-2010;Clade IV)__AIT17158__GPC
MGQIVTFFQEVPHVIEEVMNIVLIALSILAVLKGLYNFATCGLVGLVTFLLLCGRSCTTSLYKGVYELQTLELNMETLNMTMPLSCTKNNSHHYIMVGNETGLELTLTNTSIINHKFCNLSDAHKKNLYDHALMSIISTFHLSIPNFNQYEAMSCDFNGGKISVQYNLSHSYAGDAANHCGTVANGVLQTFMRMAWGGSYIALDSGRDRWDCIMTSYQYLIIQNTTWEDHCQFSRPSPIGYLGLLSQRTRDIYISRRLLGTFTWTLSDSEGKDTPGGYCLTRWMLIEAELKCFGNTAVAKCNEKHDEEFCDMLRLFDFNKQAIQRLKAEAQMSIQLINKAVNALINDQLIMKNHLRDIMGIPYCNYSKYWYLNHTTTGKTSLPKCWLVSNGSYLNETHFSDDIEQQADNMITEMLQKEYMERQGKTPLGLVDLFVFSTSFYLISIFLHLVKIPTHRHIVGKSCPKPHRLNHMGICSCGLYKQPGVPVKWKR

SEQ ID NO: 226 - protein, 491 aa, Artificial Sequence
  derived and/or modified protein sequence (wt) from LASV(G808-SLE-2010;Clade IV)__AIT17164__GPC
MGQIVTFFQEVPHVIEEVMNIVLIALSILAVLKGLYNFATCGLVGLVTFLLLCGRSCTSSLYKGVYELQTLELNMETLNMTMPLSCTKNNSHHYIRVGNETGLELTLTNTSIIDHKFCNLSDAHKKNLYDHALMSIISTFHLSIPNFNQYEAMSCDFNGGKISVQYNLSHSYAGDAAKHCGTVANGVLQTFMRMAWGGSYIALDSGHGNWDCIMTSYQYLIIQNTTWEDHCQFSRPSPIGYLGLLSQRTRDIYISRRLLGTFTWTLSDSEGNDAPGGYCLTRWMLIQAELKCFGNTAVAKCNEKHDEEFCDMLRLFDFNKQAIQRLKAEAQMSIQLINKAVNALINDQLIMKNHLRDIMGIPYCNYSKYWYLNHTTTGRTSLPRCWLVSNGSYLNETHFSDDIEQQADNMITEMLQKEYMERQGKTPLGLVDLFVFSTSFYLISIFLHLVKIPTHRHIVGKSCPKPHRLNHMGICSCGLFKQPGVPVKWKR

SEQ ID NO: 227 - protein, 491 aa, Artificial Sequence
  derived and/or modified protein sequence (wt) from LASV(Guinea Faranah;Clade IV)__AMZ00381__GPC
MGQIVTFFQEVPHVIEEVMNIVLIALSILAVLKGLYNVATCGLIGLIAFLLLCGRSCTSTLYKGVYELQALELNMETLNMTMPLSCTKNNSHHYIMVGNETGLELTLTNTSIINHKFCNLSDAHKKNLYNHALMSIISTFHLSIPNFNQYEAMSCDFNGGKISVQYNLSHSYAVDAANHCGTVANGILQTFMRMAWGGSYIALDSGHGGWDCIMSSYQYLVIQNTTWEDHCQFSRPSPIGYLGLLSQRTRDIYISRRLLGTFTWTLSDSEGKDTPGGYCLTRWMLIEAELKCFGNTAVAKCNEKHDEEFCDMLRLFDFNKQAIQRLKAEAQMSIQLINKAVNALINDQLIMKNHLRDIMGIPYCNYSKYWYLNHTITGRTSLPKCWLVSNGSYLNETHFSDDIEQQADNMITEMLQKEYLERQGKTPLGLVDLFVFSTSFYLISIFLHLIKIPTHRHIVGKSCPKPHRLNHMGVCSCGLYKQPGVPVRWKR

SEQ ID NO: 228 - protein, 491 aa, Artificial Sequence
  derived and/or modified protein sequence (wt) from LASV(GUINEA Z-185a;Clade IV)__AMZ00377__GPC
MGQIVTFFQEVPHVIEEVMNIVLIALSILAVLKGLYNVATCGLIGLVTFLFLCGRSCSTSLYKGVYELQTLELNMETLNMTMPLSCTKNNSHHYIMVGNETGLELTLTNTSIINHKFCNLSDAHKKNLYDHTLMSIISTFHLSIPNFNQYEAMSCDFNGGKISVQYNLSHSYAVDAANHCGTVANGVLQTFMRMAWGGSYIALDSGRGNWDCIMTSYQYLVIQNTTWEDHCQFSRPSPIGYLGLLSQRTRDIYISRRLLGTFTWTLSDSEGKDTPGGYCLTRWMLIEAELKCFGNTAVAKCNEKHDEEFCDMLRLFDFNKQAIQRLKAEAQMSIQLINKAVNALINDQLIMKNHLRDIMGIPYCNYSKYWYLNHTVTGKTSLPKCWLVSNGSYLNETHFSDDIEQQADNLITEMLQKEYMERQGKTPLGLVDLFVFSTSFYLISIFLHLVKIPTHRHIVGKPCPKPHRLNHMGICSCGVYKQPGVPVRWKR

SEQ ID NO: 229 - protein, 491 aa, Artificial Sequence
  derived and/or modified protein sequence (wt) from MOPV/LASV reassortant(IGS-1;Clade IV)__AFY05576__GPC
MGQIVTFFQEVPHVIEEVMNIVLIALSVLAVLKGLYNFATCGLVGLVTFLLLCGRSCTTSLYKGVYELQTLELNMETLNMTMPLSCTKNNSHHYIMVGNETGLELTLTNTSIINHKFCNLSDAHKKNLYDHALMSIISTFHLSIPNFNQYEAMSCDFNGGKISVQYNLSHSYAGDAANHCGTVANGVLQTFMRMAWGGSYIALDSGRGNWDCIMTSYQYLIIQNTTWEDHCQFSRPSPIGYLGLLSQRTRDIYISRRLLGTFTWTLSDSEGEDTPGGYCLTRWMLIEAELKCFGNTAVAKCNEKHDEEFCDMLRLFDFNKQAIQRLKAEAQMSIQLINKAVNALINDQLIMKNHLRDIMGIPYCNYSKYWYLNHTTTGRTSLPKCWLVSNGSYLNETHFSDDIEQQADNMITEMLQKEYMERQGKTPLGLVDLFVFSTSFYLISIFLHLVKIPTHRHIVGKSCPKPHRLNHMGICSCGLYKQPGVPVKWKR

SEQ ID NO: 230 - protein, 491 aa, Artificial Sequence
  derived and/or modified protein sequence (wt) from MOPV/LASV reassortant(IGS-11;Clade IV)__AFY05588__GPC
MGQIVTFFQEVPHVIEEVMNIVLIALSVLAVLKGLYNFATCGLVGLVTFLLLCGRSCTTSLYKGVYELQTLELNMETLNMTMPLSCTKNNSHHYIMVGNETGLELTLTNTSIINHKFCNLSDAHKKNLYDHALMSIISTFHLSIPNFNQYEAMSCDFNGGKISVQYNLSHSYAGDAANHCGTVANGVLQTFMRMAWGGSYIALDSGRGNWDCIMTSYQYLIIQNTTWEDHCQFSRPSPIGYLGLLSQRTRDLYISRRLLGTFTWTLSDSEGEDTPGGYCLTRWMLIEAELKCFGNTAVAKCNEKHDEEFCDMLRLFDFNKQAIQRLKAEAQMSIQLINKAVNALINDQLIMKNHLRDIMGIPYCNYSKYWYLNHTTTGRTSLPKCWLVSNGSYLNETHFSDDIEQQADNMITEMLQKEYMERQGKTPLGLVDLFVFSTSFYLISIFLHLVKIPTHRHIVGKSCPKPHRLNHMGICSCGLYKQPGVPVKWKR

SEQ ID NO: 231 - protein, 491 aa, Artificial Sequence
  derived and/or modified protein sequence (wt) from MOPV/LASV reassortant(IGS-12;Clade IV)__AFY05590__GPC
MGQIVTFFQEVPHVIEEVMNIVLIALSVLAVLKGLYNFATCGLVGLVTFLLLCGRSCTTSLYKGVYELQTLELNMETLNMTMPLSCTKNNSHHYIMVGNETGLELTLTNTSIINHKFCNLSDAHKKNLYDHALMSIISTFHLSIPNFNQYEAMSCDFNGGKISVQYNLSHSYAGDAANHCGTVANGVLQTFMRMAWGGSYIALDSGRGNWDCIMTSYQYLIIQNTTWEDHCQFSRPSPIGYLGLLSQRTRDMYISRRLLGTFTWTLSDSEGEDTPGGYCLTRWMLIEAELKCFGNTAVAKCNEKHDEEFCDMLRLFDFNKQAIQRLKAEAQMSIQLINKAVNALINDQLIMKNHLRDIMGIPYCNYSKYWYLNHTTTGRTSLPKCWLVSNGSYLNETHFSDDIEQQADNMITEMLQKEYMERQGKTPLGLVDLFVFSTSFYLISIFLHLVKIPTHRHIVGKSCPKPHRLNHMGICSCGLYKQPGVPVKWKR

SEQ ID NO: 232 - protein, 491 aa, Artificial Sequence
  derived and/or modified protein sequence (wt) from LASV(LM032-SLE-2010;Clade IV)__AIT17802__GPC
MGQIVTFFQEVPHVIEEVMNIVLIALSILAVLKGLYNLATCGLVGLVTFLLLCGRSCTTSLYKGVYELQTLELNMETLNMTMPLSCTKNNSHHYIMVGNETGLELTLTNTSIINHKFCNLSDAHKKNLYNHALMSIISTFHLSIPNFNQYEAMSCDFNGGKISVQYNLSHSYAGDAANHCGTVANGVLQTFMRMAWGGSYIALDSGRDRWDCIMTSYQYLIIQNTTWEDHCQFSRPSPIGYLGLLSQRTRDIYISRRLLGTFTWTLSDSEGKDTPGGYCLTRWMLIEAELKCFGNTAVAKCNEKHDEEFCDMLRLFDFNKQAIQRLKAEAQMSIQLINKAVNALINDQLIMKNHLRDIMGIPYCNYSKYWYLNHTTTGKTSLPKCWLVSNGSYLNETHFSDDIEQQADNMITEMLQKEYMERLGKTPLGLVDLFVFSTSFYLISIFLHLVKIPTHRHIVGRSCPKPHRLNHMGICSCGLYKQPGVPVKWKR

SEQ ID NO: 233 - protein, 491 aa, Artificial Sequence
  derived and/or modified protein sequence (wt) from LASV(LM222-SLE-2010;Clade IV)__AIT17806__GPC
MGQIVTFFQEVPHVIEEVMNIVLIALSILAVLKGLYNFATCGLIGLVTFLLLCGRSCTTSLYKGVYELQTLELNMETLNMTMPLSCTKNNSHHYIMVGNETGLELTLTNTSIINHKFCNLSDAHKKNLYDHALMSIISTFHLSIPNFNQYEAMSCDFNGGKISVQYNLSHSYAGDAANHCGTVANGVLQTFMRMAWGGSYIALDSGRGKWDCIMTSYQYLIIQNTTWEDHCQFSRPSPIGYLGLLSQRTRDIYISRRLLGTFTWTLSDSEGKDTPGGYCLTRWMLIEAELKCFGNTAVAKCNEKHDEEFCDMLRLFDFNKQAIQRLKAEAQMSIQLINKAVNALINDQLIMKNHLRDIMGIPYCNYSKYWYLNHTTTGKTSLPKCWLVSNGSYLNETHFSDDIEQQADNMITEMLQKEYMERQGKTPLGLVDLFVFSTSFYLISIFLHLVKIPTHRHIVGKSCPKPHRLNHMGICSCGLYKQPGVPVKWKR

SEQ ID NO: 234 - protein, 491 aa, Artificial Sequence
  derived and/or modified protein sequence (wt) from LASV(LM395-SLE-2009;Clade IV)__AIT17810__GPC
MGQIVTFFQEVPHVIEEVMNIVLIALSILAVLKGLYNLATCGLVGLVTFLLLCGRSCTTSLYKGVYELQTLELNMETLNMTMPLSCTKDNSHHYIRVGNETGLELTLTNTSILNHKFCNLSDAHKKNLYDHALMSIISTFHLSIPNFNQYEAMSCDFNGGRISVQYNLSHSYAGDAANHCGTVANGVLQTFMRMAWGGSYIALDSGRGRWDCIMTSYQYLIIQNTTWEDHCQFSRPSPIGYLGLLSQRTRDIYISRRLLGTFTWTLSDSEGKDTPGGYCLTRWMLIEAELKCFGNTAVAKCNEKHDEEFCDMLRLFDFNKQAIQRLKAEAQMSIQLINKAVNALINDQLIMKNHLRDIMGIPYCNYSKYWYLNHTTTGKTSLPRCWLVSNGSYLNETHFSDDIEQQADNMITEMLQKEYMERQGKTPLGLVDLFVFSTSFYLISIFLHLVKIPTHRHVVGKPCPKPHRLNHMGICSCGLYKQPGVPVKWKR

SEQ ID NO: 235 - protein, 491 aa, Artificial Sequence
  derived and/or modified protein sequence (wt) from LASV(LM765-SLE-2012;Clade IV)__AIT17814__GPC
MGQIVTFFQEVPHVIEEVMNIVLIALSILAVLKGLYNFATCGLVGLVTFLLLCGRSCTTSLYKGVYELQTLELNMETLNMTMPLSCTKNNSHHYIMVGNETGLELTLTNTSIIDHKFCNLSDAHRKNLYDHALMSIISTFHLSIPNFNQYEAMSCDFNGGKISVQYNLSHSYAKDAADHCGTVANGVLQTFMRMAWGGSYIALDSGRGRWDCIMTSYQYLIIQNTTWEDHCQFSRPSPIGYLGLLSQRTRDIYISRRLLGTFTWTLSDSEGKDTPGGYCLTRWMLIEAELKCFGNTAVAKCNEKHDEEFCDMLRLFDFNKQAIQRLKAEAQMSIQLINKAVNALINDQLIMKNHLRDIMGIPYCNYSKYWYLNHTTTGKTSLPKCWLVSNGSYLNETHFSDDIEQQADNMITEMLQKEYMERQGKTPLGLVDLFVFSTSFYLISIFLHLVKIPTHRHIVGKPCPKPHRLNHMGICSCGLYKQPGVPVKWKR

SEQ ID NO: 236 - protein, 491 aa, Artificial Sequence
  derived and/or modified protein sequence (wt) from LASV(LM774-SLE-2012;Clade IV)__AIT17820__GPC
MGQIVTFFQEVPHVIEEVMNIVLIALSILAVLKGLYNFATCGLVGLVTFLLLCGRSCTTSLYKGVYELQTLELNMETLNMTMPLSCTKNNSHHYIMVGNETGLELTLTNTSIINHKFCNLSDAHKKNLYDHALMSIISTFHLSIPNFNQYEAMSCDFNGGKISVQYNLSHSYAEDAANHCGTVANGVLQTFMRMAWGGSYIALDSGRGNWDCIMTSYQYLIIQNTTWEDHCQFSRPSPIGYLGLLSQRTRDIYISRRLLGTFTWTLSDSEGKDTPGGYCLTRWMLIEAELKCFGNTAVAKCNEKHDEEFCDMLRLFDFNKQAIQRLKAEAQMSIQLINKAVNALINDQLIMKNHLRDIMGIPYCNYSKYWYLNHTTTGKTSLPKCWLVSNGSYLNETHFSDDIEQQADNMITEMLQKEYMERQGKTPLGLVDLFVFSTSFYLISIFLHLVKIPTHRHIVGKSCPKPHRLNHMGICSCGLYKQPGVPVKWKR

SEQ ID NO: 237 - protein, 491 aa, Artificial Sequence
  derived and/or modified protein sequence (wt) from LASV(LM776-SLE-2012;Clade IV)__AIT17824__GPC
MGQIVTFFQEVPHVIEEVMNIVLIALSILAVLKGLYNFATCGLVGLVTFLLLCGRSCTTSVYKGVYELQTLELNMETLNMTMPLSCTKNNSHHYIMVGNETGLELTLTNTSIINHKFCNLSDAHKKNLYDHALMSIISTFHLSIPNFNQYEAMSCDFNGGKISVQYNLSHSYAGDAANHCGTVANGVLQTFMRMAWGGSYIALDSGHGKWDCIMTSYQYLIIQNTTWEDHCQFSRPSPIGYLGLLSQRTRDIYISRRLLGTFTWTLSDSEGKDTPGGYCLTRWMLIEAELKCFGNTAVAKCNEKHDEEFCDMLRLFDFNKQAIQRLKAEAQMSIQLINKAVNALINDQLIMKNHLRDIMGIPYCNYSKYWYLNHTTTGKTSLPKCWLVSNGSYLNETHFSDDIEQQADNMITEMLQKEYMERQGKTPLGLVDLFVFSTSFYLISIFLHLVKIPTHRHIVGKSCPKPHRLNHMGICSCGLYKQPGVPVRWKR

SEQ ID NO: 238 - protein, 491 aa, Artificial Sequence
  derived and/or modified protein sequence (wt) from LASV(LM778-SLE-2012;Clade IV)__AIT17828__GPC
MGQIVTFFQEVPHVIEEVMNIVLIALSILAVLKGLYNFATCGLVGLVTFLLLCGRSCTTSLYKGDYELQTLELNMETLNMTMPLSCTKNNSHHYIMVGNETGLELTLTNTSIINHKFCNLSDAHKKNLYDHALMSIISTFHLSIPNFNQYEAMSCDFNGGKISVQYNLSHSYAGDAANHCGTVANGVLQTFMRMAWGGSYIALDSGRGNWDCIMTSYQYLIIQNTTWEDHCQFSRPSPIGYLGLLSQRTRDIYISRRLLGTFTWTLSDSEGKDTPGGYCLTRWMLIEAELKCFGNTAVAKCNEKHDEEFCDMLRLFDFNKQAIQRLKAEAQMSIQLINKAVNALINDQLIMKNHLRDIMGIPYCNYSKYWYLNHTTTGKTSLPKCWLVSNGSYLNETHFSDDIEQQADNMITEMLQKEYMERQGKTPLGLVDLFVFSTSFYLISIFLHLVKIPTHRHIVGKSCPKPHRLNHMGICSCGLYKQPGVPVKWKR

SEQ ID NO: 239 - protein, 491 aa, Artificial Sequence
  derived and/or modified protein sequence (wt) from LASV(Mad39;Clade IV)__ANH09722__GPC
MGQIVTFFQEVPHVIEEVMNIVLIALSILAVLKGLYNVATCGLIGLVTFLLLCGRSCTTTLYKGVYELQALELNMETLNMTMPLSCTKNNSHHYIRVGNETGLELTLTNTSLINHKFCNLSDAHKKNLYDHALMSIISTFHLSIPNFNQYEAMSCDFNDGKISVQYNLSHTYAGDTANHCGTVANGVLQTFMRMAWGGSYIALDSGRGGWDCIMTSYQYLIIQNTTWEDHCQFSRPSPIGYLGLLSQRTRDIYISRRLLGTFTWTLSDSEGKDTPGGYCLTRWMLIEAELKCFGNTAVAKCNEKHDEEFCDMLRLFDFNKQAIQRLKAEAQMSIQLINKAVNALINDQLIMKNHLRDIMGIPYCNYSKYWYLNHTVTGKTSLPKCWLVSNGSYLNETHFSDDIEQQADNMITEMLQKEYMERQGKTPLGLVDLFVFSTSFYLISIFLHLVKIPTHRHVVGKPCPKPHRLNHMGICSCGFYKQPGVPVRWKR

SEQ ID NO: 240 - protein, 491 aa, Artificial Sequence
  derived and/or modified protein sequence (wt) from LASV(Mad41;Clade IV)__ANH09724__GPC
MGQIVTFFQEVPHVIEEVMNIVLIALSILAVLKGLYNVATCGLIGLVTFLLLCGRSCTTTLYKGVYELQALELNMETLNMTMPLSCTKNDSHHYIMVGNETGLELTLTNTSIISHKFCNLSDAHKQNLYDHALMSIISTFHLSIPNFNQYEAMSCDFNGGKISVQYNLSHTYAGDAANHCGTVANGVLQTFMRMAWGGSYIALDSGRGGWDCIMTSYQYLIIQNTTWEDHCQFSRPSPIGYLGLLSQRTRDIYISRRLLGTFTWTLSDSEGKDTPGGYCLTRWMLIEAELKCFGNTAVAKCNEKHDEEFCDMLRLFDFNKQAIQRLKAEAQMSIQLINKAVNALINDQLIMKNHLRDIMGIPYCNYSKYWYLNHTVTGKTSLPKCWLVSNGSYLNETHFSDDIEQQADNMITEMLQKEYMERQGKTPLGLVDLFVFSTSFYLISIFLHLVKIPTHRHVVGKPCPKPHRLNHMGICSCGFYGQPGVPVRWKR

SEQ ID NO: 241 - protein, 491 aa, Artificial Sequence
  derived and/or modified protein sequence (wt) from LASV(Mad63;Clade IV)__ANH09728__GPC
MGQIVTFFQEVPHVIEEVMNIVLIALSVLAVLKGLYNVATCGLIGLVTFLLLCGRSCTTTLYKGVYELQALELNMGTLNMTMPLSCTKNNSHHYIMVGNETGLELTLTNTSIINHKFCNLSDAHKKDLYDHALMSIISTFHLSVPNFNQYEAMSCDFNGGKISVQYNLSHAYAGDTANHCGTVANGVLQTFMRMAWGGSYIALDSGRGGWDCIMTSYQYLIIQNTTWEDHCQFSRPSPIGYLGLLSQRTRDIYISRRLLGTFTWTLSDSEGEYTPGGYCLTRWMLIEAELKCFGNTAVAKCNEKHDEEFCDMLRLFDFNKQAIQRLKAEAQMSIQLINKAVNALINDQLIMKNHLRDIMGIPYCNYSKYWYLNHTVTGKTSLPKCWLVSNGSYLNETHFSDDIEQQADNMITEMLQKEYMERQGKTPLGLVDLFVFSTSFYLISIFLHLVKIPTHRHVVGKPCPKPHRLNHMGICSCGFYKQPGVPVRWKR

SEQ ID NO: 242 - protein, 491 aa, Artificial Sequence
  derived and/or modified protein sequence (wt) from LASV(Mad69;Clade IV)__ANH09730__GPC
MGQIVTFFQEVPHVIEEVMNIVLIALSVLAVLKGLYNVATCGLIGLVTFLLLCGRSCTTTLYKGVYELQALELNMETLNMTMPLSCTKNNSHHYIMVGNETGLELTLTNTSIINHKFCNLSDAHKKNLYDHALMSIISTFHLSIPNFNQYEAMSCDFNQGKISVQYNLSHAYAGDAANHCGTVANGVLQTFMRMAWGGSYIALDSGRGGWDCIMTSYQYLIIQNTTWENHCQFSRPSPIGYLGLLSQRTRDIYISRRLLGTFTWTLSDSEGKGTPGGYCLTRWMLIEAELKCFGNTAVAKCNEKHDEEFCDMLRLFDFNKQAIQRFKAEAQMSIQLINKAVNALINDQLIMKNHLRDIMGIPYCNYSKYWYLNHTVTGKTSLPKCWLVSNGSYLNETHFSDDIEQQADNMITEMLQKEYMERQGRTPLGLVDLFVFSTSFYLISIFLHLVKIPTHRHVVGKPCPKPHRLNHMGICSCGFYKQPGVPVRWKR

SEQ ID NO: 243 - protein, 491 aa, Artificial Sequence
  derived and/or modified protein sequence (wt) from LASV(Mad83;Clade IV)__ANH09732__GPC
MGQIVTFFQEVPHVIEEVMNIVLIALSILAVLKGVYNVATCGLIGLVTFLLLSGRSCTTTIYKGVYELQALELNMETLNMTMPLSCTKNNSHHYIMVGNETGLELTLTNTSIINHKFCNLSDAHKKNLYDHALMSIISTFHLSIPNFNQYEAMSCDFNGGKISVQYNLSHTYAGDAANHCGTVANGVLQTFMRMAWGGSYIALDSGHGGWDCIMTSYQYLIIQNTTWENHCQFSRPSPIGYLGLLSQRTRDIYISRRLLGTFTWTLSDSEGKDTPGGYCLTRWMLIEAELKCFGNTAVAKCNEKHDEEFCDMLRLFDFNKQAIQRLKAEAQMSIQLINKAVNALINDQLIMKNHLRDIMGIPYCNYSKYWYLNHTVTGKTSLPKCWLVSNGSYLNETHFSDDIEQQADNMITEMLQKEYMERQGKTPLGLVDLFVFSTSFYLISIFLHLVKIPTHRHIVGKPCPKPHRLNHMGICSCGFYKQPGVPVRWKR

SEQ ID NO: 244 - protein, 491 aa, Artificial Sequence
  derived and/or modified protein sequence (wt) from LASV(NL;Clade IV)__AAO59512__GPC
MGQIVTFFQEVPHVIEEVMNIVLIALSILAVLKGLYNFATCGLVGLVAFLLLCGRSCTSSLYKGVYELQTLELNMETLNMTMPLSCTKNNSHHYIRVGNETGLELTLTNTSIINHKFCNLSDAHKKNLYDHALMSIISTFHLSIPNFNQYEAMSCDFNGGKISVQYNLSHSYAVDAAKHCGTVANGVLQTFMRMAWGGSYIALDSGHGRWDCIMTSYQYLIIQNTTWEDHCQFSRPSPIGYLGLLSQRTRDIYISRRLLGTFTWTLSDSEGKDTPGGYCLTRWMLIEAELKCFGNTAVAKCNEKHDEEFCDMLRLFDFNKQAIQRLKTEAQMSIQLINKAVNALINDQLIMKNHLRDIMGIPYCNYSRYWYLNHTTTGKTSLPKCWLVSNGSYLNETRFSDDIEQQADNMITEMLQKEYMERQGKTPLGLVDLFVFSTSFYLISIFLHLVKIPTHRHIVGKSCPKPHRLNHMGICSCGLYKQPGVPVKWKR

SEQ ID NO: 245 - protein, 491 aa, Artificial Sequence
  derived and/or modified protein sequence (wt) from LASV(Z0947-SLE-2011;Clade IV)__AIT17840__GPC
MGQIVTFFQEVPHVIEEVMNIVLIALSILAVLKGLYNFATCGLVGLVTFLLLCGRSCTISLYKGVYELQTLELNMETLNMTMPLSCTKNNSHHYIMVGNETGLELTLTNTSIINHKFCNLSDAHKKNLYDHALMSIISTFHLSIPNFNQYEAMSCDFNGGKISVQYNLSHSYAGDAANHCGTVANGVLQTFMRMAWGGSYIALDSGRDRWDCIMTSYQYLIIQNTTWEDHCQFSRPSPIGYLGLLSQRTRDIYISRRLLGTFTWTLSDSEGKDTPGGYCLTRWMLIEAELKCFGNTAVAKCNEKHDEEFCDMLRLFDFNKQAIQRLKAEAQMSIQLINKAVNALINDQLIMKNHLRDIMGIPYCNYSKYWYLNHTTTGKTSLPKCWLVSNGSYLNETHFSDDIEQQADNMITEMLQKEYMERQGKTPLGLVDLFVFSTSFYLISIFLHLVKIPTHRHIVGKPCPKPHRLNHMGICSCGLYKQPGVPVKWKR

SEQ ID NO: 246 - protein, 491 aa, Artificial Sequence
  derived and/or modified protein sequence (wt) from LASV(Z0948-SLE-2011;Clade IV)__AIT17844__GPC
MGQIVTFFQEVPHVIEEVMNIVLIALSILAVLKGLYNFATCGLVGLVTFLLLCGRSCTISLYKGVYELQTLELNMETLNMTMPLSCTKNNSHHYIMVGNETGLELTLTNTSIINHKFCNLSDAHKKNLYDHALMSIISTFHLSIPNFNQYEAMSCDFNGGKISVQYNLSHSYAGDAANHCGTVANGVLQTFMRMAWGGSYIALDSGRDRWDCIMTSYQYLIIQNTTWEDHCQFSRPSPIGYLGLLSQRTRDIYISRRLLGTFTWTLSDSEGKDTPGGYCLTRWMLIEAELKCFGNTAVAKCNEKHDEEFCDMLRLFDFNKQAIQRLKAEAQMSIQLINRAVNALINDQLIMKNHLRDIMGIPYCNYSKYWYLNHTTTGKTSLPKCWLVSNGSYLNETHFSDDIEQQADNMITEMLQKEYMERQGKTPLGLVDLFVFSTSFYLISIFLHLVKIPTHRHIVGKPCPKPHRLNHMGICSCGLYKQPGVPVKWKR

SEQ ID NO: 247 - protein, 491 aa, Artificial Sequence
  derived and/or modified protein sequence (wt) from LASV(Z148;Clade IV)__AAT49008__GPC
MGQIVTFFQEVPHVIEEVMNIVLIALSILAVLKGLYNVATCGLIGLVTFLFLCGRSCSTTLYKGVYELQTLELNMETLNMTMPLSCTKNNSHHYIMVGNETGLELTLTNTSIINHKFCNLSDAHKKNLYDHTLMSIISTFHLSIPNFNQYEAMSCDFNGGKISVQYNLSHSYAVDAANHCGTVANGVLQTFMRMAWGGSYIALDSGRGNWDCIMTSYQYLIIQNTTWEDHCQFSRPSPIGYLGLLSQRTRDIYISRRLLGTFTWTLSDSEGKDTPGGYCLTRWMLIEAELKCFGNTAVAKCNEKHDEEFCDMLRLFDFNKQAIQRLKAEAQMSIQLINKAVNALINDQLIMKNHLRDIMGIPYCNYSRYWYLNHTVTGKTSLPKCWLVSNGSYLNETHFSDDIEQQADNLITEMLQKEYMERQGKTPLGLVDLFVFSTSFYLISIFLHLVKIPTHRHIVGKPCPKPHRLNHMGICSCGVYKQPGVPVRWKR

SEQ ID NO: 248 - protein, 491 aa, Artificial Sequence
  derived and/or modified protein sequence (wt) from LASV(Bamba-R114;Clade V)__AHC95555__GPC
MGQIVTFFQEVPHVIEEVMNIVLIALSILAVLKGLYNIATCGLIGLVTFLLLCGRSCSSNLYKGVYELQSLDLNMETLNMTMPLSCTKNNSHHYIRAGNETGLELTLTNTSLINHKFCNLSDAHKKNLYDHTLMSIISTFHLSIPNFNQYEAMSCDFNGGKISVQYNLSHAYAIDAAEHCGTVANGVLQTFMRMAWGGSYIALDSGRGNWDCIMTSYQYLIIQNTTWEDHCQFSRPSPIGYLGLLSQRTRDIYISRRLLGTFTWTLSDSEGNATPGGYCLTRWMLIEAELKCFGNTAVAKCNEKHDEEFCDMLRLFDFNKQAISRLKSEAQMSIQLINKAVNALINDQLIMKNHLRDIMGIPYCNYSKYWYLNHTITGRTSLPKCWLVSNGSYLNETHFSDDIEQQADNMITEMLQKEYMERQGKTPLGLVDLFVFSTSFYLISIFLHLVKIPTHRHIVGKPCPKPHRLNHMGICSCGLYKQPGVPLKWKR

SEQ ID NO: 249 - protein, 491 aa, Artificial Sequence
  derived and/or modified protein sequence (wt) from LASV(Komina-R16;Clade V)__AHC95557__GPC
MGQIVTFFQEVPHVIEEVMNIVLIALSILAVLKGLYNIATCGLIGLVTFFLLCGRSCSSNLYKGVYELQSLDLNMETLNMTMPLSCTKNNSHHYIRVGNETGLELTLTNTSLLNHKFCNLSDAHKRNLYDHALMSIISTFHLSIPNFNQYEAMSCDFNGGKITVQYNLSHSYAGDTAKHCGTIANGVLQTFMRMAWGGSYIALDSGHGNWDCIMTSYQYLIIQNTTWEDHCQFSRPSPIGYLGLLSQRTRDIYISRRLLGTFTWTLSDSEGNATPGGYCLTRWMLIEAELKCFGNTAVAKCNEKHDEEFCDMLRLFDFNKQAISRLRSEAQMSIQLINKAVNALINDQLIMKNHLRDIMGIPYCNYSKYWYLNHTVTGRTSLPKCWLVSNGSYLNETHFSDDIEQQADNMITEMLQKEYMDRQGKTPLGLVDLFVFSTSFYLISIFLHLVKIPTHRHIVGKPCPKPHRLNRMGICSCGLYKQPGVPVKWKR

SEQ ID NO: 250 - protein, 491 aa, Artificial Sequence
  derived and/or modified protein sequence (wt) from LASV(Ouoma-R123;Clade V)__AHC95559__GPC
MGQIITFFQEVPHVIEEVMNIVLIALSILAVLKGLYNIATCGLIGLVTFLLLCGRSCSSSLYKGVYELQSLDLNMETLNMTMPLSCTKNNSHHYIRVGNETGLELTLTNTSLINHKFCNLSDAHKKNLYDHALMSIISTFHLSIPNFNQYEAMSCDFNGGKISVQYNLSHAYAIDAASHCGTVANGVLQTFMRMAWGGSYIALDSGHGNWDCIMTSYQYLIIQNTTWEDHCQFSRPSPIGYLGLLSQRTRDIYISRRLLGTFTWTLSDSEGNATPGGYCLTRWMLIEAELKCFGNTAVAKCNEKHDEEFCDMLRLFDFNKQAISRLKSEAQMSIQLINKAVNALINDQLIMKNHLRDIMGIPYCNYSKYWYLNHTVTGKTSLPKCWLVSNGSYLNETHFSDDIEQQADNMITEMLQKEYMERQGKTPLGLVDLFVFSTSFYLISIFLHLVKIPTHRHIVGKPCPKPHRLNHMGICSCGLYKQPGVPVKWKR

SEQ ID NO: 251 - protein, 491 aa, Artificial Sequence
  derived and/or modified protein sequence (wt) from LASV(Soromba-R;Clade V)__AHC95553__GPC
MGQIVTFFQEVPHVIEEVMNIVLIALSILAVLKGLYNIATCGLIGLVTFFLLCGRSCSSNLYKGVYELQSLDLNMETLNMTMPLSCTKNNSHHYIRVGNETGLELTLTNTSLLDHKFCNLSDAHKKNLYDHALMSIISTFHLSIPNFNQYEAMSCDFNGGKITVQYNLSHSYAGDAARHCGTIANGVLQTFMRMAWGGSYIALDSGHGNWDCIMTSYQYLIIQNTTWEDHCQFSRPSPIGYLSLLSQRTRDIYISRRLLGTFTWTLSDSEGNATPGGYCLTRWMLIEAELKCFGNTAVAKCNEKHDEEFCDMLRLFDFNKQAISRLRSEAQMSIQLINKAVNALINDQLIMKNHLRDIMGIPYCNYSKYWYLNHTVTGRTSLPKCWLVSNGSYLNETHFSDDIEQQADNMITEMLQKEYMDRQGKTPLGLVDLFVFSTSFYLISIFLHLVKIPTHRHIVGKPCPKPHRLNRMGICSCGLYKQPGVPVKWKR

SEQ ID NO: 252 - protein, 490 aa, Artificial Sequence; identical to SEQ ID NO: 6
  derived and/or modified protein sequence (wt) from LASV(Alzey;Clade VI)__SCA79105__GPC

SEQ ID NO: 253 - protein, 490 aa, Artificial Sequence
  derived and/or modified protein sequence (wt) from LASV(Lassa/H.sapiens-wt/TGO/2016/201600568;Clade VI)__AVN98153__GPC
MGQIITFFQEVPHVIEEVMNIVLIALSLLAILKGVYNVATCGIIGLVTFLFLCGRSCSLIYKGSYELQTLELNMETLNMTMPLSCTKNSSHHYIRVGNETGLELTLTNTSIINHKFCNLSDAHKRNLYDHALMSILSTFHLSIPNFNQYEAMSCDFNGGKISVQYNLSHAYAVDAAEHCGTVANGVLQTFMRMAWGGSYIALDSGRGNWDCIMTSYQYLIIQNTTWEDHCQFSRPSPIGYLGLLSQRTRDIYISRRLLGTFTWTLSDSEGNETPGGYCLTRWMLIEAELKCFGNTAVAKCNEKHDEEFCDMLRLFDFNKQAIQRLKSEAQMSIQLINKAVNALINDQLIMKNHLRDMMGIPYCNYSKYWYLNHTSSGRASLPKCWLVSNGSYLNETHFSDDIEQQADNMITEMLQKEYIDRQGKTPLGLVDLFVFSTSFYLISIFLHLIKIPTHRHIVGKPCPKPHRLNHMGICSCGLYKQPGVPTRWKR

SEQ ID NO: 254 - protein, 490 aa, Artificial Sequence
  derived and/or modified protein sequence (wt) from LASV(NIGERIA IKEJI;Clade II)__AMZ00373__GPC
MGQIITFFQEVPHVIEEVMNIVLIALSLLAILKGIYNVATCGLFGLISFLFLCGRSCSTMYKGVYELQTLELDMANLNMTMPLSCTKNNSHHYIMVGNETGLELTLTNQSIINHKFCNLSDAHKKNLYDHTLMSIISTFHLSIPNFNQYEAMSCDFNGGKISVQYNLSHSYAVDAANHCGTVANGVLQTFMRMAWGGSYIALDSGKGNWDCIMTSYQYLIIQNTTWEDHCQFSRPSPIGYLGLLSQRTRDIYISRRLLGTFTWTLSDSEGNDAPGGYCLTRWMLIEAELKCFGNTAIAKCNEKHDEEFCDMLRLFDFNKQAIKRLKAEAQMSIQLINKAVNALINDQLIMKNHLRDIMGIPYCNYSKYWYLNNTVTGKSSLPKCWLVSNGSYLNETHFSDDIEQQADNMITEMLQKEYMDRQGKTPLGLVDLFVFSTSFYLISIFLHLVKIPTHRHITGKPCPKPHRLNHMGICSCGLYKQPGVPVKWKR

SEQ ID NO: 255 - RNA, 1476 nt, Artificial Sequence
  derived and/or modified protein sequence (wt) from LASV(Josiah;Clade IV)__NP_694870__GPC
augggacaaauagugacauucuuccaggaagugccucauguaauagaagaggugaugaacauuguucucauugcacugucuguacuagcagugcugaaaggucuguacaauuuugcaacguguggccuuguugguuuggucacuuuccuccuguugugugguaggucuugcacaaccagucuuuauaaagggguuuaugagcuucagacucuggaacuaaacauggagacacucaauaugaccaugccucucuccugcacaaagaacaacagucaucauuauauaauggugggcaaugagacaggacuagaacugaccuugaccaacacgagcauuauuaaucacaaauuuugcaaucugucugaugcccacaaaaagaaccucuaugaccacgcucuuaugagcauaaucucaacuuuccacuuguccauccccaacuucaaucaguaugaggcaaugagcugcgauuuuaaugggggaaagauuagugugcaguacaaccugagucacagcuaugcuggggaugcagccaaccauugugguacuguugcaaaugguguguuacagacuuuuaugaggauggcuuggggugggagcuacauugcucuugacucaggccguggcaacugggacuguauuaugacuaguuaucaauaucugauaauccaaaauacaaccugggaagaucacugccaauucucgagaccaucucccaucgguuaucucgggcuccucucacaaaggacuagagauauuuauauuaguagaagauugcuaggcacauucacauggacacugucagauucugaagguaaagacacaccagggggauauugucugaccagguggaugcuaauugaggcugaacuaaaaugcuucgggaacacagcuguggcaaaauguaaugagaagcaugaugaggaauuuugugacaugcugaggcuguuugacuucaacaaacaagccauucaaagguugaaagcugaagcacaaaugagcauucaguugaucaacaaagcaguaaaugcuuugauaaaugaccaacuuauaaugaagaaccaucuacgggacaucaugggaauuccauacuguaauuacagcaaguauugguaccucaaccacacaacuacugggagaacaucacugcccaaauguuggcuuguaucaaaugguucauacuugaacgagacccacuuuucugaugauauugaacaacaagcugacaauaugaucacugagauguuacagaaggaguauauggagaggcaggggaagacaccauugggucuaguugaccucuuuguguucaguacaaguuucuaucuuauuagcaucuuccuucaccuagucaaaauaccaacucauaggcauauuguaggcaagucgugucccaaaccucacagauugaaucauaugggcauuuguuccuguggacucuacaaacagccuggugugccugugaaauggaagagauga

SEQ ID NO: 256 - RNA, 1473 nt, Artificial Sequence
  derived and/or modified protein sequence (wt) from LASV(LP;Clade I)__AAF86701__GPC
auggggcagauuauuacauucuuucaagaagugccacauguaauagaggaagucaugaacauugugcuaauugcgcuuucucuauuggcaaucuugaagggcuuguauaacaucgcuacaugugggauuauuggauugguugccuuuuuauucuuguguggcaagucuuguucccuaacccuuaaagggggauaugagcugcaaaccuuagaauuaaauauggagacccuaaacaugaccaugcccuuaucaugcaccaagaacagcagucaucauuacauaagagugggcaaugagacuggauuagaauugacuuuaacuaacaccagcauuauaaaucacaaauuuugcaacuuauccgaugcucacaaaaagaaucuuuaugaucaugcucucaugagcaucaucucaacauuccaucuauccauuccaaacuucaaucaguaugaagccaugaguugugauuucaauggagggaaaaucagugugcaauacaaccucucucauuccuaugcuggggaugcggccgaacacugugggacaguugccaacggaguguugcaaacauuuaugagaauggccugggguggaagauacauugcauuagacucaggaaagggaaacugggacuguauaaugaccagcuaccaguaccugauaauucaaaauacaacaugggaggaccacugccaauucucaagaccgucuccuaucggguaccuuggccuuuugucacaaaggacaagagauauauauauaaguaggaggcucuuggggaccuucaccuggacauugucagauucugagggcaaugaaacaccaggugguuauuguuuaaccagguggaugcuaauugaagcagaacucaaguguuuugggaauacagcuguggcaaaaugcaaugagaagcaugaugaggaguuuugugacaugcugagauuguuugauuucaacaagcaagcaauccguagguugaaggcugaggcccagaugaguauucaauuaauaaauaaagccgugaaugccuuaaucaaugaucaauuaaucaugaagaaccauuuaagagacaucaugggcauucccuacugcaauuacagcaaguauugguaccuuaaucauacuaguagcgggagaacaucacuaccaaaguguuggcuuauauccaaugggucauaucuaaaugaaacccaguucucugaugacauagaacagcaagccgacaauaugaucacagagaugcuucagaaagaauacauugaaagacaagggaaaacgcccuugggacuaguggacauuuucaucuuuagcacaagcuuuuaucugaucagcauuuucuugcauuuaauuaaaaucccuacacaucgacacaucguugggaaacccugucccaaaccccauagacuaaaucacaugggaguauguuccuguggacuguacaaacacccugguguuccaacaaaguggaagagauag

SEQ ID NO: 257 - RNA, 1473 nt, Artificial Sequence
  derived and/or modified protein sequence (wt) from LASV(803213;Clade II)__AAF86703__GPC
auggggcaaaucauaacauucuuccaagaggugccucaugucauagaggaggucaugaacauuguccuaauugcccucagucuccuggcgauacuaaaggggauuuacaauguugcuaccuguggucucuuuggguugaucuccuuucuucucuuauguggcagaucauguucaguaaccuauaaagguguuuaugagcuacaaacucuagaacugaacauggcaaaccuuaauaugacgaugcccuugucuuguacgaagaacaacagccaucauuacaucaugguuggaaaugaaacaggccuagagcugaccuuaacaaacacaagcaucauuaaccacaaguuuugcaaccuuucugaugcacauaaaaagaaucucuaugaccaugcucugaugagcaucaucucaacuuuccacuuaucuauuccaaacuuuaaucaguaugaagcaaugaguugugacuucaauggagggaaaauaaguguucaguacaaccucagucacuccuuugcuguggaugcagccaaccacugugggaccauugccaaugguguucugcagaccuuuaugaggauggcuugggguggcaguuacauagcacuugauuccggaaaagggaacugggauuguauaaugacuuccuaucaauacuugauaauucaaaacaccacuugggaagaucacugccaguuuucucgcccaucuccuauugguuacuuaggacuauugucacagagaacuagagauaucuauaucagucgaagacuucucggaacuuucacuuggacccuuucugauucugaagguaaugaagcaccugguggguauugucuaacuagauggauguuaauugaagcagaacugaaaugcuuugggaacacagcaguugcaaagugcaacgaaaaacaugaugaagaauuuugugacauguugagauuguuugauuucaacaaacaagcuauaaagaggcugaaaacagaagcacagaugaguauucagcugauaaacaaggcagugaaugcauuaaucaaugaccaacugauuaugaagaaccaucuaagggacaucaugggaauuccuuauugcaacuacaguagauauugguaucuaaaucacacugugacagggaagacaucacugccaagauguuggcuugugucaaaugguuccuaccuaaacgaaacacauuuuucugaugacauugaacaacaagcagacaacaugauaacagaaauguugcagaaagaguacauggacaggcaggggaaaacaccuuuaggguuaguggaccuuuuugucuuuagcacuagcuuuuaccucauaagcaucuuucuccaucuggucaagaucccaacucacaggcacaucguggggaaaccuugcccuaagccacacagacucaaccacaugggcaucugcucauguggucuguauaaacaucccgguguuccaguaaaauggaagagauaa

SEQ ID NO: 258 - RNA, 1473 nt, Artificial Sequence
  derived and/or modified protein sequence (wt) from LASV(GA391;Clade III)__CAA36645__GPC
augggacagauugugacauucuuccaagaaguuccucauguuauugaggaagugaugaauauuguccuuauugcacuauccauccuagcaauucugaagggacuauacaauguugccacguguggcuugauagggcuugucacauuccuucuacuuucaggaaggucaugcucacugaucuacaaagggacuuacgagcugcaaacccuugaguugaauauggagacucuuaauaugaccaugccgcuauccugcacaaagaacaacagucaucauuauauaaggguggggaaugagacaggacuugagcucaccuugaccaacaccagcauucuuaaucacaaauucuguaaccucucugaugcccacaaaaggaaucuuuaugaucacagccucaugaguaucaucucuaccuuucaucuguccauucccaacuucaaucaauaugaggcaaugagcugcgauuucaauggggggaaaaucacugugcaauacaaccugagucauagcuucgcaguggaugcagcaggucacugcggcacacuugcaaauggugucuuacaaacauuuaugagaauggcuuggggagggaguuauauugcucuugauucuggacgcgguaacugggacuguauaaugaccaguuaccaauaucuaaucauucagaauacaaccugggaugaccacugccaauuuuccagaccaucaccuauuggcuaccuugggcuucucucacaaagaacuagagacauauacauuagcagaagguuguuggggacauucaccuggacacuaucagacucagagggaaaugaaacaccagggggauacugccuuacuagauggauguugauugaggccgaauuaaagugcuuuggaaacacugcaguagccaagugcaaugagaaacaugaugaagaauuuugugacaugcuaagguuguucgauuucaacaaacaggccauaaggaggcucaaaacagaggcccaaaugagcauacagcugaucaacaaggcugucaaugcuuuaauaaaugaucagcucaucaugaagaaccacuugagagacaucaugggcauaccauauuguaacuacagcagauauugguaccuuaaccacacaucaacaggaaagaccucacuaccaagguguuggcuuaucucaaauggaucauaucucaaugagaccaaguuuucagaugacaucgaacaacaagcugacaacaugauaacagagaugcuacaaaaggaauacauagauagacagggcaaaacuccacugggguuaguugaccuauuuguuuuuagcacaaguuucuaucugauaagcaucuuucuccaccuggucaaaauaccaacccauagacacauuguagguaaaccuugcccaaaaccccacaggcugaaccacaugggcaucugcuccuguggucuauacaaacagccaggugugccugucagauggaagagguga

SEQ ID NO: 259 - RNA, 1476 nt, Artificial Sequence
  derived and/or modified protein sequence (wt) from LASV(AV;Clade V)__CCA30314__GPC
auggggcaaauagugacauucuuucaagaggugccucaugugauagaagaggugaugaacauuguucuuauagcauugucuauauuggcaguguugaaaggucucuacaacauugccacaugcggccucaucggcuugaucacuuuccucuuauuauguggaaggucuugcucauccaaccucuacaagggggucuaugaacuucaaucucuggaccugaacauggagacacucaacaugaccaugccccucuccugcacaaagaacaauagucaucacuacauaaggguuggcaaugacacagggcuggaacugaccuugaccaacacgagcauacucaaucacaaauucugcaaccuaucagaugcucacaagaaagaccuauaugaucacgcacucaugagcauaaucucaacuuuccaccugucuauacccaauuucaaccaauacgaagcaaugaguugugacuucaaugggggcaaaaucagugugcaguacaaucuaagccauucuuaugcuauagaugcagcuaaucauugcggcacagucgcgaauggcaucuugcagacuuucaugagaauggcauggggugggagcuauauugcucuugacucaggccguggaaacugggacuguauuaugacuagcuaucaauaucugauuauucagaacacaaccugggaaaaucacugucaguucucaagaccaucuccuauugguuaucuuggucuccucucacagaggacuagagacauuuacauuagcaggagguugcugggcacauucacguggacacugucagacucugaggguaaugcuacaccaggagguuauugucugaccagguggauguuaauugaagcugaguugaaaugcuuuggaaacacagcaguagcaaaguguaaugaaaagcaugaugaagaauuuugcgacaugcucagacuuuuugauuuuaauaagcaggcuauaaguagauugaaaucugaagcacaaaugagcauccaacugaucaacaaagcagugaaugcuuugaucaacgaucaauuaauuaugaagaaccacuugcgagacaucauggggauuccauauuguaauuacagcaaguauugguaccucaaucauacaauaacuggcaaaaccucauuaccuaaauguuggcuuguaucuaaugguucauacuugaaugaaacccauuuuucugacgacaucgagcaacaagcugacaauaugaucacagagaugcuacaaaaggaauacauggagaggcaagggaaaacgccuuuggguuuaguugaucuguuuguguuuagcacaaguuuuuaucuaauuaguaucuuccuccgacuagucaagauuccaacccauagacacauugugggcaaaccauguccuaagccccacagguugaaccacaugggcauuuguucuugcggcuuauacaagcagccuggcguccccgugagauggaagagauag

SEQ ID NO: 260 - RNA, 1473 nt, Artificial Sequence
  derived and/or modified protein sequence (wt) from LASV(Togo/2016/7082;Clade VI)__AMR44577__GPC
auggggcaaauaauaaccuucuuccaggagguuccucauguuauagaggaggugaugaacauuguucugauagcacucucacuccuagcuauccugaaaggggucuacaauguggcaacaugugggauaauugggcuugugaccuuccucuuucucuguggaagaucuuguucacugaucuacaaaggcaguuaugagcugcaaacauuggaguuaaauauggagacccuaaacaugaccaugccucugucaugcacuaaaaauaguagccaccauuauauucgaguugggaacgagacuggcuuagagcugacauugaccaacaccagcauuauaaaucacaaauucuguaaccugucagaugcucacaaacguaaucuguaugaccacgcacucaugagcauccuuuccacauuccaucuguccaucccaaacuucaaccaguaugaggcgaugaguugugacuucaauggaggcaaaaucagugugcaauauaaucucagccaugcuuaugcaguugaugcugccgaacacugcggaacaguugcaaauggugugcuacaaacauucaugaggauggcuuggggaggaaguuacauugcacuugacucugggagaggcaauugggacuguauuaugacaagcuaccaauacuuaaucauucagaauacaacaugggaagaucacugccaauuuucaagaccuucuccuauugguuaucucggcuuauugucacaaagaacaagagacauuuauaucaguaggaggcugcuggguacauucaccuggacacuuucugacucagagggaaaugagacaccaggcggauacuguuuaacaagauggaugcugauagaggcugagcuaaaauguuuuggaaacacagcuguugcaaaguguaaugagaagcaugaugaggaauucugcgacauguuaagguuguuugacuucaacaaacaggcaauucagaggcucaaaucagaggcacaaaugagcauccaguuaauaaauaaagcagugaaugcauugauaaaugaucagcucauuaugaagaaccacuuaagggauaugauggguauaccguauugcaacuacaguaaguauugguaucucaaucacaccucaucagggagaacaucguugccuaaaugcuggcuuguuuccaauggaaguuaucugaaugagacccacuucucagaugauauugaacaacaggcagacaacaugauaacugaaauguuacaaaaggaauauaucgauaggcaggguaaaacaccuuuaggacuuguugaccuuuuuguuuucagcacgaguuuuuaccuuauaaguauauucuuacacuugauaaagauaccuacucauaggcacauaguuggaaagccaugccccaagccacaccgccucaaccacauggggaucugcucuuguggacuauacaagcagccuggugucccaaccagauggaagagauaa

SEQ ID NO: 261 - RNA, 1473 nt, Artificial Sequence
  derived and/or modified protein sequence (wt) from LASV(KAK-428;Clade n.d. (VII))__ANH09740__GPC
augggucaaauagugaccuucuuccaggaaguaccucauguuauagaggaagugaugaacauaguucugauagcacuuucucucuuagccauccugaagggccucuacaauuuugccaccuguggaguaauuggacugauaacauuccuuuuacuuuguggaagauccuguucagcgaccuacaaaggccaauaugaacuccaaacuuuagaacuaaauauggagucccuaaacaugaccaugccacugucuugcacaaaaaacaacagucaucauuauaucagagcuggcaacaacacaggccuggaguugacccucaccaacaccagcauuauaucucauaaauucugcaaccuuucugaugcucacaagaagaaccuuuaugaccacacucuuaugaguauaauaacuaccuuucauuuguccaucccaaauuucaaccaguaugaggcaaugaguugugacuuuaacggugggaaaaucagcauacaguacaaccucagucacuccuacgcuggugaugcugcgcaacacuguggaacaguugcaaauggggugcugcaaaccuuuaugagaauggcuuggggagguaguuaucuggcccuugauucaggaagaagagguugggacugcauaauuuccaguuaccaauacuugaucauccaaaacacaacuugggaugaccauugccaguuuucaaggccauccccgaucggguaucuuggguuuguaucgcagaagaccagggacaucuauauaaguagaagacuccuuggaacuuuuacauggacacuuucagacuccgagggacaugacaugccaggugguuacugcuugaccagauggaugcucauugaagcugauuuaaaguguuuuggaaacacagcugucgcuaaguguaaugagaaacaugacgaggaguucugugacauguggagguuguuugacuuuaauaagcaagccauucaaaggcucaaagcagaggcccagaugaacauccagcucauaaauaaagcugucaaugcucucauaaaugaccaauugaugaugaaaaaccauuuaagggauaucaugggcauucccuauugcaauuacaguaaauucugguaucucaauaacaccacgacugggagaaccucacugccaagaugcuggcugauuucaaauggguccuacuuaaaugagacucacuucucagaugauauugaacagcaagcugacaauaugauaacugagauguugcagaaagaauacauggacagacaaggaaaaacaccgcuaggacugguugaucucuuuguauucaguacaagcuuuuaccucauuaccauuuucuuacaucuugugaaaauaccaacccacagacacauaguuggcaagccgugcccuaaaccacacagacugaaucacaugggcaucugcuccugugggcucuacaaacagccuggugugccaguacgauggaagagauga

SEQ ID NO: 262 - RNA, 1473 nt, Artificial Sequence
  derived and/or modified protein sequence (wt) from LASV(Acar 3080;Clade I)__AAT49014__GPC
auggggcagauuauuacauucuuucaagaagugccacauguaauagaggaagucaugaacauugugcuaauugcgcuuucucuauuggcaaucuugaagggcuuguauaacaucgcuacaugugggauuauuggauugguugccuuuuuauucuuguguggcaagucuuguucccuaacccuuaaagggggauaugagcugcaaaccuuagaauuaaauauggagacccuaaacaugaccaugcccuuaucaugcaccaagaacagcagucaucauuacauaagagugggcaaugagacuggauuagaauugacuuuaacuaacaccagcauuauaaaucacaaauuuugcaacuuauccgaugcucacaaaaagaaucuuuaugaucaugcucucaugagcaucaucucaacauuccaucuauccauuccaaacuucaaucaguaugaagccaugaguugugauuucaauggagggaaaaucagugugcaauacaaccucucucauuccuaugcuggggaugcggccgaacacugugggacaguugccaacggaguguugcaaacauuuaugagaauggccugggguggaagauacauugcauuagacucaggaaagggaaacugggacuguauaaugaccagcuaccaguaccugauaauucaaaauacaacaugggaggaccacugccaauucucaagaccgucuccuaucggguaccuuggccuuuugucacaaaggacaagagauauauauauaaguaggaggcucuuggggaccuucaccuggacauugucagauucugagggcaaugaaacaccaggugguuauuguuuaaccagguggaugcuaauugaagcagaacucaaguguuuugggaauacagcuguggcaaaaugcaaugagaagcaugaugaggaguuuugugacaugcugagauuguuugauuucaacaagcaagcaauccguagguugaaggcugaggcccagaugaguauucaauuaauaaauaaagccgugaaugccuuaaucaaugaucaauuaaucaugaagaaccauuuaagagacaucaugggcauucccuacugcaauuacagcaaguauugguaccuuaaucauacuaguagcgggagaacaucacuaccaaaguguuggcuuauauccaaugggucauaucuaaaugaaacccaguucucugaugacauagaacagcaagccgaccauaugaucacagagaugcuucagaaagaauacauugaaagacaagggaaaacgcccuugggacuaguggacauuuucaucuuuagcacaagcuuuuaucugaucagcauuuucuugcauuuaauuaaaaucccuacacaucgacacaucguugggaaacccugucccaaaccccauagacuaaaucacaugggaguauguuccuguggacuguacaaacacccugguguuccaacaaaguggaagagauag

SEQ ID NO: 263 - RNA, 1473 nt, Artificial Sequence; identical to SEQ ID NO: 256
  derived and/or modified protein sequence (wt) from LASV(Pinneo-NIG-1969;Clade I)__AIT17836__GPC

SEQ ID NO: 264 - RNA, 1473 nt, Artificial Sequence
  derived and/or modified protein sequence (wt) from LASV(ISTH0009-NIG-2011;Clade II)__AIT17404__GPC
augggacaaaucauaacauuuuuccaggaaguaccucaugucauagaggaagugaugaacauuguccugauugcucucagccuucuggcaauacugaaggggaucuacaauguugccaccuguggccuauuuggacugguguccuuucuccucuuaugugggagaucaugcucaacaacuuauaaggguguuuaugagcuacaaacucuagagcuggacauggcaagccuuaauaugacaaugccccuaucuugcacaaagaacaacagucaccauuacaucauggucggaaaugagacuggcuuggagcugacuuuaacaaauacaaguauuaucaaccacaaguuuuguaaccuuucugaugcacauaaaaagaaucucuaugaccaugcuuuaaugaguaucaucucaaccuuccacuuaucuauuccuaauuuuaaucaguaugaagcaaugaguugugacuucaauggggggaagauaaguguucaguacaaccuuagccacgcuuaugcuguagaugcagccaaucacugugggacuaucgccaauggcguucuucagacuuuuaugaggauggcuugggguggcaguuacauagcacuugauuccggaaaggggaguugggauuguauaaugacuuccuaccaauauuugauaauccagaacaccacuugggaagaucacugccaguuuucucgcccauccccuaucgguuaucuggggcuacugucacaaaggaccagagacauuuacaucagucgaagacuucuugggacuuuuacuuggacucucucugauucugaagguaaugaaacaccggguggguacugucuaacaagauggaugcugauugaggccgaguugaagugcuuugggaacacagcaguugcgaaaugcaaugagaaacaugaugaagaguuuugugacauguuaagacuguuugauuucaacaaacaagcuauaaggaggcuaaagacagaagcacagaugaguauccaacugauaaacaaagcagugaaugcauugaucaaugaccagcuuauuaugaagaaucacuugagagauaucaugggaauuccuuacugcaauuacagcaaguacugguaucuaaaucacacuguaacagggaagacaucguugccaaggugcuggcuugugucaaaugguuccuaccugaaugagacacauuuuucugaugacauugaacaacaggcagacaacaugauaacagaacuguugcaaaaggaguacauggacaggcaagggaaaacacccuuaggguuaguagaucuuuuugucuucagcaccagcuuuuaucucauuagcaucuuccuccaccugaucaaaaucccaacccacagacauaucacagggaaacccugcccuaaaccacacagacuuaaccacaugggcauaugcucauguggucuauacaaacauccugguguaccagucaaguggaaaagauag

SEQ ID NO: 265 - RNA, 1473 nt, Artificial Sequence
  derived and/or modified protein sequence (wt) from LASV(ISTH0012-NIG-2011;Clade II)__AIT17408__GPC
augggacaaaucauaacauuuuuccaggaagugccucaugucauagaagaagugaugaacauuguccugauugcucucagccuucuggcaauauugaaagggaucuacaauguugcuaccuguggccucuuuggauugguguccuuccuucucuuauguggaagaucaugcucaacaacuuacaaagguguuuaugaauuacaaacucuagagcuagacauggcaagccuuaauaugacaaugcccuuaucuugcacaaagaauaacagccaccauuacaucauggucggaaaugagacugguuuagagcugacucuaacaaauacaaguaucaucaaccacaaguucuguaaccuuucugaugcacauaaaaagaaucuuuaugaccaugcuuuaaugaguaucaucucaaccuuccacuuauccauucccaacuucaaucaguaugaagcaaugaguugugacuucaauggggggaagauaaguguucaguacaaccuuagccacacuuaugcuguagaugcagcuaaccacugugggacuguugcuaauggcguucuccagacuuucaugaggauggcuugggguggcaguuacauagcacuugacuccgggaaagggagcugggauugcauaaugacuuccuaccaauaucugauaauccagaacaccacuugggaagaucacugccaguuuucucgcccaucccccaucgguuaucuggggcugcugucacaaaggaccagggacauuuacaucagucgaagacuccuugggacuuuuacuuggacccucucugauucugaaggcaaugaaacaccggguggguauugucuaacaagauggaugcugauugaggccgaauugaagugcuuugggaacacagcaguugcgaaaugcaaugagaaacaugaugaggaguuuugugacauguuaagauuguuugacuuuaacaaacaagcuauaaggaggcugaagacagaagcgcagaugaguauccaacugauaaacaaagcagugaacgcacugaucaaugaccagcugauuaugaagaaucauuuaagagauaucaugggaauuccuuacugcaauuacagcaaguauugguauuuaaaucacacuguaacagggaagacaucguugccaagaugcuggcuugugucgaaugguuccuaccugaaugagacacauuuuucugaugacauugaacaacaagcagacaacaugauaacagaacugcugcagaaggaguacauggacaggcaaggaaaaacacccuuaggguuaguagaucuuuuugucuucagcaccaguuuuuaucucauuagcaucuuucuccaccuggucaaaaucccaacucacagacaugucauaggaaaacccugcccuaaaccacacagacucaaccacaugggcauaugcucauguggucuguacaaacauccuggugugccagucaaauggaaaagauag

SEQ ID NO: 266 - RNA, 1473 nt, Artificial Sequence
  derived and/or modified protein sequence (wt) from LASV(ISTH0047-NIG-2011;Clade II)__AIT17412__GPC
auggggcaaaucauaacauuuuuccaggaagugccucaugucauugaggaggugaugaacauugucuuaauugcucucagccuucuagcaauacuaaaagggauuuacaauguugcuaccuguggccucuuuggguuggugucuuuucuucucuuauguggaaggucaugcucaacaacuuacaaggguguuuaugagcuucaaacucuggagcuggauauggcaagccuuaauaugacaaugcccuuauccugcacgaagaacaacagccaccacuacaucaugguuggaaaugagacuggcuuggagcugacuuuaacaaacacaaguaucauuaaccacaaguucugcaaccuuucugaugcacauaaaaagaaucucuaugaccaugcuuuaaugagcaucaucucaaccuuccaccuaucuaucccuaacuuuaaucaguaugaagcaaugaguugugacuucaauggaggaaagauaaguguucaguacaaccucagccaugcuuaugcuguggaugcagcuaaccauugugggaccauugccaauggaguccuucaaacuuuuaugaggauggccugggguggcaguuacauagcacuugauucuggaaaggggaguugggauuguauaaugacguccuaccaauauuugauaauccaaaacaccaguugggaagaucacugccaguuuucucgcccgucccccaucgguuaucuggggcuacugucacaaagaaccagggacauuuacaucagccgaaggcuccuuggaacuuuuacuuggacucucucugacucugagggcaaugaaacaccggguggguacuguuuaacaagauggauguugauugaggccgaauuaaagugcuuugggaacacagcaguugcgaaaugcaaugagaaacaugaugaagaguuuugugacauguuaagauuguuugacuuuaacaaacaggcuauaaggaggcuaaagacagaagcacagaugaguauccaacuaauaaacaaagcagugaacgcacugaucaaugaccagcucauuaugaagaaucauuuaagagauaucaugggaauuccuuacugcaauuacagcaaguauugguauuuaaaccacacuguaacagggaagacaucguugccaagaugcuggcuuguaucaaaugguuccuaccugaaugaaacacauuuuucugaugacauugagcaacaagcagacaacaugauaacagaauuguuacagaaagaguacauugacaggcaagggaaaacaccuuuaggguugguggaucuuuuugucuucagcacuagcuucuaccuuauuagcaucuuccuccaccuggucaaaaucccaacccacagacaugucauagggaaacccugccccaagccacacagacucaaccacaugggcauaugcucauguggucuguacaaacauccugguguaccagucaaguggaaaagauag

SEQ ID NO: 267 - RNA, 1473 nt, Artificial Sequence
  derived and/or modified protein sequence (wt) from LASV(ISTH0073-NIG-2011;Clade II)__AIT17416__GPC
auggggcaaaucauaacguuuuuccaggaagugccucaugucauugaggaggugaugaacauugucuuaauugcucucagccuucuagcaauacuaaaagggauuuacaauguugcuaccuguggccucuuuggguugguguccuuucuucuuuuauguggaaggucaugcucaacaacuuacaaggguguuuaugagcuucaaacucuggagcuggauauggcaagccuuaauaugacaaugcccuuauccugcacgaagaacaacagccaccacuacaucaugguuggaaaugagacuggcuuggagcugacuuuaacaaacacaaguaucaucaaccacaaguucugcaaccuuucugaugcacauagaaagaaucucuaugaccaugcuuuaaugagcaucaucucaaccuuccaccuauccaucccuaacuuuaaucaguaugaagcaaugaguugugacuucaauggaggaaagauaaguguucaguauaaccucagccaugcuuaugcuguggaugcagcuaaccauugugggaccauugccaacggaguccuucaaacuuuuaugaggauggccugggguggcaguuacauagcacuugauucuggaaaggggaguugggauuguauaaugacguccuaccaauauuugauaauccaaaacaccaguugggaagaucacugccaguuuucucgcccguccccuaucgguuaucuggggcugcugucacaaagaaccagggacauuuacaucagccgaaggcuccuuggaacuuuuacuuggacucucucugacucugagggcaaugaaacaccggguggguauuguuuaacaagauggaugcugauugaggccgaauuaaagugcuuugggaacacagcaguugcgaaaugcaaugagaaacaugaugaagaguuuugugacauguuaagguuguuugacuuuaacaaacaggcuauaaggaggcuaaagacagaagcacagaugaguauccaacuaauaaacaaagcagugaacgcauugaucaaugaccagcucauuaugaagaaucauuuaagagauaucaugggaauuccuuacugcaauuacagcaaguauugguacuuaaaccacacugugacagggaagacaucguugccaagaugcuggcuuguaucaaaugguuccuaccugaaugaaacacauuuuucugaugacauugagcaacaagcagacaacaugauaacagaauuguuacagaaagaguacauugacaggcaagggaaaacacccuuaggguugguggaucuuuuugucuucagcacuagcuucuaccuuauuagcaucuuccuccaccuggucaaaaucccaacccacagacaugucauagggaaacccugccccaagccacacagacucaaccacaugggcauaugcucauguggucuguacaaacauccugguguaccagucaaguggaaaagauag

SEQ ID NO: 268 - RNA, 1473 nt, Artificial Sequence
  derived and/or modified protein sequence (wt) from LASV(ISTH0230-NIG-2011;Clade II)__AIT17420__GPC
augggacaaaucauaacauuuuuccaggaaguaccccaugucauagaggaagugaugaacauuguccugauugcucucagccuucuggcaauacugaaggggaucuacaauguugccaccuguggccuauuuggacugguguccuuucuccucuuauguggaagaucaugcucaacaacuuauaaggguguuuaugagcuacaaacucuagagcuggacauggcaagccuuaauaugacaaugccccuaucuugcacaaagaacaacagucaccauuacaucauggucggaaaugagacuggcuuggagcugacuuuaacaaauacaaguauuaucaaccacaaguuuuguaaccuuucugaugcacauaaaaagaaucucuaugaccaugcucuaaugaguaucaucucaaccuuccacuugucuauuccuaauuuuaaucaguaugaagcaaugaguugugacuucaauggggggaagauaaguguucaguacaaccuuagccacacuuaugcuguagaugcagccaaucacugugggacuaucgccaauggcguucuucagacuuuuaugaggauggcuugggguggcaguuauauagcacuugauuccggaaaggggaguugggauuguauaaugacuuccuaccaauauuugauaauccagaacaccacuugggaagaucacugccaguuuucucgcccauccccuaucgguuaucuggggcuacugucacaaaggaccagagacauuuacaucagucgaagacuucuugggacuuuuacuuggacucucucugauucugaagguaaugaaacaccggguggguacugucuaacaagauggaugcugauugaggccgaguugaagugcuuugggaacacagcaguugcgaaaugcaaugagaaacaugaugaagaguuuugugacauguuaagacuguuugauuucaauaaacaagcuauaaggaggcuaaaaacagaagcacagaugaguauccaacugauaaacaaagcagugaaugcacugaucaaugaccagcuuauuaugaagaaucacuugagagauaucaugggaauuccuuacugcaauuacagcaaguacugguaucuaaaucacacuguaacagggaagacaucguugccaaggugcuggcuugugucaaaugguuccuaccugaaugagacacauuuuucugaugacauugaacaacaggcagacaacaugauaacagaacuguugcaaaaggaguacauggacaggcaagggaaaacacccuuaggguuaguagaucuuuuugucuucagcaccagcuuuuaucucauuagcaucuuccuccaccugaucaaaaucccaacccacagacauaucacagggaaacccugcccuaaaccacacagacuuaaccacaugggcauaugcucauguggucuauacaaacauccugguguaccagucaaguggaaaagauag

SEQ ID NO: 269 - RNA, 1473 nt, Artificial Sequence
  derived and/or modified protein sequence (wt) from LASV(ISTH0531-NIG-2011;Clade II)__AIT17424__GPC
augggacaaaucauaacauuuuuccaggaaguaccccaugucauagaggaagugaugaacauuguccugaucgcucucagccuucuggcaauauugaaagggaucuacaauguugcuaccuguggccucuuuggauugguguccuuucuucucuuauguggaagaucauguucaacaacuuacaaggguguuuaugagcuacaaacucuagagcuagacaugacaaaccucaauaugacaaugcccuuaucuugcacgaaaaacaacagccaccauuacaucauggucggaaaugagacuggucuggagcugacuuugacaaauacaagcaucaucaaccacaaguuuuguaaccucucugaugcacauaaaaagaaucuuuauaaccaugcuuuaaugagcauuauuucaacuuuccacuuauccauucccaacuuuaaucaguaugaggcaaugaguugugacuucaauggagggaagauaaguguccaguacaaccuuagccacgcuuaugcuguagaugcagcuaaccacugugggaccauugccaauggcgugcuucagacuuuuaugaggauggcuugggguggcaguuacauagcacuugauuccggaaaggggaguugggauuguauaaugacuuccuaccaauauuugauaauccaaaacaccacuugggaagaucacugucaguuuucucgcccauccccuauugguuaucugggguuacugucacaaaggaccagggacauuuacaucagucgaagacuucuugggacuuuuacuuggacucucucugauucugaagguaaugaaacaccagguggguauugucuaacaagauggaugcugauugaggccgaguugaagugcuuugggaacacagcaguugcgaaauguaaugagaaacaugaugaagaguuuugugacauguugagauuguuugacuuuaacaaacaagcuauaaggaggcugaagacagaggcacagacgaauauccaacugauaaauaaagcagugaacgcacugaucaaugaccagcugaucaugaagaaucauuuaagagauaucaugggaauuccuuacugcaauuacagcaaguauugguacuuaaaucacacugugacagggaagacaucguugccaagaugcuggcuugugucaaaugguuccuacuugaaugagacacacuuuucugaugacauugaacaacaagcagacaauaugauaacagaacuguugcagaaggaguacauggacaggcaagggaaaacacccuuaggguugguagaucuuuuugucuucagcaccagcuuuuaucucauuagcaucuuccuccaccugguuaaaaucccaacccacagacacaucauagggaaaccuugcccuaaaccacacagacucaaccacaugggcauaugcucauguggucuguacaaacauccugguguaccagucaaguggaagagauag

SEQ ID NO: 270 - RNA, 1473 nt, Artificial Sequence
  derived and/or modified protein sequence (wt) from LASV(ISTH0595-NIG-2011;Clade II)__AIT17428__GPC
augggacaaaucauaacauuuuuccaggaaguaccucaugucauagaggaagugaugaacauuguccugauugcucucagccuucuggcaauacugaaagggaucuacaauguugcuaccuguggccucuuuggauugguguccuuucuccucuuaugugggagaucaugcucaacaacuuacaaggguguuuaugagcuacaaacccuagagcuagacauggcgagccucaacaugacaaugcccuugucuugcacgaagaacaacucccaccacuacaucauggucggaaaugagaccggcuuggaguugacuuuaacaaauacaagcauuaucaaccacaaguuuuguaaccuuucugaugcacauaaaaagaaccuuuaugaccaugcuuugaugaguauuaucucaaccuuccacuuauccauuccuaacuuuaaccaguaugaggcaaugaguugugacuucaaugggggaaagauaaguguucaguacaaccuuagccacacuuaugcuguagaugcagcuaaccacugugggaccauugccaauggcguucuucagacuuuuaugaggauggcuugggguggcaguuauauagcacuugauuccggaaaggggagcugggauugcauaaugaccuccuaccaauauuugauaauccaaaacaccacuugggaagaucacugccaguuuucucgcccaucccccaucgguuaccuggggcuacugucacaaaggaccagggacauuuacaucagucgaagacuucuugggacuuuuacuuggacucucucugacucugaagguaaugaaacaccggguggguauugucuaacaagauggaugcugauugcggccgauuugaagugcuuugggaacacagcaguugcaaaaugcaaugagaagcaugaugaggaguuuugugacauguuaagauuguuugacuuuaacaaacaagcuauagagaggcugaagacagaagcacagaugaguauccagcugauaaacaaagcaguaaacgcacugaucaaugaccagcugaucaugaagaaucauuugagagauaucaugggaauuccuuacugcaauuacagcaaguauugguaucuaaaucacacuguaacagggaggacaucguugccaagaugcuggcuugugucaaaugguuccuaccugaaugagacacauuuuucugaugacauugaacaacaagcagacaacaugauaacagaacuguugcaaaaggaguacauggacaggcaagggaaaacaccuuuaggguuaguagaucuuuuugucuucagcaccagcuuuuaccucauuagcaucuuccuccaccugguuagaaucccaacccacagacaugucauagggaaacccugccccaaaccacacagacuuaaccauaugggcauaugcucauguggucuguacaaacauccuggugugccagucaaguggaaaagauag

SEQ ID NO: 271 - RNA, 1473 nt, Artificial Sequence
  derived and/or modified protein sequence (wt) from LASV(ISTH0964-NIG-2011;Clade II)__AIT17430__GPC
augggacaaaucauaacauuuuuccaggagguaccucaugucauagaggaagugaugaacauugucuugauugcucucagccuucuggcaauacugaaagggaucuacaauguugccaccuguggccucuuuggauugguguccuuucuccucuuauguggaagaucaugcucaacaacuuauaaggguguuuaugagcuacaaacucuagagcuagacauggcaagucuuaauaugacaaugcccuuaucuugcacaaagaacaacagccaccauuacaucauggucggaaaugagacuggcuuggaguugacuuuaacaaauacaaguauuaucaaccacaaguuuuguaaccuuucugaugcacauaaaaagaaucucuaugaccaugcuuuaaugaguaucaucucaaccuuccacuuaucuauuccuaauuucaaucaguaugaagcaaugagcugugacuucaauggggggaggauaaguguucaguacaaccugagccacacuuaugcuguagaugcagccaagcacugugggacuaucgcuaauggcguucuucagacuuuuaugaggauggcuugggguggcaguuacauagcacuugauuccggaaaggggaguugggacuguauaaugacuuccuaccaauauuugauaauccaaaacaccacuugggaagaucacugccaguuuucucgcccauccccuauugguuaucuggggcuacuaucacaaaggaccagagacauuuauauuagucgaagacuucuugggacuuuuacuuggacucucucugauucugaggguaaugagacaccggguggguauugucuaacaagauggaugcugauugaggccgaguugaaguguuuugggaacacagcaguugcgaaaugcaaugagaaacaugaugaagaguucugugacauguugagacuguuugacuuuaauaaacaagcuauaaggaggcugaagacagaagcacagaugagcauccaacugauaaacaaagcaguaaacgcacugaucaaugaccagcuuauuaugaagaaucacuugagggauaucaugggaauuccuuacugcaauuacagcaaguacugguaucuaaaucauacuguaacagggaagacaucguugccaaggugcuggcuugugucaaaugguuccuaccugaaugagacacauuucucugaugacauugaacaacaagcagacaacaugauaacagaacuauugcaaaaggaguacauagacaggcaagggaaaacacccuuaggguuaguagaucuuuuugucuuuagcaccagcuuuuaucucauuagcaucuuccuccaccuggucaaaaucccaacccacagacauguuauagggaaaccuugcccuaaaccacacagacucaaccacaugggcauaugcucauguggucuuuacaaacauccugguguuccagucaaguggaaaagauag

SEQ ID NO: 272 - RNA, 1473 nt, Artificial Sequence
  derived and/or modified protein sequence (wt) from LASV(ISTH1038-NIG-2011;Clade II)__AIT17438__GPC
augggacagaucauaacauuuuuccaggaaguaccucaugucauagaggaggugaugaacauuguucugauugcucucagccuucuggcaauacugaaggggaucuacaauguugcuaccuguggccucuuuggauuggugucuuuucuccuccuguguggaagaucaugcucaacaaccuacaaggguguuuaugagcuacaaacucuagagcuagacauggcaaaccuuaacaugacaaugccccugucuugcacgaagaacaacucccaccauuacaucaggguuggaaaugagacuggcuuggagcugaccuuaacaaauacaagcauuaucagccacaaguuuuguaaccuuucugaugcacauaaaaagaaucuuuaugaccaugcuuugaugaguaucaucucaaccuuccacuuauccauuccuaacuuuaaucaguaugaagcaaugaguugugacuucaaugggggaaagauaaguguucaguauaaccuuagucacaccuaugcuguggaugcagccaaccacugugggaccauugccaauggcguucuucagacuuuuaugaggauggcuugggguggcaguuauauagcacuugauuccggaaaggggagcugggauugcauaaugacuuccuaccaauauuugauaauccaaaacacuacuugggaagaucacugccaguuuucucgcccaucccccaucggcuaucuggggcugcugucacaaaggaccagggacauuuacaucagucgaagacuucuugggacuuuuacuuggacucucuccgacucugaaggcaaagaaacaccggguggguauugucuaacaagauggaugcugauugaggcugaguugaagugcuuugggaacacagcagucgcaaagugcaaugagaaacaugaugaagaguuuugugacauguugagauuauuugacuucaacaaacaagccauaaggagacugaaaacagaggcacaaaugaauauccaacugauaaacaaagcagugaacgcacugauuaaugaccagcugaucaugaagaaucacuugagggauaucaugggaauuccuuauuguaauuacagcaaauauugguaucuaaaucacacuguaacagggaagacaucguugccaagaugcuggcuugugucaaauggcuccuaccugaaugagacacauuuuucugaugacauugagcagcaagcagacaacaugauaacagaacuguugcaaaaggaguacauagacaggcaaggaaaaacacccuuaggguuaguagaucuuuuugucuucagcaccagcuucuaucucauuagcaucuuccuccacuugguuaaaaucccaacccacagacaugucauagggaaacccugccccaaaccacacagacucaaccaaaugggcauaugcucaugugguuuguacaaacaaccuggugugccagucaaguggaaaagauag

SEQ ID NO: 273 - RNA, 1473 nt, Artificial Sequence
  derived and/or modified protein sequence (wt) from LASV(ISTH1048-NIG-2011;Clade II)__AIT17442__GPC
auggggcaaaucauaacauuuuuccaggaagugccucaugucauugaggaggugaugaacauugucuuaauugcucucagccuucuagcaauacuaaaagggauuuacaauguugcuaccuguggccucuuuggguugguguccuuucuucucuuauguggaaggucaugcucaacaacuuacaaggguguuuaugagcuucaaacucuggagcuggauauggcaagccuuaauaugacaaugcccuuauccugcacgaagaacaacagccaccacuacaucaugguuggaaaugagacuggcuuggagcugacuuuaacaaacacaaguaucaucaaccacaaguuuugcaaccuuucugaugcacauagaaagaaucucuaugaccaugcuuuaaugagcaucaucucaaccuuccaccuauccaucccuaacuuuaaucaguaugaagcaaugaguugugacuucaauggggggaagauaaguguucaguacaaccucagccaugcuuaugcuguggaugcagcuaaccauugugggaccauugccaauggaguccuucaaacuuuuaugaggauggcuugggguggcaguuacauagcacuugauucuggaaaggggaguugggauuguauaaugacguccuaccaauauuugauaauccaaaacaccaguugggaagaucacugccaguuuucucgcccguccccuaucgguuaucuggggcuacuuucacaaagaaccagggacauuuacaucagccgaagacuccuuggaacuuuuacuuggacucucucugauucugagggcaaugaaacaccggguggauauuguuuaacaagauggaugcugauugaagccgaauugaagugcuuugggaacacagcaguugcgaaaugcaaugagaaacaugaugaagaguuuugugacauguuaagguuguuugacuuuaauaaacaggcuauaaggaggcuaaagacagaagcacagaugaguauccaacuaauaaacaaagcagugaaugcauugaucaaugaccagcucauuaugaagaaucauuuaagagauaucaugggaauuccuuacugcaauuacagcaaguauugguacuuaaaccacacuguaacagggaagacaucguugccaagguguuggcuuguaucaaaugguuccuaccugaaugaaacacauuuuucugaugacauugagcaacaagcagacaacaugauaacagaauuguuacagaaagaguacauugauaggcaagggaaaacacccuuaggguugguggaucuuuuugucuucagcacuagcuucuaccuuauuagcaucuuccuccaccugguuaaaaucccaacccacagacaugucauagggaaacccugccccaagccacacagaaucaaccacaugggcauaugcucauguggucuguacaaacauccugguguaccagucaaguggaaaagauag

SEQ ID NO: 274 - RNA, 1473 nt, Artificial Sequence
  derived and/or modified protein sequence (wt) from LASV(ISTH1058-NIG-2011;Clade II)__AIT17446__GPC
auggggcaaaucauaacauuuuuccaggaagugccucaugucauagaagaagugaugaacauuguccugauugcccucagccuucuggcaauauugaaggggaucuacaauguugcuaccuguggccucuuuggauugguuuccuuucuucucuuauguggaagaucaugcucaacaacuuacaaagguguuuaugagcuacaaacucuagagcuagacauggcaagccuuaauaugacaaugcccuuaucuugcacaaagaauaacagccaccauuacaucauggucggaaaugagacuggcuuggagcugaccuuaacaaauacaaguaucauuaaccacaaguuuuguaaccuuucugaugcacauaaaaagaaucuuuacgaccaugcuuuaaugaguaucaucucaacuuuccauuuauccauuccuaauuuuaaucaguaugaagcaaugaguugugacuucaauggggggaagauaaguguucaguacaaccuuagccacacuuaugcuguagaugcagccagccacugugggaccguugccaauggcguucuucagacauucaugaggauggcuugggguggcaguuacauagcacuugauucugggaaagggaguugggauuguauaaugacuuccuaccaauauuugauaauccagaacaccaccugggaagaccacugccaguuuucucgcccaucccccaucgguuaucuggggcuacugucacaaaggaccagggacauuuacaucagucgaagacuccuugggacuuuuacuuggacccucucugauucugaaggcaaugaaacaccggguggguauugucuaacaagauggaugcugauugaggcugaguugaagugcuuugggaacacagcaguugcgaagugcaaugagaaacaugaugaagaguuuugugacauguuaagauuguuugauuuuaacaaacaagcuauaaggaggcugaagacagaagcacagaugaguauccaacugauaaacaaagcagugaacgcacugaucaacgaccaacugauuaugaagaaucauuuaagagacaucaugggaauuccuuacuguaauuacagcaaauauugguauuuaaaucacacuguaacagggaagacaucgcugccaagaugcuggcuugugucaaaugguuccuaccugaaugagacacauuuuucugaugacauugaacaacaagcagacaacaugauaacagaacuguugcagaaggaguacauggacaggcaagggaaaacacccuuaggguuaguagaucuuuuugucuucagcaccaguuuuuaucucauuagcauuuuccuccaccugguuaaaaucccaacucacagacaugucauagggaaacccugccccaaaccacacagacucaaccacaugggcauaugcucauguggucuguacaaacauccugguguaccagucaaauggaaaagauag

SEQ ID NO: 275 - RNA, 1473 nt, Artificial Sequence
  derived and/or modified protein sequence (wt) from LASV(ISTH1064-NIG-2011;Clade II)__AIT17450__GPC
augggacaaaucauaacauuuuuccaggaaguaccucauguuauagaggaagugaugaacauuguccugauugcucucagccuucuggcaauauugaaagggaucuacaauguugcuacuuguggccucuuuggauuggugucuuuucuccucuuauguggaagaucaugcucaacaacuuacaaggguguuuaugagcuacaaacucuagaguuagacauggcaagccuuaauaugacaaugcccuuaucuugcacgaagaacaacagccaccauuacaucauggucggaaaugagacuggcuuggagcugacuuuaacaaauacaaguauuaucaaccacaaguuuuguaaccuuucugaugcacauaaaaagaaucuuuaugaccaugcuuuaaugagcaucaucucaaccuuccacuuauccauuccuaacuuuaaucaguaugaagcaaugaguugugacuucaauggagggaagauaaguguucaguacaaccuuagccacacuuaugcuguagaugcagccaaccacugugggacuaucgccaauggcguucuucagaccuuuaugaggauggccugggguggcaguuauauagcacuugauuccggaaaggggaguugggacugcauaaugacuuccuaccaauauuugauaauccaaaacaccacuugggaagaucacugccaguuuucccgcccauccccuaucgguuauuuggggcuacugucacaaaggaccagggacauuuacaucagucggagacuucuugggacuuuuacuuggacucucucugauucugaaggcaaugaaacaccgggcggguauugucugacaagauggaugcugauugaggccgaguugaagugcuucgggaacacagcaguugcgaaaugcaaugagaaacaugaugaagaguuuugugacauguuaagauuguuugacuuuaacaagcaagcuauaaggaggcugaagacagaagcacagaugaguauccaacugauaaacaaagcagugaacgcacugaucaaugaccagcugauuaugaagaaucauuugagagauaucaugggaauuccuuacugcaauuacagcaaguacugguaucuaaaucacacugugacagggaagacaucguugccgaggugcuggcuugugucaaaugguuccuaccugaaugaaacacauuuuucugaugacauugaacaacaagcagacaacaugauaacagaacuguugcaaaaggaguacauagacaggcaagggaaaacacccuuaggguuaguagaucucuuugucuucagcaccagcuuuuaucucauuagcaucuuccuccaccuggucaagaucccaacccacagacauaucauagggaaacccugcccuaaaccacacagacucaaccacaugggcauaugcucauguggucuauacaaacauccugguguaccaguuaaguggaaaagauag

SEQ ID NO: 276 - RNA, 1473 nt, Artificial Sequence
  derived and/or modified protein sequence (wt) from LASV(ISTH1069-NIG-2011;Clade II)__AIT17454__GPC
augggacaaaucauaacauuuuuucaggaaguaccucaugucauagaggaagugaugaacauuguccugauugcuuucagccuucuggcaauacugaaagggaucuacaauguugcuaccuguggccucuuuggauuggugucuuuucuccucuuguguggaaggucaugcucaacaacuuacaaagguguuuaugagcuacaaacucuggagcuagacauggcaagccuuaauaugacaaugcccuuaucuugcacaaagaacaacagccaucauuacaucauggucggaaaugagacuggcuuagagcugacuuuaacaaauacaagcaucaucaaccacaaguuuuguaaccuuucugaugcacauaaaaggaaucuuuaugaccaugcuuuaaugaguaucaucucaaccuuccacuuauccauucccaacuuuaaucaguaugaggcaaugaguugugauuucaaugggggaaagauaaguguucaguacaaucuuagucacacuuaugcuguagaugcagcugggcacuguggaaccauugccaauggcguucuucagacuuuuaugaggauggcuugggguggcaguuacauagcacuugauucuggaaaggggaguugggauuguauaaugaccuccuaccaauauuugauaauccaaaacaccacuugggaagaucacugccaguuuucccgcccauccccuauagguuaucuagggcuacugucacaaagaacuagggacauuuacaucagucgaagacuucuugggacuuuuacuuggacucucucugauucugaagguaaugaaacaccggguggguauugucugacaagauggaugcugauugaggcugagcugaaaugcuuugggaacacagcaguugcgaaaugcaaugagaaacaugaugaagaguuuugugacauguuaagguuguuugacuuuaacaaacaagcuauaaggaggcuaaagacagaggcacagaugaguauccaacugauaaacaaagcagugaaugcacugaucaaugaccagcuaaucaugaagaaucauuugagagauaucaugggaauuccuuacugcaauuacagcaaguauugguaucuaaaucacacuauaacagggaagacaucguugccaagaugcuggcucgugucaaauggcuccuaccugaaugaaacgcauuuuucugaugacauugaacaacaagcagacaacaugauaacagaacuguugcagaaggaguacauggacaggcaagggaaaacacccuuaggguuaguagaucuuuuuguuuucagcaccagcuuuuaucucauuagcaucuuccuccaccugguuaaaaucccaacccauaggcacaucauaggaaaacccugcccuaaaccacacagacucaaccacaugggcauaugcucauguggucuguacaaacauccugguguaccggucagauggaaaagauag

SEQ ID NO: 277 - RNA, 1473 nt, Artificial Sequence
  derived and/or modified protein sequence (wt) from LASV(ISTH1096-NIG-2012;Clade II)__AIT17458__GPC
augggacaaaucauaacauuuuuccaggaaguaccccaugucauagaagaagugaugaacauuguccugauugcucucagccuucuggcaauacugaaagggaucuacaauguugcuaccuguggccucuuuggauugguguccuuccuccucuuguguggaagaucaugcucaacaacuuacaaggguguuuaugagcuacaaacucuagagcuagacauggcaagccuuaauaugacaaugcccuuaucuugcacgaagaacaacucccaccauuacaucauggucggaaaugagacuggcuuggagcugacuuugacaaauacaagcauuaucaaccacaaguuuuguaaccuuucugaugcgcauaaaaagaaucuuuaugaccaugcuuugaugaguaucaucucaaccuuccauuuauccauuccuaacuuuaaucaguaugaggcaaugaguugugauuucaaugggggaaagauaaguguucaguacaaccuuagccacacuuaugcuauagaugcagccaaccacugugggaccauugccaauggcguccuucagacuuuuaugagaauggcuugggguggcaguuacauagcacuugauuccggaaagggaagcugggauugcauaaugacuaccuaccaauauuugauaauccaaaacaccacuugggaagaucacugccaguuuucucgcccaucccccaucgguuaucuggggcuacuaucacaaagaaccagagacauuuacauuagucgaagacuccuugggacuuucacuuggacucucucugacucugaagguaaugaaacaccggguggguauugucuaacaagauggaugcugauugaggccgaguugaagugcuuuggaaacacagcaguugcaaaaugcaaugagaaacaugaugaagaguuuugugacauguuaagauuguuugacuuuaacaaacaagcuauaaggaggcugaagacagaagcacagaugagcauccaacugauaaauaaagcggugaacgcacugaucaaugaccagcugaucaugaagaaucauuugagagacaucaugggaauuccuuacugcaauuacagcaaguauugguaucuaaaccacacuguaacagggaagacaucauugccaagaugcuggcuugugucaaaugguuccuaccugaaugagacacacuucucugaugacauugaacaacaagcagacaacaugauaacagaauuguugcaaaaggaguauauggacaggcaagggaaaacacccuuaggguuaguagaucuuuuugucuucagcacuagcuucuaucucaucagcaucuuccuccaccugguuaaaaucccaacccacagacaugucauagggaaacccugcccuaaaccacauagacucaaccacaugggcauaugcucauguggucuguacaaacauccuggcgugccagucaaguggaaaagauag

SEQ ID NO: 278 - RNA, 1473 nt, Artificial Sequence
  derived and/or modified protein sequence (wt) from LASV(ISTH1107-NIG-2012;Clade II)__AIT17462__GPC
augggacaaauuauaacauucuuccaggaagugccucaugucauagaggaagugaugaacauugucuugauugcucucagccuucuggcaauacugaaagggaucuacaauguugccaccuguggccucuuugggcugguguccuuucuucucuuauguggaagaucauguucaacaacuuacaaggguguuuaugagcuacaaacucuggagcuggacauggcaagccuuaauaugacaaugcccuuaucuugcacgaagaacaacagccaccauuacaucauggucggaaaugaaacuggcuuggagcugacuuuaacaaacacaaguaucaucaaccacaaguucuguaaccuuucugacgcacauaaaaagaaccuuuaugaccaugcuuuaaugaguauuaucucaaccuuccacuuguccauucccaacuuuaaccaguaugaagcaaugaguugugacuucaaugggggaaagauaagugugcaguacaaccucagccaugcuuaugcuguggacgcagcuaaccacugugggaccauugccaauggaguucuucagacuuuuaugaggauggcuugggguggcaguuacauagcacuugauuccggaaaggggaguugggauuguauaaugacuuccuaccaguaucuaauaauccaaaacaccaccugggaagaucacugccaguuuucucguccaucccccaucgguuaucuggggcugcugucacaaagaaccagggacauuuacaucagucgaagacuccuuggaacuuuuacuuggacucucucugacucugaagguaacgaaacaccagguggauauuguuuaacaagauggaugcugauugaggccgaguugaagugcuuugggaacacagcaguugcgaaaugcaaugagaaacaugaugaagaguuuugugauauguugagacuguuugacuuuaacaaacaagcuauaaggaggcuaaagacagaagcacagaugagcauucaacuaauaaacaaagcagugaacgcacugaucaaugaccagcuaauuaugaagaaucauuuaagagauauuaugggaauuccuuacugcaauuacagcaaguauugguauuuaaaucacacuguaacagggaagacaucauugccaaaaugcuggcuugugucaaaugguuccuaccugaaugagacacauuuuucugaugacauugaacaacaagcagacaacaugauaacagaauuguuacagaaggaguacauagacaggcaagggaaaacacccuuaggguugguggaucucuuuguuuucagcaccagcuuuuaucucauuagcaucuuccuccaccuggucaaaaucccaacccacagacaugucauagggaaacccugcccuaagccacacagacucaaccacaugggcauaugcucauguggucuauacaaacauccuggugugccaguuaaguggaaaagauag

SEQ ID NO: 279 - RNA, 1473 nt, Artificial Sequence
  derived and/or modified protein sequence (wt) from LASV(ISTH1111-NIG-2011;Clade II)__AIT17466__GPC
augggacaaaucauaacauuuuuccaggaaguaccucaagucauagaggaagugaugaacauuguccugauugcucucagccuucuggcaauacugaaagggaucuacaauguugcuaccuguggccucuuuggauugguguccuuucuccuacugugcggaagaucaugcucgacaaccuacaagggcguuuaugagcuacaaacccuagagcuagacauggcaagccuuaauaugacaaugcccuuaucuugcacgaagaacaacagccaucauuacaucauggucggaaaugagaccggcuuagagcugacuuuaacaaaccaaaguauuaucaaccacaaguuuuguaaccuuucugaugcacauaaaaagaaucuuuaugaccaugcuuuaaugaguaucaucucaacuuuccacuuauccauucccaacuuuaaucaguaugaagcaaugaguugugacuucaauggaggaaagauaaguguucaguacaaccuuagccacacuuuugcuguagaugcagcuaaccacuguggaaccaucgccaaugguguucuucagacuuuuaugaggauggcuugggguggcaguuacauagcacuugauuccggaagggggaguugggacugcauaaugacuuccuaccaauauuugauaauccaaaacaccacuugggaagaucacugccaauuuucucgcccauccccuaucgguuaucuggggcuacugucacaaaggaccagggauauuuacaucagccgaaggcuucuugggacuuuuacuuggacucucucugauucugaagguaaugaaacaccggguggguauugucuaacaagauggaugcugauugaggccgagcugaaguguuuugggaacacagcaguugcgaagugcaaugagaaacacgaugaagaguuuugugauauguuaagguuguuugacuuuaacaaacaagcuauaaggagacugaagacggaagcacagaugaguauccaacuaauaaacaaagcaguaaacgcacuaaucaaugaccagcugaucaugaagaaucauuugagagauaucaugggaauucccuacugcaauuacagcaaauacugguauuuaaaucauacuauaacagggaagacaucacugccaagaugcuggcuugugucaaaugguuccuaccugaaugagacacauuuuucugaugacauugaacaacaagcagacaacaugauaacagaacuguugcaaaaggaguacauggacagacaagggaaaacacccuuaggguuaguagaucuuuuugucuucagcaccaguuuuuaucucauuagcaucuuccuccaccugguuaaaaucccaacccauagacaugucauagggaaacccugcccuaaaccacacagacucaaccacaugggcauaugcucauguggucuguacaaacauccugguguaccaguuaaguggaaaagauag

SEQ ID NO: 280 - RNA, 1473 nt, Artificial Sequence
  derived and/or modified protein sequence (wt) from LASV(ISTH1121-NIG-2012;Clade II)__AIT17470__GPC
auggggcaaaucauaacauuuuuccaggaagugccucaugucauagaggaggugaugaacauugucuugauugcucucagccuucuagcaauacugaaagggaucuacaaugucgccaccuguggccuuuuuggguugguguccuuucuucuccuauguggaagaucaugcucaacaacuuacaaggguguuuaugagcuacaaacucuggaacuggacauggcaagccucaauaugacaaugcccuuauccugcacgaagaauaacagccaccacuacauuaugguuggaaaugagacuggcuuggagcuaacuuuaacaaacacaagcauuaucaaucauaaguuuuguaaccuuucugaugcacauagaaagaaucuuuaugaccaugcuuuaaugaguaucaucucaaccuuucauuuauccauucccaacuuuaaucaguaugaagcaaugaguugugacuuuaaugggggaaagauaaguguucaguacaaccucagccauaccuaugcuguggaugcagcaaaccacugugggaccauugccaaugguguucuacagacuuuuaugaggauggcuugggguggcagcuacauagcacuugauuccggaaagggaagcugggauuguauaaugacuuccuaccaguacuugauaauccaaaacaccacuugggaagaucacugccaguuuucccgcccgucccccaucgguuaucuggggcuacuaucacaaagaacuagagacaucuacaucagucgaagacuucuuggaacuuucacuuggacucuuucugauucugaagguaaugaaacaccagguggguauuguuuaacaagauggaugcugauugaggccgaguugaaaugcuuugggaacacagcaguugcaaaguguaaugagaaacaugaugaagaguuuugugacauguugagauuguuugacuuuaacaaacaagcuauaaggagauugaagacagaagcacagaugagcauccaacugauaaacaaagcagugaacgcauuaauuaaugaccaguugaucaugaagaaccauuuaagagauaucaugggaauuccuuacugcaauuauagcaaguauugguauuuaaaucacacuguaacagggaaaacaucgcugccaagaugcuggcuugugucaaaugguuccuaccuaaaugagacacauuuuucugaugacauugaacaacaagcagacaacaugauaacagaauuguuacaaaaagaguacauagacaggcaagggaaaacaccuuugggguugguagaccuuuuuguuuucagcaccagcuuuuaucucaucagcaucuuccuccaccugguuaaaaucccaacccacagacaugucauagggaaacccuguccuaaaccacacagacucaaccacaugggcauaugcucauguggucuguauaaacaucccggugugccaguuaaguggaagagauag

SEQ ID NO: 281 - RNA, 1473 nt, Artificial Sequence
  derived and/or modified protein sequence (wt) from LASV(ISTH1129-NIG-2012;Clade II)__AIT17474__GPC
augggacagaucauaacauuuuuccaggaaguaccucaugucauagaggaagugaugaacauuguccugauugcucucagccuucuggcaauauugaaagggaucuacaauguugcuaccuguggccucuuuggauugguguccuuucuccuccuauguggaaggucaugcucaacaacuuauaaggguguuuaugagcugcaaacucuagagcuagacauggcaagccucaauaugacaaugcccuuaucuugcacgaagaacaacagccaucauuacaucauggucggaaaugaaacuggcuuagagcuaaccuuaacaaauacaaguaucaucaaccacaaguucugcaaccuuucugaugcacauaaaaagaaucucuaugaucaugcucuaaugaguaucaucucaaccuuccacuuguccauucccaacuucaaucaguaugaggcaaugaguugugacuucaauggggggaagauaagcauucaguacaaccuuagccacacuuaugcuguagaugcagcuaaccacugugggaccauugccaauggcguucuucagacuuuuaugaggauggcuugggguggcaguuacauagcacuugauucuggaaaggggaguugggauuguauaaugacuuccuaccaauauuugauaauccaaaacaccacuugggaagaucacugccaguuuucccguccguccccuauagguuaucuggggcuacugucacagaggaccagggacaucuacaucagucgaagacuucuugggacuuuuacuuggacucucucugauucugaagguaaugaaacaccggguggguauugccuaacaagauggaugcugauugaggccgagcugaagugcuuugggaacacagcaguugcgaaaugcaaugagaaacaugaugaagaguuuugugacauguugagguuguuugacuuuaacaaacaagcuauaagaaggcugaagacagaggcacaaaugaguauccaacugauaaacaaagcagugaacgcauugaucaaugaccagcuaaucaugaagaaucauuugagagauauuaugggaauuccuuacugcaauuacagcaaguacugguaucuaaaucacacuauaacagggaagacaucguugccaagaugcuggcuugugucaaaugguuccuaccugaaugaaacacauuuuucugaugacauugaacaacaagcagacaacaugauaacagaacuguugcagaaggaguacauagacaggcaagggaaaacacccuuaggguuaguagaucuuuuugucuucaguacuagcuuuuaucucauuagcaucuuccuccaccugguuaaaaucccaacccacaggcauaucacagggaaacccugcccuaagccacacagacucaaccacaugggcauaugcucauguggucuguacaaacauccuggugugccaguuagauggaaaagauag

SEQ ID NO: 282 - RNA, 1473 nt, Artificial Sequence
  derived and/or modified protein sequence (wt) from LASV(ISTH1137-NIG-2011;Clade II)__AIT17478__GPC
augggacaaaucauaacauuuuuccaggaaguaccucaugucauagaggaagugaugaacauugucuugauugcucucagccuucuggcaauacugaaaggaaucuacaauguugcuaccuguggccucuuuggauugguguccuuucuccucuuauguggaagaucaugcucaacaacuuacaaggguguuuaugagcuacaaacccuggaguuggacauggcaagccuuaauaugacaaugcccuuaucuugcacaaagaauaacagccaccauuacaucauggucggaaaugagacuggcuuggagcugacuuuaacaaauacaaguaucaucaaccacaaguuuuguaaccuuucugaugcacauaaaaagaaucuuuaugaucaugcuuugaugaguaucaucucaaccuuccacuuauccauuccuaacuucaaucaguaugaagcaaugaguugugacuuuaauggggggaagauaaguguucaguacaaccuuagccacacuuaugcuguagaugcagccgaccacugugggacuaucgccaauggcguucuucaaacuuuuaugaggauggcuugggguggcaguuacauagcacuugauuccggaaaggggaguugggacuguauaaugacuuccuaccaauauuugauaauccaaaacaccacuugggaagaucacugccaguuuucucgcccauccccuaucgguuaccuggggcuacugucacagaggaccagggacauuuacaucagucgaaggcuucuugggacuuuuacuuggacucucucugauucugaagguaaugaaacaccggguggguauugucuaacaagauggaugcugauugaggccgaguugaagugcuuugggaacacggcaguugcaaaaugcaaugagaaacaugaugaagaguuuugugacauguuaagauuguuugacuuuaacaaacaagccauaagcaggcugaagacagaagcacaaaugaguauccaacugauaaacaaagcagugaacgcauugaucaaugaccagcugauuaugaagaaucauuugagagacaucaugggaauuccuuacugcaauuacagcaaguacugguaucugaaucacacugugacagggaagacaucauugccaaggugcuggcuuguaucaaaugguuccuaccuaaacgaaacacacuuuucugaugacauugaacaacaagcagacaacaugauaacagaaauguugcaaaaggaguacauagacaggcaagggaaaacacccuuaggguuaguggaucuuuuugucuucagcaccagcuuuuaucucauuagcaucuuccuccaccugguuaaaaucccaacccacagacaugucauaggaaaacccugccccaaaccacacagacucaaccacaugggcauaugcucaugugguuuauacaaacauccugguguaccaguuaaguggaaaagauaa

SEQ ID NO: 283 - RNA, 1473 nt, Artificial Sequence
  derived and/or modified protein sequence (wt) from LASV(ISTH2010-NIG-2012;Clade II)__AIT17482__GPC
augggacaaaucauaacauuuuuccaggaaguaccucaugucauagaggaagugaugaacauuguccugauugcucucagccuucuggcaauauugaaggggaucuacaauguugcuaccuguggccucuuuggauugguguccuuccuccucuuauguggaaggucauguucaacaacuuacaaggguguuuaugagcuacaaacucuggagcuagacauggcaagccuuaauaugacaaugcccuuaucuugcacgaagaacaacagccaccauuacaucauggucggaaaugaaacuggcuuggagcuaacuuuaacaaauacaaguaucaucaaccacaaauuuuguaaccucucugaugcacauaagaagaaucuuuaugaucaugcuuuaaugaguaucauuucaaccuuccacuuauccauuccuaacuuuaaucaguaugaagcaaugagcugugacuucaaugggggaaagauaaguguucaguacaaccuuagccacgcuuaugcuguagaugcagccaaccacugugggaccaucgccaauggcguucuucagacuuuuaugaggauggcuugggguggcagcuauauagcacuugauuccggaaaggggaguugggauuguauaaugacuuccuaccaauauuugauaauccaaaacaucacuugggaagaucacugccaguuuucucgcccauccccuaucgguuaccuagggcuacugucacaaaggaccagggacauuuacaucagucgaagacuucuugggacuuuuacuuggacucucucugauucugaagguaaugaaacaccggguggguauugccuaacaagauggaugcugauugaagccgaguugaaaugcuuugggaacacagcaguugcgaaaugcaaugagaaacaugaugaagaguuuugugacauguuaagauuguuugacuuuaacaaacaggcuauaaggaggcuaaagacagaagcacagaugaguauccaacugauaaacaaagcagugaacgcacugaucaaugaccagcugauuaugaagaaucauuugagagauaucauggggauuccuuacugcaauuacagcaaguacugguaucuaaaucauacuguaacagggaagacaucguugccaaggugcuggcuugugucaaaugguuccuaccugaaugagacacauuuuucugaugacauugaacaacaggcagacaacaugauaacagaacugcugcaaaaggaguacauagacaggcaagggaaaacaccuuuaggguuaguagaucuuuuugucuucagcaccagcuuuuaucucauuagcaucuuccuccaccugguuaaaaucccaacccacagacaugucguaggaaaacccugcccuaaaccacacagacucaaccacaugggcauauguucauguggucuauacaaacauccuggugugccagucaaguggaaaagauag

SEQ ID NO: 284 - RNA, 1473 nt, Artificial Sequence
  derived and/or modified protein sequence (wt) from LASV(ISTH2016-NIG-2012;Clade II)__AIT17486__GPC
augggacaaaucauaacauuuuuccaggaaguaccucaugucauagaggaagugaugaacauuguccugauugcccucagccuucuggcaauacugaaggggaucuacaauguugcuaccuguggccucuuuggauugguguccuuccuccucuuauguggaagaucauguucaacaacuuacaaggguguuuaugagcuacaaacucuggagcuagacauggcaagccuuaauaugacaaugcccuuaucuugcacgaagaacaacagccaccauuacaucauggucggaaaugagacuggcuuggagcugacuuuaacaaauacaaguaucaucaaccacaaauuuuguaaccucucugaugcacauaaaaagaaucuuuaugaucaugcuuuaaugaguaucauuucaaccuuccacuuauccauuccuaacuuuaaucaguaugaagcaaugaguugugacuucaauggggggaagauaaguguucaguacaaccuuagccacacuuaugcuguagaugcagccaaccacugugggacuaucgccaauggcguucuucagacuuuuaugaggauggcuugggguggcaguuauauagcacuugauuccggaaaggggaguugggacuguauaaugacuuccuaccaauauuugauaauccaaaacaccacuugggaagaucacugccaguuuucucgcccauccccugucgguuaccuggggcuacugucacaaaggaccagggacauuuacaucagucgaagacuucuugggacuuuuacuuggacucucucugauucugaagguaaugaaacaccggguggguauugucuaacaagauggaugcugauugaggccgaguugaaaugcuuugggaacacagcaguugcgaaaugcaaugagaaacaugaugaagaguuuugugacauguuaagauuguuugacuuuaacaaacaagcuauaaggaggcuaaagacagaagcacagaugaguauccagcugauaaacaaagcagugaacgcacugaucaaugaccagcugaucaugaagaaucauuugagagacaucauggggauuccuuacugcaauuacagcaaguacugguaucuaaaucauacuguaacagggaagacaucguugccaaggugcuggcuugugucaaauggcuccuaccugaaugagacacauuuuucugaugacauugaacaacaagcagacaacaugauaacagaacugcugcaaaaggaguacauagacaggcaagggaaaacaccuuuaggguuaguagaucuuuuugucuucagcaccagcuuuuaucucauuagcaucuuccuccaccugguuaaaaucccaacccacagacaugucauaggaaaacccugcccuaaaccacacagacucaaccacaugggcauauguucauguggucuauacaaacauccuggugugccagucaaguggaaaagauag

SEQ ID NO: 285 - RNA, 1473 nt, Artificial Sequence
  derived and/or modified protein sequence (wt) from LASV(ISTH2020-NIG-2012;Clade II)__AIT17490__GPC
augggacaaaucauaacauuuuuccaggaaguaccucaugucauagaagaagugaugaacauuguccugauuacccucagccuucuggcgauuuugaaagggaucuacaauguugccaccuguggccucuuuggauugguauccuuucuucucuuauguggaagaucaugcucaacaacuuacaaggguguuuaugagcuacaaacucuggagcuagacauggcaaaccuuaauaugacaaugcccuuaucuugcacaaagaauaacagccaccauuacaucauggucggaaaugagacugguuuagagcugacuuuaacaaauacaaguaucaucaaccauaaguucuguaaucuuucugaugcacauaaaaagaaucuuuaugaccaugcuuuaaugaguaucaucucaaccuuccacuuauccauucccaacuuuaaucaguaugaggcaaugagcugugacuucaauggggggaagauaaguguucaguacaaccuuagccacacuuuugcuguagaugcagcuaaccacugugggacuauugccaauggcguucuccagacuuucaugaggauggcuugggguggcaguuacauagcacuugauuccggaaaagggagcugggauugcauaaugacuuccuaccaauauuugauaauucagaacaccacuugggaagaucacugccaguuuucucgcccaucccccaucgguuaucuggggcugcugucacaaaggaccagggacauuuacaucagucgaagacuccuugggacuuuuacuuggacccucucugauucugaaggcaaugagacaccggguggguauugucuaacaagauggaugcugauugaagccgaauugaagugcuuugggaacacagcaguugcgaaaugcaaugagaaacaugaugaggaguuuugugacauguuaagauuguuugacuuuaacaaacaagcuauaaggaggcugaagacugaagcacagaugaguauccaacugauaaacaaagcagugaacgcauugaucaaugaccagcugauuaugaagaaucauuuaagggauaucaugggaauuccuuacugcaauuacagcaaguauugguauuuaaaucacacuguaacagggaagacaucguugccaagaugcuggcuugugucaaaugguuccuaccugaaugagacacauuuuucugaugacauugaacaacaagcagacaacaugauaacagaacuguugcagaaggaguacauggacaggcaagggaaaacacccuuaggguuaguagaucuuuuugucuucagcaccaguuuuuaucucauuagcaucuuucuccaccuaguuaaaaucccaacucacagacacaucauuggaaaacccuguccuaaaccacacagacucaaccacaugggcauaugcucauguggucuguacaaacauccugguguaccagucaaauggaaaagauag

SEQ ID NO: 286 - RNA, 1473 nt, Artificial Sequence
  derived and/or modified protein sequence (wt) from LASV(ISTH2025-NIG-2012;Clade II)__AIT17494__GPC
auggggcaaaucauaacauuuuuccaggaagugccucaugucauugaggaggugaugaacauugucuuaauugcucucagccuucuagcaauacuaaaaggggucuacaauguugccaccuguggccucuuuggguugguaucuuuucuucucuuauguggaaggucaugcucaacaauuuacaaggguguuuaugagcuucaaacucuggagcuggauauggcaagccuuaauaugacaaugcccuuauccugcacgaagaacaacagccaccacuacaucaugguuggaaaugagacugguuuggagcugacuuuaacaaacacaaguaucaucaaccacaaguuuuguaaccuuucugaugcacauaaaaagaaucucuaugaccaugcuuuaaugagcaucaucucaaccuuccaccuauccaucccuaacuuuaaucaguaugaagcaaugaguugugacuucaaugggggaaagauaaguguucaguacaaccucagccauacuuaugcuguggaugcagccaaccauugugggaccauugccaauggaguccuucaaacuuuuaugaggauggcuugggguggcaguuacauagcacuugauucuggaaaggggaguugggauuguauaaugacguccuaccaauauuugauaauccaaaacaccaguugggaagaccacugccaguuuucucgcccguccccuaucgguuaucuggggcuacuuucacaaagaaccagggacauuuacaucagccgaagacuccuaggaacuuuuacuuggacucucucugauucugagggcaaugaaacaccggguggguauuguuugacaagauggaugcugauugaagccgaauuaaagugcuuugggaacacagcaguugcgaaaugcaaugagaaacaugaugaagaguuuugugacauguuaagguuguuugacuuuaauaaacaggcuauaaggaggcuaaagacagaagcacagaugaguauccaacuaauaaacaaagcagugaacgcacugaucaaugaccagcucauuaugaagaaucauuuaagagauaucaugggaauuccuuacugcaauuacagcaaguauugguacuuaaaccacacuguaacagggaagacaucguugccaagaugcuggcuuguaucaaaugguucuuaccugaaugaaacacauuuuucugaugacauugagcagcaagcagacaacaugauaacagaauuguuacagaaagaguacauugauaggcaagggaaaacacccuuaggguugguggaucuuuuugucuucagcacuagcuucuaccuuauuagcaucuuccuccaccuggucaaaaucccaacccacagacacgucauagggaaacccugccccaagccacacagacucaaccacaugggcauaugcucauguggucuguacaaacauccugguguaccagucaaguggaaaagauag

SEQ ID NO: 287 - RNA, 1473 nt, Artificial Sequence
  derived and/or modified protein sequence (wt) from LASV(ISTH2031-NIG-2012;Clade II)__AIT17498__GPC
auggggcaaauuauaacauuuuuccaggaagugccucaugucauagaggaagugaugaacauuguccugauugcucucagccuucuggcaauucugaaagggaucuacaauguugcuacauguggccuuuuuggacugguguccuuucuccucuuauguggaagaucaugcucaacaacuuacaaggguguuuaugagcugcagacucuagagcuagacauggcaagccuuaacaugacaaugcccuuaucuugcacgaagaauaacucccaccauuacaucauggucggaaaugagacuggcuuagaacugacuuuaacaaauacaaguauuaucaaccacaaguuuugcaaccucucugaugcacauaagaagaaucuuuaugaccaugcuuuaaugagcaucaucucaaccuuccacuuauccauuccuaacuuuaaucaguaugaagcgaugagcugugacuucaauggggggaagauaaguguacaguacaaccucagccacacuuacgcuguggaugcggcuaaccacugugggaccauugccaauggcguucuucagacuuuuaugaggauggcuugggguggcaguuacauagcacuugauuccggaaaggggaauugggauugcauaaugacuuccuaccaauauuugauaauccaaaacaccacuugggaagaucacugccaguuuucucguccaucccccaucgguuaucuggggcuacugucacaaaggaccagggacauuuacaucagucgaagacuucuugggacuuuuacuuggacucucucugauucugaagguaaugaaacaccggguggguauugucuaacaagauggaugcugauugagaccgaguugaagugcuuugggaacacagcaguugcaaaauguaaugagaaacaugaugaagaguuuugugacauguuaagauuguuugacuuuaacaaacaagcuauaaguaggcugaggucagaagcacagaugaguauccaacuaauaaacaaagcagugaaugcacugaucaaugaccagcugauuaugaagaaucauuuaagagauaucaugggaauuccuuauugcaauuacagcaaauauugguaucuaaaucacacugugacagggaagacaucguugccaaaaugcuggcuugugucaaaugguucuuaccugaaugaaacacauuuuucugaugacauugaacaacaagcagacaacaugauaacagaaauguugcaaaaggaguacauagauaggcaagggaaaacaccuuuaggguuaguagaucuuuuugucuucagcaccaguuuuuaccuuauuagcaucuuccuccaccugguuaaaaucccaacccacagacauaucacagggaaacccugccccaaaccacacagacucaaccacaugggcauaugcucauguggucuauacaaacauccuggugugccagucaaguggaaaagauaa

SEQ ID NO: 288 - RNA, 1473 nt, Artificial Sequence
  derived and/or modified protein sequence (wt) from LASV(ISTH2037-NIG-2012;Clade II)__AIT17502__GPC
augggacaaauuauaacauuuuuccaggaaauaccucaugucauagaggaagugaugaacauuguccuaaucacccuuagccuucuggcaauacugaaagggaucuacaauguugcuaccuguggccuuuuuggacugguauccuuucuccucuuguguggaaaaucaugcucaacaaccuacaaaggugucuaugagcuacagacucuagaguuagacauggcaagccuuaauaugacaaugcccuugucuugcacgaagaacaacagccaucauuacaucauggucggaaaugagacugguuuggagcugacccugacaaauacaaguauuaucaaccacaaguuuuguaaccuuucugaugcacacaggaagaaccuuuacgaccauacuuuaaugaguaucaucucaaccuuccaccuguccauuccuaacuuuaaucaguaugaagcaaugagcugugauuucaauggggggaagauaaguguucaguacaaccuuagccacgcuuaugcuauagaugcagcuacccacugugggaccauugccaauggcguucuucagaccuucaugaggauggcuugggguggcaguuacauagcacuugauucaggaaagggggguugggauuguauaaugacuuccuaccaauauuugauaauccaaaacaccacuugggaagaucacugccaguuuucucgcccaucccccaucgguuaucuggggcuacugucacaaaggaccagggacauuuacaucagucgaaggcuucuugggacuuuuacuuggacccucucugauucugaagguaaugaaacaccggguggguauugucuaacaagauggaugcugauugaggccgaguugaaaugcuucgggaacacagcaguugcgaaaugcaaugagaaacaugaugaagaguuuugugacauguuaagguuguuugacuuuaacaagcaagcuauaaggagacugaaaacagaggcacagaugaguauacaacugauaaacaaagcagugaacgcacugauuaaugaccaacugaucaugaggaaucauuugagagauaucaugggaauuccuuacugcaauuacagcaaguauugguauuuaaaucacacuguaacagggaagacaucguugccaaaaugcuggcuugugucaaaugguuccuaccugaaugagacacauuuuucugaugacauugaacaacaagcagacaacaugauaacagaacuguugcaaaaggaguacauggacagacaagggaaaacacccuuaggguuaguagaucuuuuugucuucagcaccagcuuuuaucucauuagcaucuuccuccaucugguuaaaaucccaacucacagacaugucauagggaaacccugcccuaaaccacacagacucaaccacaugggcgugugcucauguggucuguacaaacauccugguguuccagucaaguggaaaagauaa

SEQ ID NO: 289 - RNA, 1473 nt, Artificial Sequence
  derived and/or modified protein sequence (wt) from LASV(ISTH2042-NIG-2012;Clade II)__AIT17506__GPC
augggacaaaucauaacauuuuuccaggaaguaccucaugucauagaggaagugaugaacauuguccugauugcucucagccuucuggcaauacugaaggggaucuacaauguugcuaccuguggccucuuuggauugguguccuuccuccucuuauguggaagaucauguucaacaacuuacaaggguguuuaugaacuacaaacucuggagcuagacauggcaagccuuaauaugacaaugcccuuaucuugcacaaagaacaacagccaccauuacaucauggucggaaaugagacuggcuuggagcugacuuuaacuaauacaaguaucaucaaccacaaauuuuguaaccucucugaugcacauaaaaagaaucuuuaugaucaugcuuuaaugaguaucauuucaaccuuccacuuauccauuccuaacuuuaaucaguaugaagcaaugagcugugacuucaauggggggaagauaaguguucaguacaaccuuagccacgcuuaugcuguagaugcagccgaacacugugggacuaucgccaaugguguucuucagacuuuuaugaggauggcuugggguggcaguuauauagcacuugauuccggaaaggggaguugggacuguguaaugacuuccuaccaauauuugauaauccaaaacaccacuugggaagaucacugccaguuuucucgcccauccccuaucgguuaccuagggcuacugucacaaaggaccagggacauuuacaucagucgaagacuucuugggacuuucacuuggacucucucugauucugaagguaaugaaacaccggguggguauugucuaacaagauggaugcuaauugaggccgaguugaaaugcuuugggaacacagcaguugcgaaaugcaaugagaaacaugaugaagaguuuugugacauguuaagauuguuugacuuuaacaaacaagcuauagagaggcuaaagacagaagcacagaugaguauccagcugauaaauaaagcagugaacgcacuaaucaaugaccagcugauuaugaagaaucauuugagagauaucauggggauuccuuacugcaauuacagcaaguacugguaucuaaaucauacuguaacagggaagacaucguugccaaggugcuggcuugugucaaaugguuccuaccugaaugagacacauuuuucugaugacauugaacaacaagcagacaauaugauaacagaaaugcugcaaaaggaguacauagacaggcaggggaaaacaccuuuaggguuaguagaucuuuuugucuucagcaccagcuuuuaucucauuagcaucuuccuccaccugguuaaaaucccaacccacagacaugucauaggaaaacccugcccuaaaccacacagacuuaaccacaugggcauauguucauguggucuauacaaacauccuggugugccagucaaguggaaaagauag

SEQ ID NO: 290 - RNA, 1473 nt, Artificial Sequence
  derived and/or modified protein sequence (wt) from LASV(ISTH2046-NIG-2012;Clade II)__AIT17510__GPC
augggacaaaucauaacauucuuccaggaaguaccccaugucauagaagaagugaugaacauuguccugauugcccucagccuucuggcaauauugaaagggaucuacaaugucgcuaccuguggccucuuuggauugguguccuuccuucucuuauguggaagaucaugcucaacaacuuacaaagguguuuaugagcuacaaacucuagagcuagacauggcaagccuuaacaugacaaugcccuuauccugcacaaagaacaacagccaccauuacaucauggucggaaaugagacuggcuuagagcugacuuuaacaaauacaaguaucaucaaccacaaguucuguaaccuuucugaugcacauaaaaagaaucuuuaugaccaugcuuuaaugaguauuaucucaaccuuccacuuauccauuccuaacuuuaaucaguaugaagcaaugaguugugacuucaauggggggaaaauaaguguucaguacaaccuuagccacacuuaugcuguagaugcagcuaaccacugugggacuauugccaauggcguucuccagacuuucaugaggauggcuugggguggcaguuacauagcacuugauuccggaaaagggagcugggauugcauaaugacuuccuaccaauauuugauaauccagaacaccaccugggaagaucacugccaguuuucucgcccaucccccaucgguuaucuggggcugcugucacaaaggaccaaggacauuuacaucagucgaagacuccuugggacuuuuacuuggacccucucugauucugaaggcaaugaaacaccggguggguauugucuaacaagauggaugcugauugaggccgaauugaagugcuuugggaacacagcaguugcgaaaugcaaugagaaacaugaugaggaguuuugugacauguuaagauuguuugacuuuaacaaacaggcuauaaggaggcugaagacagaagcacagaugaguauccaacugauaaacaaagcagugaacgcacugaucaaugaccagcugauuaugaagaaucauuuaagagacaucaugggaauuccuuacugcaauuacagcaaguauugguauuuaaaucacacugugacagggaagacaucguugccaagaugcuggcuugugucaaaugguuccuaccugaaugagacacauuuuucugaugacauugaacaacaagcagacaacaugauaacagaacuguugcagaaggaguacauagacaggcaagggaaaacacccuuaggguuaguagaucuuuuugucuucagcaccaguuuuuaucuuauuagcauuuuccuccaccuaguuaaaaucccaacucacagacauguuauaggaaagcccugcccuaaaccacacagacucaaccacaugggcauaugcucuuguggucuguacaaacauccugguguaccagucaaauggaaaagauag

SEQ ID NO: 291 - RNA, 1473 nt, Artificial Sequence
  derived and/or modified protein sequence (wt) from LASV(ISTH2050-NIG-2012;Clade II)__AIT17514__GPC
augggacaaaucauaacauuuuuccaggaagugccucaugucauagaggaagugaugaacauugucuugauugcucucagccuucuggcaguucugaaaggaaucuacaauguugcuacauguggccuuuuuggacugguguccuuucuccucuuauguggaagaucauguucaacaacuuacaaggguguuuaugagcuacaaacucuagagcuagauauggcaagccuuaacaugacaaugcccuuaucuugcaccaagaacaacucucaccauuacaucauggucggaaaugagacuggcuuggagcugacuuuaacaaauacaaguauuaucaaccacaaguuuuguaaccucucugacgcacauaaaaagaaucuuuaugaccaugcuuuaaugaguaucaucucaaccuuccacuuauccauuccuaacuuuaaucaguaugaagcaaugagcugugacuucaauggggggaagauaagugugcaguacaaccucagccacaccuaugcuguggaugcagcuaaccacugugggaccauugccaauggcguucuucagacuuuuaugaggauggcuuggggcggcaguuacauagcacuugauuccggaaaggggaguugggauugcauaaugacuuccuaccaauauuugauaauccagaacaccacuugggaagaucacugccaguuuucucgcccaucccccaucgguuauuugggacuacugucacaaaggaccagggacauuuacaucagucgaagacuucuugggacuuuuacuuggacucucucugauucugaagguaaugaaacaccagguggguauuguuuaacaagauggaugcugauugaggccgaguugaagugcuucgggaacacagcaguugcaaagugcaaugaaaaacaugaugaagaguuuugugacauguuaagauuguuugacuuuaacaaacaagccauaagaagguugaagacagaagcacagaugaguauccaacugauaaacaaagcagugaaugcacugaucaaugaccagcugauuaugaagaaucauuugagagauaucaugggaauuccuuacugcaauuacaguaaguauugguaucuaaaucacacuguaacagggaagacaucguugccaagaugcuggcuugugucaaauggcucuuaccugaaugaaacacauuuuucugaugacauugaacaacaggcagacaauaugauaacagaacuguugcaaaaggaguacauagacaggcaagggaaaacacccuuaggguuaguagaucuuuuugucuucagcaccaguuuuuaucuuauuagcaucuuccuccaccuaguuaaaaucccaacccacagacauguuauagggaaacccugccccaaaccacacagacucaaccacaugggcauaugcucauguggucuguacaggcauccuggugugccaguuaaguggaaaagauag

SEQ ID NO: 292 - RNA, 1473 nt, Artificial Sequence
  derived and/or modified protein sequence (wt) from LASV(ISTH2057-NIG-2012;Clade II)__AIT17518__GPC
auggggcaaaucauaacauuuuuccaggaaguaccucaugucauagaggaagugaugaacauuguccugauugcucucagucuucuggcaauacuaaaggggaucuacaauguugcuacuuguggccucuuuggauugguguccuuucuccucuuaugugggagaucaugcucaacaacuuacaaggguguuuaugagcuacaaacucuagagcuagacauggcaagccuuaacaugacaaugcccuugucuugcacaaagaacaacucccaccauuacaucaugguuggaaaugagacuggcuuggagcugaccuuaacaaauacaagcaucaucaaccacaaguuuuguaaccuuucugaugcacauaaaaagaaucuuuaugaccaugccuugaugaguaucaucucaaccuuccacuuauccauuccuaacuuuaaucaguaugaagcaaugaguugugacuucaaugggggaaagauaaguguucaguacaaccuuagccacgccuaugcuguagaugcagccaaccacuguggaaccauugccaauggcguccuucagacuuuuaugaggauggcuugggguggcaguuacauagcacuugauuccggaaaggggagcugggauugcauaaugacuuccuaccaauauuugauaauccaaaacaccacuugggaagaucacugccaauuuucccgcccaucccccaucgguuaucugggguugcugucacaaaggaccagggacauuuacaucaguagaagacuucuugggacuuuuacuuggacucucuccgacucugaagguaaugaaacaccggguggguauugucuaacaagauggaugcuaauugaagccgaguugaagugcuuugggaacacggcaguugcaaaaugcaaugagaaacaugaugaagaguuuugugacauguuaagauuguuugacuucaacaaacaagcuauaaggagacugaaaacagaagcacagaugaguauccaacugauaaacaaagcagugaacgcacugaucaaugaccagcugauuaugaagaaucacuugagggauaucaugggaaucccuuacugcaauuacaguaaauauugguaucuaaaucacacugugacagggaagacaucguugccaagaugcuggcuugugucaaaugguuccuaccugaaugagacacauuuuucugaugacauugaacaacaagcagacaacaugauaacagaacuguugcaaaaggaguacauggacaggcaaggaaaaacacccuuaggguuaguagaucuuuuugucuucaguaccagcuucuaucucauuagcaucuuccuccacuugguuaaaaucccaacccacagacaugucauaggaaaacccugcccuaaaccacacagacucaaccacaugggcauaugcucauguggucuguacaaacauccuggugugccagucaaauggaaaagauag

SEQ ID NO: 293 - RNA, 1473 nt, Artificial Sequence
  derived and/or modified protein sequence (wt) from LASV(ISTH2064-NIG-2012;Clade II)__AIT17524__GPC
augggacaaaucauaacauuuuuccaggaaguaccucaugucauagaggaagugaugaacauuguccugauugcucucagccuucuggcaauacugaaagggaucuacaauguugcuaccuguggccucuucggauugguguccuuccuccucuuauguggaagaucaugcucaacaacuuacaaggguguuuaugagcuacaaacucuggagcuagacauggcaagccuuaauaugacaaugcccuuaucuugcacgaagaauaacucccaccauuacaucauggucggaaaugagacuggcuuggagcugaccuugacaaauacaagcauuaucaaccacaaguuuuguaaccuuucugaugcccauaaaaagaaucuuuaugaccaugcuuuaaugaguaucaucucaaccuuccacuuguccauuccuaacuuuaaucaguaugaagcaaugaguugugauuucaaugggggaaagauaaguguucaguacaaccuuagccacacuuaugcuauagaugcagccaaccacugugggaccauugccaauggcguucuucagacuuucaugagaauggcuugggguggcaguuacauagcacuugauuccggaaaggggagcugggauugcauaaugacuuccuaccaauauuugauaauccaaaauaccacaugggaagaucacugccaguuuucucgcccaucccccaucgguuaucuggggcuacuaucacaaagaaccagagacauuuacauuagucgaagacuucuugggacuuucacuuggacucucucugacucugaagguaaugaaacaccggguggguauugucuaacaagauggaugcugauugaggccgaguugaagugcuuuggaaacacagcaguugcaaaaugcaaugaaaaacaugaugaagaguuuugugauauguugagauuguuugauuucaacaagcaagcuauaaggaggcuaaagacagaagcacagaugaguauccaacugauaaacaaagcggugaacgcacugaucaaugaccagcuaaucaugaagaaucauuugagagauaucaugggaauuccuuacugcaauuacagcaaguauugguaucuaaaucacacuguaacagggaagacaucguugccaagaugcuggcuugugucgaaugguucuuaccugaaugagacacauuuuucugaugacauugagcaacaagcagacaacaugauaacagaaauguugcaaaaggaguacauggacaggcaagggaaaacacccuuaggguuaguagaucuuuuugucuucagcaccagcuuuuaucucauuagcaucuuccuccaccuaguuaaaauuccaacccacagacaugucauagggaaacccugcccuaaaccacacagacucaaccacaugggcauauguucauguggucuguacaagcauccuggcgugccagucaaguggaaaagauag

SEQ ID NO: 294 - RNA, 1473 nt, Artificial Sequence
  derived and/or modified protein sequence (wt) from LASV(ISTH2065-NIG-2012;Clade II)__AIT17528__GPC
auggggcaaaucauaacauucuuccaagaggugccucaugucauagaggaggucaugaacaucguccuaaucgcccucagucuccuggcgaugcugaaagggauuuacaauauugcuaccuguggucucuuuggguugaucuccuuucuucucuuauguggcagaucauguucaacaaccuauaaaggugucuaugaguuacaagcucuagagcuggacauggcaaaccucaacaugacaaugcccuuguccugcacgaagaacaauagccaccauuauaucaugguuggaaaugaaacaggcuuggagcugaccuuaacaaauacaagcaucauaaaccacaaguuuugcaaucucucugaugcacauaaaaagaaucucuaugaccaugccuugaugagcaucaucucaaccuuccacuuauccauuccaaacuucaaucaguaugaagcaaugagcugugacuuuaauggagggaaaauaaguguucaguacaaccucagucacacuuaugcuggggaugcagccaagcauugcgggaccauugccaaugguguacugcagacuuucaugaggauggcuugggguggcaguuacauagcacuugauuccggaaagggaaacugggauuguauaaugacuuccuaucaauacuugauaauucaaaacaccacuugggaggaucacugccaguuuucccgcccaucuccaauugguuaccugggacuauugucacagagaacuagagauaucuacauuagucgaagacuucucggaaccuucaccuggacccuuucugauuccgaaggcaacgaaacaccugguggguacugucuaacuagauggauguuaauugaagcagaacugaagugcuuugggaacacagcagucgcaaagugcaacgagaaacaugaugaagaauuuugugacauguugagguuguuugauuucaacaaacaagcuauaaggaggcuaaaaacagaggcacagaugaguauucagcugauaaacaaggcagugaaugcauuaaucaaugaccaauuaaucaugaaaaaccacuuaagggacaucaugggaauuccuuauugcaauuacaguaaauauugguaucuaaaucacucugugacagggagaacaucacugccaagauguuggcuuguaucaaaugguuccuaccuaaaugaaacacaauuuucugaugacauugaacaacaggcagacaacaugauaacagaaauguugcagaaagaguauauagacaggcagggaaaaacacccuuaggguugguugaccuuuuugucuucagcacuagcuuuuaucucauaagcaucuuucuccaccugaucaagaucccaacucacagacacaucguagggaaacccuguccuaagccgcacaggcuuaaccauaugggcauuugcucauguggucuauacaaacauccugguaucccagucaaauggaagagauag

SEQ ID NO: 295 - RNA, 1473 nt, Artificial Sequence
  derived and/or modified protein sequence (wt) from LASV(ISTH2094-NIG-2012;Clade II)__AIT17538__GPC
augggacaaauaauaacauucuuucaggagguuccucauguuauagaagaggugaugaauauuguccugauugcucucagccuccuggcaauacugaaggggauuuacaauauugccacuuguggccucuuugggcugaucuccuuucuucuucuguguggaagaucaugcucaacaaccuacaaaggugucuaugagcuacaaacccuggagcuggauauggcaaaccucaacaugaccaugccucuaucuugcacaaaaaacaacagccaucacuauaucaugguugggaaugagacaggccuagaacugaccuuaacaaacacaaguauaaucaaucauaaguucugcaaccuuucugaugcacacaaaaagaaucuuuaugaucaugccuugaugagcaucauuucaacuuuccacuuauccauuccgaacuucaaucaguaugaagcaaugaguugugacuuuaaugaagggaaaauaagugugcaauacaaucucagucauaguuaugcuauagaugcagccggccacugugggaccauugccaacgguguccuacagacuuucaugagaauggcuuggggcggcaguuacauagcacuugauucuggaaaagggaacugggauugcauaaugacuuccuaucaguacuugauuauccagaacaccaccugggaagaucacugucaauuuucccgcccauccccuauuggguaccuaggacugcugucacagagaacuagagauauuuauauuagucggagacuucuuggaacuuucaccuggacucucucugacucugagggcaaugaagcacccgguggauacugccuuacuagauggaugcuaauugaagcugaacugaagugcuuugggaacacagccauugcaaaguguaaugagaagcacgaugaggaauucugugauauguugagacuuuuugacuucaacaaacaagccauaaaaaggcuaaaagcagaagcacagaugagcauccauuugauaaauaaagcaguaaaugcacuaaucaaugaccaguugaucaugaagaaccacuugagggauaucaugggaauuccuuauugcaauuacagcaaguacugguaucuaaaccacacugugacagggaagacaucauugccgaaguguuggcuuguuucaaaugguucuuaccugaaugagacacauuucuccgaugauauugaacagcaagcagauaacaugauaacagaacuguugcaaaaggaguauauggacaggcaggggaaaacaccauuaggguuaguggaucuuuuugucuucagcaccagcuuuuaucucauaaguauuuuccuccacuuggucaaaauucccacccauagacacauuguggggagacccugccccaaaccacacaggcucaaccacaugggcauaugcucaugugguuuguacaaacauccugguguaccagucaaguggaagagauag

SEQ ID NO: 296 - RNA, 1473 nt, Artificial Sequence
  derived and/or modified protein sequence (wt) from LASV(ISTH2129-NIG-2012;Clade II)__AIT17544__GPC
augggacaaaucauaacauuuuuccaggaaguaccucaugucauagaggaggugaugaacauuguccugauugcucucagccuucuggcaauacugaaaggaaucuacaauguugcuaccuguggccucuuuggacugguauccuuucuccucuuauguggaagaucgugcucaacaaccuauaaagguguuuaugagcuacaaacucuagagcuggacaugggaagccuuaauaugacaaugccccuaucuuguacgaagaacaacagccaucauuacaucauggucggaaaugagacuggcuuggagcugacuuuaacaaauacaaguauuaucaaccacaaguuuuguaaccuuucugaugcacauaagaagaaucuuuaugaccaugcgcuaaugaguaucaucucaaccuuccacuuauccauuccuaacuuuaaucaguaugaagcaaugaguugugacuucaauggggggaagauaaguguucaauacaaucuuagccacucuuaugcuguggaugcagccaaccacugugggaccauugccaauggcguucuucaaacuuuuaugaggauggcuugggguggcaguuacauagcacuugauuccggaaaggggaguugggauuguauaaugacuuccuaccaauauuuaauaauccaaaacaccacuugggaagaucacugccaguuuucucgcccauccccuaucgguuaucuggggcuacugucacaaaggaccagggacauuuacaucagucgaagacuacucgggacuuuuaccuggacccucucugauucugaagguaaugaaacaccggguggguauugucuaacaagauggaugcugauugaggccgaguugaagugcuuugggaacacagcaguugcgaagugcaaugaaaaacaugaugaagaguucugugacaugcuaagauuauuugacuuuaacaaacaagcuauaaggaggcugaaaacagaagcacagaugaguauccaacugauaaacaaagccguaaacgcacugaucaacgaccagcugauuaugaagaaucauuugagagacauuaugggaauuccuuacugcaauuacagcaaguauugguaucuaaaucacacuguaacagggaagacaucauugccaagaugcuggcuugugucaaaugguuccuaccuuaaugagacacacuuuucugaugacauugaacaacaagcagauaacaugauaacagaacuguugcaaaaggaguacauggacaggcaagggaaaacucccuuaggguuaguagaucuuuuugucuucagcaccagcuuuuaccucauuagcaucuuccuccaccuggucaaaaucccaacccacagacauaucauagggaaacccugcccuaaaccacacaggcucaaccacaugggcauaugcucauguggucuguacaagcauccugguguaccagucaaguggaaaagauag

SEQ ID NO: 297 - RNA, 1473 nt, Artificial Sequence
  derived and/or modified protein sequence (wt) from LASV(ISTH2217-NIG-2012;Clade II)__AIT17548__GPC
augggacaaaucauaacauuuuuccaggaaguaccucaugucauagaggaagugaugaacauuguccugauugcucucagccuucuggcgauacugaaagggaucuacaauguugcuaccuguggccucuuuggauugguguccuuucucuucuuauguggaagaucaugcucaacaacuuacaaggguguuuaugaacugcaaacucuagagcuagacauggcaagccucaauaugacaaugccccuaucuugcacaaagaacaacagccaccauuacaucauggucggaaaugagacuggcuuggagcugacuuuaacaaauacaaguauuaucaaccacaaguuuuguaaccuuucugaugcacauaaaaggaaucuuuaugaccaugcuuuaaugagcaucaucucaaccuuccacuuaucuauuccuaauuuuaaucaguaugaagcaaugaguugugacuucaauggggggaagauaaguguucaguacaaccuuagucacgcuuaugcuggagaugcagccaagcacugugggacuauugccaauggcguucuucagacuuuuaugaggauggccugggguggcaguuauauagcacuugauuccggaaaggggaguugggauuguauaaugaccuccuaccaauauuugauaauccaaaacaccacuugggaagaucacugccaguuuucucgcccguccccuaucgguuaucuggggcuacugucacaaaggaccagggacauuuacaucagucgaagacuucuugggacuuuuacuuggacucucucugauucugaagguaaugaaacgccggguggguauugucuaacaagauggaugcugauugaggccgaguugaagugcuuugggaacacagcaguugcgaaauguaaugagaaacaugaugaagaguuuugugacauguuaagacuguuugacuuuaacaaacaagcuaucaggaggcugaggacagaagcacagaugaguauccaacugauaaacaaagcagugaacgcacugaucaaugaccagcuuauuaugaagaaucacuugagagacauuaugggaauuccuuacugcaauuacagcaaguacugguaucuaaaucacaccguaacagggaagacaucguugccaaagugcuggcuugugucaaaugguuccuaccugaaugagacacauuuuucugaugacauugaacaacaagcagacaacaugauaacagaaauguugcaaaaggaguacauugacaggcaagggaaaacacccuuaggguuaguagaucuuuuugucuucagcacuaguuuuuaucucauuagcaucuuccuccaccuggucaaaaucccaacucacagacaugucauaggaaaacccugcccuaaaccacacagacucaaccacaugggcauaugcucauguggucuguacaaacauccugguguaccagucaaguggaaaagauaa

SEQ ID NO: 298 - RNA, 1473 nt, Artificial Sequence
  derived and/or modified protein sequence (wt) from LASV(ISTH2271-NIG-2012;Clade II)__AIT17552__GPC
auggggcaaaucauaacguuuuuccaggaagugccucaugucauagaggaggugaugaacauugucuugauugcucucagccuucuggcaauacugaaagggaucuacaaugucgccaccuguggccucuuuggguugguguccuuucuucuccuauguggaagaucaugcucaacaacuuacaaggguguuuaugagcuacaaacucuagaacuagacauggcaagccucaauaugacaaugcccuuauccugcacgaagaauaacagccaccauuacauuauggucggaaaugagacuggcuuggagcuaaccuuaacaaacacaagcauuaucaaucauaaguuuuguaaccuuucugaugcacauaaaaagaaccuuuaugaccaugcuuuaaugaguaucaucucaaccuuucauuuauccauucccaacuuuaaccaguaugaagcaaugaguugugacuucaaugggggaaagauaaguguucaguacaaccucagccaugcuuaugcugugaaugcagcuaaccacugugggaccauugccaaugguguucuacagacuuuuaugaggauggcuugggguggcagcuacauagcacuugauuccggaaagggaagcugggacuguauaaugacuuccuaccaguauuugauaauccaaaacaccacuugggaagaucacugccaguuuucucgcccguccccuaucgguuaucuggggcuacuaucacaaagaacuagagacaucuauauaagucgaagacuucuuggaacuuucacuuggacucuuucugauucugaagguaaugaaacaccagguggguauuguuuaacaagauggaugcugauugaggccgaguugaaaugcuuugggaacacagcaguugcaaaguguaaugagaaacaugaugaagaguuuugugacauguuaagauuguuugacuuuaacaaacaagcuauaaggagguugaagacagaagcacagaugagcauccaacugauaaacaaagcagugaacgcacuaauuaaugaccaguugaucaugaagaaccauuuaagggauauuaugggaauuccuuacuguaauuacagcaaguauugguauuugaaucacacuguaacagggaaaacaucgcugccaagaugcuggcuugugucaaaugguuccuaccuaaaugagacacacuuuucugaugacauugaacaacaagcagacaacaugauaacagaauuguuacagaaagaguacauggacagacaaggaaaaacaccuuugggguugguagaucuuuuugucuucagcaccagcuuuuaucucaucagcauuuuccuccaccugguuaaaaucccaacccacagacaugucauagggaaacccugcccuaaaccacacagacucaaccacaugggcauaugcucaugugguuuguauaaacaucccggugugccagucaaguggaagaaauag

SEQ ID NO: 299 - RNA, 1473 nt, Artificial Sequence
  derived and/or modified protein sequence (wt) from LASV(ISTH2304-NIG-2012;Clade II)__AIT17556__GPC
augggacaaaucauaacauuuuuccaggaaguaccucaugucauagaggaagugaugaacauuguccugauugcucucagccuucuggcaauauugaaagggaucuacaauguugcuaccuguggccucuuuggauugguguccuuucuccuccuauguggaaggucauguucaacaacuuacaaggguguuuaugagcugcaaacucuagagcuagacauggcaagccucaauaugacaaugcccuuaucuugcacgaagaacaacagccaucauuacaucauggucggaaaugaaacuggcuuagagcuaacuuuaacaaauacaagcaucaucaaccacaaguucugcaaccuuucugaugcacauaaaaagaaucucuaugaucaugcucuaaugaguaucaucucaaccuuccacuuguccauuccuaacuucaaucaguaugaggcaaugaguugugacuucaauggggggaagauaaguguucaguacaaccuuagccacacuuaugcuguagaugcagcuaaccacugugggaccauugccaauggcguucuucagacuuuuaugaggauggcuugggguggcagcuacauagcacuugauucuggaagggggaguugggauuguauaaugacuuccuaccaauauuugauaauccaaaacaccacuugggaagaucacugccaguuuucccguccguccccuauagguuaucuggggcuacuaucacaaaggaccagggacaucuacaucagucgaagacuucuugggacuuuuacuuggacucucucugauucugaagguaaugaaacaccggguggguauugucuaacaagauggaugcugauugaggccgagcugaagugcuuugggaacacagcaguugcgaaaugcaaugagaaacaugaugaagaguuuugugacauguugagguuguuugacuuuaacaaacaagcuauaagaaggcugaagacagaggcacaaaugaguauccaacugauaaacaaagcagugaacgcauugaucaaugaccagcuaaucaugaagaaucauuugagagauauuaugggaauuccuuacugcaauuacagcaaguacugguaucuaaaucacacuauaacagggaagacaucguugccaagaugcuggcuugugucaaaugguuccuaccugaaugaaacacauuuuucugaugacauugaacaacaagcagacaacaugauaacagaacuguugcagaaggaguacauagacaggcaagggaaaacacccuuaggguuaguagaucuuuuugucuucaguacuagcuuuuaucucauuagcaucuuccuccaccugguuaaaaucccaacccacaggcauaucacagggaaacccugccccaaaccacacagacucaaccacaugggcauaugcucaugugguuuguacaaacauccuggugugccaguuagauggaaaagauag

SEQ ID NO: 300 - RNA, 1473 nt, Artificial Sequence
  derived and/or modified protein sequence (wt) from LASV(ISTH2312-NIG-2012;Clade II)__AIT17560__GPC
augggacaaaucauaacauuuuuccaggagguaccucaugucauagaggaagugaugaacauuguucugauugcucucagccuucuggcaguacugaaagggauuuacaauguugcuaccuguggccucuuuggauugguguccuuucuccucuugugcggaagaucaugcucaacaacuuacaaggguguuuaugagcuacaaacccuagaguuggacauggcaagccuuaauaugacaaugcccuuaucuugcacgacgaacaacagccaccauuacaucauggucggaaaugagacagguuuggagcucacuuuaacaaauacaaguauuaucaaccauaaguuuuguaaccuuucugaugcacauaaaaagaaucuuuaugaccaugcucuaaugaguaucaucucaaccuuccauuuauccauuccuaacuuuaaucaguaugaagcaaugaguugugacuucaauggggggaagauaaguguucaguacaaccuuagucacgcuuaugcuggagaggcagccaaucacugugggaccaucgccaauggcguucuucagacuuuuaugaggauggcuugggguggcaguuacauagcacuugauuccggaaaggggaguugggauuguauaaugacuuccuacaaauauuugauaauccaaaacacuacuuggggagaucacugccaguuuucucgcccauccccuaucgguuaucuggggcuacugucacaaaggaccagggacauuuacaucagucgaagacuucuugggacuuuuaccuggacucuuucugauucugaggguaaugaaacaccggguggguauugucuaacaagauggaugcugauugaggccgaauugaagugcuuugggaauacagcaguugcgaaaugcaaugagaaacaugaugaagaguuuugugacauguuaagauuauuugacuucaacaaacaagcuauaaggaagcugaagacagaagcacagaugagcauccaacugauaaacaaagcagugaacgcauugaucaaugaccaacugaucaugaagaaucauuugagagauaucaugggaauuccuuacuguaauuacagcagguacugguaucuaaaucacacuguaacagggaggacgucauugccaaggugcuggcuuguaucaaaugguuccuaucugaacgagacacacuuuucugaugacauugaacaacaagcagacaacaugauuacagaacuguugcaaaaggaguacauagauaggcaggggaaaacacccuuaggguuaguggaucuuuuugucuucagcaccagcuuuuaucucauuagcaucuuccuccaccuggucaaaaucccaacccacagacauaucauagggaaaccuuguccuaaaccacacagacucaaccacaugggcauaugcucauguggucuauacaaacauccugguguaccagucaaguggaagagauag

SEQ ID NO: 301 - RNA, 1473 nt, Artificial Sequence
  derived and/or modified protein sequence (wt) from LASV(ISTH2316-NIG-2012;Clade II)__AIT17564__GPC
auggggcaaaucauaacauuuuuccaggaagugccucaugucaucgaggaagugaugaacauuguccuaauugcucucagccuucuagcaauacuaaaagggauuuacaauguugcuaccuguggccucuuuggguugcuguccuuccuucucuuauguggaaggucaugcucaacaacuuacaaggguguuuaugagcuucaaacucuggagcuggauauggcaagccucaauaugacaaugcccuuauccuguacgaagaacaacagccaccacuacaucaugguuggaaaugagacuggcuuggagcugacuuuaacaaacacgaguaucaucaaccacaaguucugcaaccuuucugaugcacauaaaaaggaucucuaugaccaugcuuuaaugagcaucaucucaaccuuccaccuauccaucccuaacuuuaaucaguaugaagcaaugaguugugacuucaaugggggaaagauaaguguucaguacaaccucagccaugcuuaugcuguggaugcagcuaagcauugugggaccauugccaauggaguccuucaaacuuuuaugaggauggcuugggguggcaguuacauagcacuugauucuggaaaggggaguugggauuguauaaugacguccuaccaauauuugauaauccaaaacaccaguugggaggaucacugccaguuuucucgcccguccccuaucgguuaucuggggcuacugucacaaagaaccagggacaucuacaucagccgaagacuccuuggaacuuuuacuuggacucucucugauucugagggcaaugaaacaccggguggguauuguuuaacaagauggaugcugauugaagccgaauuaaagugcuuugggaacacagcaguugcgaaaugcaaugagaagcaugaugaagaguuuugugacauguuaagguuauuugacuuuaacaagcaggcuauaaagagguuaaagacagaagcacagaugaguauccaacuaauaaacaaagcagugaacgcacugaucaaugaccagcucauuaugaagaaccauuugagagauaucaugggaauuccuuacugcaauuacagcaaguauugguauuuaaaccacacuguaacagggaagacaucguugccaagaugcuggcuuguaucaaaugguuccuaccugaaugaaacacauuuuucugaugacauugagcaacaagcagacaacaugauaacagaauuguuacagaaagaguacauugacaggcaagggaaaacacccuuaggguugguggaucuuuuugucuucagcacuagcuucuaccuuauuagcaucuuccuccaccugguuaaaaucccaacccacagacaugucauagggaaacccugccccaagccacacagacucaaccacaugggcauaugcucauguggucuauacaaacauccugguguaccagucaaguggaaaagauag

SEQ ID NO: 302 - RNA, 1473 nt, Artificial Sequence
  derived and/or modified protein sequence (wt) from LASV(ISTH2358-NIG-2012;Clade II)__AIT17572__GPC
augggacaaaucauaacauuuuuccaggaaguaccucaugucauagaggaaguuaugaacauuguccugauugcucucagccuucuggcaauacugaaagggaucuacaauguugcuaccuguggccucuuuggacugguguccuuucuucucuuauguggaagaucaugcucaacaacuuacaaggguguuuaugagcuacaaacucuagagcuagacauggcaaaccuuaauaugacaaugcccuuauccugcacgaaaaacaacagccaccauuacaucauggucggaaaugagacuggucuggagcugacuuuaacaaauacaaguaucaucaaccacaaguuuuguaaccuuucugaugcacauaaaaagaaucuuuaugaccaugcuuuaaugaguauuaucucaacuuuccacuuauccauuccuaacuuuaaucaguaugaagcaaugaguugugacuucaauggggggaagauaaguguccaguacaaccuuagccacaauuaugcuguagaugcagcuaaucacugugggacuauugccaauggcguacuucagacuuuuaugaggauggcuuggggugguaguuacauagcacuugauuccggaaaggggaauugggauugcauuaugacuuccuaccaauauuuaauaauccaaaauaccacuugggaagaucacugucaguuuucucgcccauccccuauugguuaucugggguuacugucacaaaggaccagggacauuuacauuagucgaagacuucuugggacuuucacuuggacucucucugauucugaagguaaugauaugccggguggguauugucuaacaagauggaugcugauugaggccgaguugaagugcuuugggaacacagcaguugcgaaaugcaaugagaaacaugaugaagaguuuugugacauguuaagauuguuugacuuuaacaaacaagccauaaggagguugaagacagaagcacagaugaauauccaacugauaaacaaagcagugaacgcacugaucaaugaccagcugaucaugaagaaucauuuaagagauaucaugggaauuccuuacugcaauuacagcaaguauugguacuugaaucacacuguaacagggaaaacaucguugccaagauguuggcuugugucaaaugguuccuacuugaaugagacacauuuuucugaugacauugaacaacaagcagacaauaugauaacagaacuguugcaaaaggaguacauggacaggcaagggaaaacacccuuaggguuaguagaucuuuuugucuucagcaccagcuuuuaucucauuaguaucuuccuucaccugguuaaaaucccaacccacagacauaucauagggaaacccugcccuaaaccacacagacucaaccacaugggcauaugcucauguggucuguacaaacauccugguguaccagucaaguggaaaagauag

SEQ ID NO: 303 - RNA, 1473 nt, Artificial Sequence
  derived and/or modified protein sequence (wt) from LASV(ISTH2376-NIG-2012;Clade II)__AIT17576__GPC
auggggcaaauuauaacauuuuuccaagaaguaccucaugucauagaggaagugaugaacauuguccugauugcucucagccuucuggcaauucugaaagggaucuacaauguugcuacauguggccuuuuuggacuggugucuuuucuccucuuauguggaagaucaugcucaacaacuuacaaggguguuuaugagcuacagacucuagagcuagacauggcuagccuuaacaugacaaugcccuuaucuugcacgaagaacaacucccaccauuacaucauggucggaaaugagacuggcuuggagcugacuuuaacaaauacaaguauuaucaaccacaaguuuugcaaccucucugaugcacauaagaagaaucuuuaugaccaugcuuuaaugaguaucaucucaaccuuccacuuauccauucccaacuuuaaucaauaugaagcgaugagcugugacuucaauggggggaagauaagugugcaguacaaccucagccacacuuacgcuguggaugcggcuaaccacugugggaccauugccaauggcguucuucagacuuuuaugaggauggcuugggguggcaguuacauagcacuugauuccggaaaggggaauugggauugcauaaugacuuccuaccaauauuugauaauccaaaacaccacuugggaagaucacugccaguuuucucguccaucccccaucgguuaucuggggcuacugucacaaaggaccagggacauuuauaucagucgaagacuucuugggacuuucacuuggacucucucugauuccgaagguaaugaaacaccggguggguauugucuaacaagauggaugcugauugaggccgaguugaagugcuuugggaacacagcaguugcaaaauguaaugagaaacaugaugaagaguuuugugacauguuaagauuguuugacuuuaacaaacaagcuauaaguaggcugaagacagaagcacagaugaguauccaacugauaaacaaagcaguaaaugcacugaucaaugaccagcugauuaugaagaaucauuugagagauaucaugggaauuccuuauugcaauuacagcaaauauugguaucuaaaucacacuguaacagggaagacaucguugccaagaugcuggcuugugucaaaugguuccuaccugaaugaaacacauuuuucugaugacauugaacaacaagcagacaacaugauaacagaaauguugcaaaaggaguacauagauaggcaagggaaaacacccuuaggguuaguagaucuuuuugucuucagcaccaguuuuuaccuuauuagcaucuuccuccaccugguuaaaaucccaacccacagacacaucacagggaaacccugccccaaaccacacagacucaaccacaugggcauaugcucauguggucuauacaaacauccuggugugccagucaaguggaaaagauag

SEQ ID NO: 304 - RNA, 1473 nt, Artificial Sequence
  derived and/or modified protein sequence (wt) from LASV(Lassa virus/H.sapiens-wt/NGA/2015/ISTH_0543;Clade II)__AVO03639__GPC
augggacaaaucauaacauuuuuccaggaagugccucaugucauagaggaaguaaugaacauuguccugauugcucucagccuucuggcaauauugaaggggaucuacaauguagccaccuguggccuuuuuggacugguguccuuucuccucuuauguggaagaucaugcucaacaacuuauaagggugucuacgagcuacaaacucuagagcuggacauggcaaaccuuaauaugacaaugccccuaucuugcacaaagaacaacagucaccauuacaucauggucggaaaugaaacuggcuuggagcugacuuuaacaaauacaaguauuaucaaccacaaguuuugcaaccuuucugaugcacauaaaaagaaucucuaugaccaugcuuuaaugaguaucaucucaaccuuccacuuaucuauuccuaauuuuaaucaguaugaagcaaugaguugugacuucaauggagggaagauaaguguucaguacaaccuuagccacacuuaugcuguagaugcagccaaucacugugggacuaucgccaauggcguucuucagacuuuuaugaggauggcuugggguggcaguuacauagcacuugauucuggaaaggggaguugggauuguauaaugacuuccuaccaauaucugguaauccagaacaccacuugggaagaucacugccaauuuucucgcccauccccuaucgguuaucuggggcuacugucacaaaggaccagagacauuuacaucagucgaagacuucuugggacuuucacuuggacucucucugauucugaagguaaugaaacaccggguggguacugucuaacaagauggaugcugauugaggccgaguugaagugcuuugggaacacagcaguugcgaaaugcaaugagaaacaugaugaagaguuuugugacauguuaagacuguucgauuuuaacaaacaagcuauaaggaggcugaagacagaagcacagaugaguauccaacuaauaaacaaagcagugaaugcauugaucaaugaccagcuuauuaugaagaaucacuuaagagauaucaugggaauuccuuacugcaauuacagcaaguacugguaucuaaaucacacugugacagggaagacaucguugccaaggugcuggcuuguaucaaaugguuccuaccugaaugagacacauuuuucugaugauauugaacaacaggcagacaacaugauaacagaacuguugcaaaaggaauacauagacaggcaagggaaaacacccuuaggguuaguagaucuuuuugucuucagcaccagcuuuuaucucauuagcauuuuccuccaccuggucaaaaucccaacucacagacauaucacagggaaacccugcccuaaaccacacagacuuaaccacaugggcauaugcucauguggucuauacaaacauccugguguaccagucaaguggaaaagauag

SEQ ID NO: 305 - RNA, 1473 nt, Artificial Sequence
  derived and/or modified protein sequence (wt) from LASV(Lassa virus/H.sapiens-wt/NGA/2015/ISTH_0547;Clade II)__AVO03583__GPC
augggacaaaucauaacauucuuccaggaaguaccucaugucauagaggaagugaugaacauuguccugaucgcucuuagccuucuggcaauacugaaagggaucuacaauguugcuaccuguggucucuuuggauugguguccuuucuccucuuauguggaagaucaugcucaacaacuuacaagggcguuuaugaguuacaaacucuagaacuagacauggcaagccuuaauaugacaaugcccuugucuugcacgaagaacaacucccaccauuacaucauggucggaaaugagacuggccuggagcugacuuuaacaaacacaagcauuaucaaccacaaguuuuguaaccuuucugaugcacauaaaaagaaucucuaugaccaugcucuaaugaguaucaucucaaccuuccacuuauccauucccaacuuuaaucaauaugaagcaaugaguugugacuucaauggggguaaaauaaguguucaguacaaccuuagccacacuuaugcuguagaugcagcuaaccacuguggaaccauugccaauggcguucuucagacuuuuaugaggauggcuugggguggcaguuacauagcacuugauuccggaaaggggagcugggauugcauaaugacuuccuaucaauauuugauaauccaaaacaccacuugggaagaucacugccaguuuucucgcccgucccccaucgguuaucuagggcugcugucacaaaggaccagggacauuuacaucagucgaagacuucuugggacuuuuacuuggacucucucugacucugaaggaaaugaaacaccggguggguauugucuaacaagauggaugcugauugaggccgaguugaagugcuuugggaacacagcaguugcaaaaugcaaugaaaaacaugaugaagaguuuugugacauguuaagauuguuugacuuuaacaaacaagccauaaggagguugaagacagaagcacagaugaguauucaacugauaaacaaagcagugaacgcacugaucaaugaccagcuaauuaugaagaaucauuugagagauaucaugggaauuccuuacugcaauuacagcaaguauugguaccugaaucacacuguaacagggaagacaucguugccaagaugcuggcuugugucaaaugguuccuacuugaaugagacacauuuuucugaugacauugaacaacaagcagacaacaugauaacagaacuguugcaaaaggaguacauagaaagacaagggaaaacacccuuaggguuaguagaucuuuuugucuucagcaccagcuuuuaucucauuagcaucuuccuccaccugguuaaaaucccaacccacagacauaucacagggaaacccugccccaaaccacacagacucaaccauaugggcauaugcucauguggucuguacaaacauccuggugugccagucaaguggaaaagauag

SEQ ID NO: 306 - RNA, 1473 nt, Artificial Sequence
  derived and/or modified protein sequence (wt) from LASV(Lassa virus/H.sapiens-wt/NGA/2015/ISTH_0574;Clade II)__AVO03657__GPC
augggacaaaucauaacauuuuuccaggaaguaccucaugucauagaggaagugaugaacauuguucugauugcucuuagccuucuggcaauacugaaagggaucuacaauguugccaccuguggccucuuuggauugguggccuuucuccucuuguguggaagaucaugcucgacaaccuacaagggcguuuaugagcuacaaacuuuagagcuagacauggcaagccucaauaugacaaugccuuuaucuugcacgaagaacaacagccaucauuacaucauggucggaaaugagacuggcuuggagcugacuuuaacaaauacaaguauuaucaaccacaaguuuuguaaccuuucugaugcacauaaaaagaaucuuuaugaccaugcuuuaaugaguaucaucucaaccuuccacuuauccauucccaacuucaaucaguaugaagcgaugaguugugacuucaauggaggaaagauaaguguucaguacaaccuuagccacacuuaugcuguagaugcagcuaaccacuguggaaccauuaccaaugguguucuucagacuuuuaugaggauggcuugggguggcaguuacauagcacuugauuccggaaaggggaguugggacugcauaaugacuuccuaccaauauuugauaauccaaaacaccacuugggaagaucacugccaauuuucucgcccauccccuaucgguuaucuggggcuacugucacaaaggaccagggauauuuacaucagccgaaggcuccuuggaacuuuuacuuggacucucucugauucugaagguaaugaaacaccagguggguauugucuaacaagauggaugcugauugaggccgagcugaagugcuuugggaacacagcaguugcgaagugcaaugagaaacacgaugaagaguuuugugacauguuaagguuguuugacuuuaacaaacaagcuauaaggaggcugaagacggaagcacagaugaguauccaacugauaaacaaagcagugaacgcacuaaucaaugaccagcugaucaugaagaaucauuuaagagauaucauggggauucccuacugcaauuacagcaaauacugguaucuaaaucauacugugacagggagaacaucacugccaaggugcuggcuugugucaaaugguuccuaccugaaugagacacauuucucugaugacauugaacaacaagcagacaacaugauaacagaacuguugcaaaaggaguacauggacaggcaagggaaaacacccuuaggguuaguagaucuuuuugucuucagcaccagcuuuuaucucauuagcaucuuccuccaccugauuaaaaucccaacccauagacaugucauagggaaacccugcccuaaaccacacagacucaaccacaugggcauaugcucauguggucuguacaaacauccugguguaccaguuaaguggaaaagauag

SEQ ID NO: 307 - RNA, 1473 nt, Artificial Sequence
  derived and/or modified protein sequence (wt) from LASV(Lassa virus/H.sapiens-wt/NGA/2015/ISTH_0681;Clade II)__AVO03617__GPC
augggacaaaucauaacauuuuuccaggaaguaccucaugucauagaggaggugaugaacauuguccugauugcucucagccuucuggcaauacugaaagggaucuacaauguugcuaccuguggccucuuuggauugguguccuuccuccucuuauguggaagaucaugcucaacaacuuacaaggguguuuaugagcuacaaacucuggagcuagacauggcaagccuuaauaugacaaugcccuuaucuugcacgaagaauaacucccaccauuacaucauggucggaaaugagacuggcuuggagcugaccuuaacaaauacaagcauuaucaaccacaaguuuuguaaccuuucugaugcccauaaaaagaaucuuuaugaccaugcuuuaaugaguaucaucucaaccuuccacuuguccauuccuaacuuuaaccaguaugaagcaaugaguugugauuucaaugggggaaagauaaguguucaguacaaccuuagccacacuuaugcugaaggugcagccaaccacugugggaccauugccaauggcguucuucagacuuucaugagaauggcuugggguggcaguuacauagcacuugauuccggaaaggggagcugggauugcauaaugacuuccuaccaauauuugauaauccaaaacaccacaugggaagaucacugccaguuuucucgcccaucccccaucgguuaucuggggcuacuaucacaaagaaccagagacauuuacauuagucgaagacuucuugggacuuucacuuggacucucucugacucugaagguaaugaaacaccggguggguauugucuaacaagauggaugcugauugaggccgaguugaagugcuuuggaaacacagcaguugcaaaaugcaaugaaaaacaugaugaagaguuuugugauauguugagauuguuugauuucaacaaacaagcuauaaugaggcuaaagacagaagcacagaugaguauccaacugauaaacaaagcggugaacgcacugaucaaugaccagcuaaucaugaagaaucauuugagagauaucaugggaauuccuuacugcaauuacagcaaguauugguaucuaaaucacacuguaacagggaagacaucguugccaagaugcuggcuugugucgaaugguucuuacuugaaugagacacauuuuucugaugacauugaacaacaagcagacaacaugauaacagaaauguugcaaaaggaguacauggacaggcaagggaaaacacccuuaggguuaguagaucuuuuugucuucagcaccagcuuuuaucucauuagcaucuuccuccaccuaguuaaaauuccaacccacagacaugucauagggaaacccugcccuaagccacacagacucaaccacaugggcauauguucauguggucuguacaagcauccuggcgugccagucaaguggaaaagauag

SEQ ID NO: 308 - RNA, 1473 nt, Artificial Sequence
  derived and/or modified protein sequence (wt) from LASV(Lassa virus/H.sapiens-wt/NGA/2015/ISTH_0682;Clade II)__AVO03625__GPC
augggacaaaucauaacauuuuuccaggaaguaccucaugucauagaggaagugaugaacauuguccuaauugcucucagccuucuggcaauacugaaagggaucuacaauguugcuaccuguggccucuuuggauuggugucuuuucuccucuuguguggaagaucauguucaacaaccuacaagggcguuuaugagcuacaaaccuuagagcuggacauggcgagccuuaauaugacaaugcccuuaucuugcacaaagaacaacagccaucauuacaucauggucggaaaugagacuggcuuggagcugacuuuaacaaacacaaguauuaucaaccacaaguuuuguaaccuuucugaugcacauaagaagaaccuuuaugaccaugcuuuaaugaguaucaucucaaccuuccacuuguccauuccuaacuuuaaucaguaugaagcaaugagcugugacuucaauggcggaaagauaaguguccaguacaaccuuagccacgccuaugcuguagaugcagcuaaucacuguggaaccauugccaaugguguucuucagacuuuuaugaggauggcuugggguggcaguuacauagcacuugauucuggaaaggggaguugggacugcauaaugacuuccuaccauuaucugauaauccaaaacaccacuugggaagaucacugccaauuuucucgcccaucuccuaucgguuaucugggguuacugucacaaaggaccagggauauuuacaucagccgaaggcuucuugggacuuuuacuuggacucucucugauucugaaggcaaugaaacaccggguggguauugucuaacaagauggaugcugauugaggccgagcugaagugcuuugggaauacagcaguugcgaagugcaaugagaaacacgaugaagaguuuugugacauguuaaggcuguuugacuuuaacaaacaagccauaaggaggcugaagacggaagcacagaugaguauccaacugauaaacaaagcaguaaacgcacuaaucaaugaccagcugaucaugaagaaucauuugagagauaucaugggaauucccuacugcaauuacagcaaauacugguaucugaaucauacugugacagggaagacaucauugccaagaugcuggcuugugucaaaugguuccuaccugaaugagacacauuuuucugaugacauugaacaacaagcagacaacaugauaacagaacuguugcaaaaggaguacauagacaggcaagggaaaacacccuuaggguuaguagaccuuuuugucuucagcaccaguuuuuaucucauuagcaucuuccuccaccugguuaaaaucccaacccacagacaugucauagggaaacccugcccuaaaccacacagacucaaccacaugggcauaugcucauguggucuguacaaacauccugguguaccaguuaaguggaaaagauag

SEQ ID NO: 309 - RNA, 1473 nt, Artificial Sequence
  derived and/or modified protein sequence (wt) from LASV(Lassa virus/H.sapiens-wt/NGA/2015/ISTH_0687;Clade II)__AVO03581__GPC
auggggcaaaucauaacauuuuuccaggaaguaccucaugucauagaggaagugaugaacauuguccugauugcucucagccuucuggcaauacugaaagggaucuacaauguugcuaccuguggccucuuuggauugguguccuuucuccucuuauguggaagaucaugcucaacaacuuacaaggguguuuaugagcuacaaacuuuagagcuagacaugacaaaucuuaauaugacaaugcccuugucuugcacgaagaacaacucccaccauuacaucauggucggaaaugagacuggccuggagcugacuuuaacaaauacaagcaucaucaaccacaaguuuuguaaccuuucugaugcacauaaaaagaaucuuuauaaccaugcuuuaaugaguaucaucucgacuuuccacuuauccauuccuaacuuuaaucaguaugaagcaaugaguugugacuucaaugggggaaagauaaguguucaguacaaccuuagccacacuuaugcuguagaugcagcuaaccacugugggaccguugccaauggcguucuucagacuuuuaugaggauggcuuggggugguaguuacauagcacuugauuccgggaaggggggcugggauugcauaaugacuuccuaccaauacuugauaauccaaaacaccacuugggaagaucacugccaguuuucucgcccaucccccaucgguuaucuggggcugcugucacaaaggaccagagacauuuacaucagccgaagacuucuuggaacuuucacuuggacucucuccgacucugaaggcaaugaaacaccggguggauauugucuaacaagauggaugcugauugaggccgaauugaagugcuuugggaacacagcaguugcaaaaugcaaugagaaacaugaugaagaauuuugugacauguuaagauuguuugauuuuaacaaacaagcuauaaggaagcugaaggcagaagcacagaugaguauccaacugauaaacaaagcagugaacgcacugaucaaugaccagcugauuaugaaaaaucauuugagagacauuaugggaauuccuuacugcaauuacagcaaguauugguaucuaaaucacacuguuacagggaagacaucguuaccaaaaugcuggcuugugucaaaugguucuuaccugaaugagacacacuuuucugaugacauugaacaacaagcagacaauaugauaacagaacuguugcaaaaggaguacauggacagacaagggaaaacacccuuaggguuaguagaccuuuuugucuucagcaccagcuuuuaccucaucagcaucuuccuccaccugguuaaaaucccaacccacagacauaucauagggaaacccugcccuaaaccacacagacucaaccacaugggcauauguucauguggucuguauaaacauccuggugugccagucaaguggaaaagauag

SEQ ID NO: 310 - RNA, 1473 nt, Artificial Sequence
  derived and/or modified protein sequence (wt) from LASV(Lassa virus/H.sapiens-wt/NGA/2015/ISTH_0736;Clade II)__AVO03573__GPC
augggacaaauuauaacauucuuccaggaaguaccucaugucauagaggaagugaugaacauuguccugauugcucucagccuucuggcaguacugaaggggaucuacaauguugcuaccuguggccucuuuggauugguguccuuucuccucuuauguggaagaucaugcucaacaacuuacaaggguguuuaugagcuacaaacucuagaguuggacauggcaagccuuaacaugacaaugcccuuaucuugcacgaagaacaacagccaccauuacaucauggucggaaaugagacuggcuuagagcugaccuuaacaaacacaaguauuaucaaccacaaguucugcaaccuuucugaugcacacaaaaagaaucuuuaugaccaugcuuuaaugaguaucaucucaaccuuccacuuauccauuccuaacuucaaucaguaugaagcaaugaguugugacuucaauggggggaagauaaguguucaguacaaccuaagccauacucaugcuguagacgcagccaaucacugugggacuauugccaaugguguucuucagacuuuuaugaggauggcuugggguggcaguuacauagcacuugauuccggaaaggggaguugggauuguauaaugacuuccuaccaauauuugauaauccaaaacaccacuugggaagaucacugccaguucucucgcccauccccuauugguuaucuggggcuacugucacaaaggaccagggacauuuauaucagucgaagacuucuugggacuuuuacuuggacucucucugauucugaagguaaugaaacaccggguggguauugucuaacaagauggauguugauugaggccgaguugaagugcuuugggaacacagcaguugcgaaaugcaaugagaagcaugaugaagaguuuugugacauguuaagauuguuugacuuuaacaaacaggcuauaaggaggcugaagacagaagcacagaugagcauccaacugauaaacaaagcagugaacgcacugaucaaugaucagcugaucaugaagaaccauuugagagauaucaugggaauuccuuacugcaauuacagcagguacugguaucuaaaucacacuguaacagggaagacaucguugccaagguguuggcuugugucaaaugguuccuaccugaaugagacacacuuuucugaugacauugaacagcaagcagacaacaugauaacagaacuguugcaaaaggaguacauagacaggcaagggagaacacccuuaggguugguagaucuuuuugucuucagcaccagcuuuuaucucauuagcaucuuccuccaccuagucaaaaucccaacucacagacauguuauagggaaaccuugcccuaaaccacacagacucaaccacaugggcauaugcucauguggucuauacaaacauccugguguaccagucaaguggaaaagauag

SEQ ID NO: 311 - RNA, 1473 nt, Artificial Sequence
  derived and/or modified protein sequence (wt) from LASV(Lassa virus/H.sapiens-wt/NGA/2015/ISTH_0789;Clade II)__AVO03551__GPC
augggacaaauagugacauucuuucaagaaguuccucauguuauugaggagaucaugaacauuguccucaucacuuugucccugcuugcaauucucaagggaguauauaaccuugccacauguggucucaucggucugaucacauuccucuuucuuugugggaggucguguucaacaaucuacaaagggagcuaucaauuucagacacuugaacuaaacauggagacacucaacaugaccaugccccuguccuguacaaaaaauagcagucaccacuauauaagagugagcaaugaaacaggacuugaauugaccuugaccaacacaagcaucauaaaccacaaguuuugcaaucucucugaugcacauaaaaagaaucucuaugaucacacccucaugagcaucaucuccacuuuccacuuguccauucccaauuucaaucaguacgaagcaaugagcugugacuucaauggaggcaagaucaguguccaauacaaucuuagucacaguuaugcaguggaugcagccaaucacuguggcacuguggcaaauggagugcugcagaccuuuaugagaauggccuggggugggagcuacaucgcacuugacucgggcagaggaaauugggacuguauaaugacaagcuaucaauaccuaaucauucaaaauacaacaugggaagaccacugucaguucucaagaccaucuccuauugguuaucuuggacuucuaucacaaagaaccagagauauuuacaucagcaggagacuguugggaacauucacauggacacuaucagauucugaggguaaagaaacuccaggagguuacuguuugacuagauggaugcuaauagaagcugagcugaaguguuucgggaacacugcaguggcuaagugcaaugaaaaacaugaugaggaauuuugugacauguugaggcuuuuugauuucaacaaacaggccauucagagguugaaggcugaagcccaaaugagcauucaacuuaucaacaaggcaguaaacgcucuuauaaaugaccagcuuauaaugaagaaccaucucagggauaucaugggcauaccauauuguaauuacaguaaauacugguaccucaaucacacauccacgggcagaaccucacuaccaaaauguuggcuugugucaaacggguccuaucucaaugagacucauuuuucagaugacauagagcaacaagcugacaacaugauaacagagauguuacagaaagaauacauugauaggcaaggaaaaacuccacuuggacuaguugacuuguuuguguucagcaccaguuucuaucucaucaguauuuuccuucacuuggucaaaauuccaacucauaggcacauuguaggcaagucaugucccaaaccccauaggcugaaccauaugggcauuugcucuuguggauuguacaaacgaccagggguaccugugaaauggaagagauga

SEQ ID NO: 312 - RNA, 1473 nt, Artificial Sequence
  derived and/or modified protein sequence (wt) from LASV(Lassa virus/H.sapiens-wt/NGA/2015/ISTH_0821;Clade II)__AVO03641__GPC
augggacaaaucauaacauuuuuccaggaaguaccucaugucauagaggaagugaugaacauuguccugauugcucucagccuucuggcaauacugaaaggaaucuacaauguugcuaccuguggccucuuuggauugguguccuuucuccucuuauguggaagaucaugcucaacaacuuacaaggguguuuaugagcuacaaacccuggagcuagacauggcaagccuuaauaugacaaugcccuuaucuugcacaaagaauaacagucaccauuacaucauggucggaaaugagacuggcuuggagcugacuuuaacaaauacaaguaucaucaaccacaaguuuuguaaccuuucugaugcacauaaaaagaaucuuuaugaucacacuuugaugaguaucaucucaaccuuccacuuauccauuccuaacuucaaucaguaugaagcaaugaguugugacuucaauggggggaagauaaguguucaguacaaccuuagccacacuuaugcuguagaugcagccaaccacugugggaccaucgccaauggcguucuucaaacuuuuaugaggauggcuugggguggcaguuacauagcacuugauucuggaaagggaaauugggacuguauaaugacuuccuaccaauauuugauaauccagaacaccacuugggaagaucacugccaguuuucucgcccauccccuaucgguuaccuggggcuacugucacagaggaccagggacaucuacaucagucgaagacuucuugggacuuuuacuuggacucucucugauucugaggguaaugaaacaccagguggguauugucuaacaagauggaugcugauugaggccgaguugaagugcuuugggaacacagcaguugcaaaaugcaaugagaaacaugaugaagaguuuugugacauguuaagauuguuugacuuuaacaaacaagccauaagcaggcugaagacagaagcacaaaugaguauccaacugauaaacaaagcagugaacgcacugaucaaugaccagcugauuaugaagaaucauuugagagauaucaugggaauuccuuacugcaauuacagcaaguacugguaucugaaucacacugugacagggaagacaucauugccaagguguuggcuuguaucaaaugguuccuaccuaaaugaaacacacuuuucugaugacauugaacaacaagcagacaacaugauaacagaaauguugcaaaaggaguacauagacagacaagggaagacacccuuaggguuaguggaucuuuuugucuucagcaccagcuucuaucucauuagcaucuuccuccaccugguuaaaaucccaacccacagacaugucauaggaaaacccugccccaaaccacacagacucaaccacaugggcauaugcucaugugguuuauacaaacauccugguguaccagucaaguggaaaagauaa

SEQ ID NO: 313 - RNA, 1473 nt, Artificial Sequence
  derived and/or modified protein sequence (wt) from LASV(Lassa virus/H.sapiens-wt/NGA/2015/ISTH_0831;Clade II)__AVO03545__GPC
augggucagauagugacauucuuucaggaaguuccucaugucauugaggaaauuaugaacauuguccucaucacuuuaucucugcuugcaaucuugaaagguguguacaauuuggccacguguggccuuauuggucugauaacauuccuuuuccucuguggaaggucauguucgaugaccuacaaagggaguuaucaacuugaaacccuugaacugaacauggagacacuuaacaugaccaugccucuguccugcacaaaaaauaccagucaccacuacauaaggguggguaaugaaacagggcuugagcugacuuuaaccaauacaagcauuauaaaccacaaguucugcaaucucucugaugcccacaaaaagaaucucuacgaccacucucucaugagcauugucaguaccuuucaccuguccaucccuaacuucaaucaguaugaagcuaugaguugugacuucaauggagguaagaucaguauccaauacaauuuaagccacgccuaugcaggagaugcagccaaacauuguggcaccuuggcaaauggugugcuacaaaccuucaugaggauggcuuggggugggaguuacauugcacuugacucaggucgaggaaacugggauuguauaaugacuagcuaccaauacuuaaucauucagaauacaacuugggaugaccauugucaguuuucgagaccaucacccauuggcuaucuuggacuucucucucaaaggaccagagaaauuuacauuaguagaagacugcuaggaacauuuacauggacauuaucagauucugaaggcaaugaagcuccaggggguuacugcuuaacuagauggauguuaauugaagccgaacugaaauguuuugggaauacugcaguggcuaaaugcaaugagaagcaugaugaggaauuuugugacaugcugaggcuuuuugauuuuaacaaacaagccauucagagauugaagacugaggcucaaaugaguauucagcuuauuaacaaagcugucaaugcccucauaaaugaccaacuuauaaugaaaaaucaucucagggacauuaugggcauaccauauugcaacuauagcaaauauugguaucuuaaucauacgacuacggguagaacuucacuaccaagaugcuggcuuguaucaaacggguccuaucucaaugagacucauuucucagacgacauagaacaacaggcugacaauaugauaacagaaauguugcagaaagaguacaucgauagacaaggaaagaccccauuaggccugguugacuuguuuguguucagcacaagcuucuacuugaucagcauuuuucuacacuuggucaagauaccaacucauagacacauuguagguaaaucaugccccaagccucacaggcugaaccauaugggcauuugcucuugugggcuauauaaacagccaggagugccugugagguggaagagauga

SEQ ID NO: 314 - RNA, 1473 nt, Artificial Sequence
  derived and/or modified protein sequence (wt) from LASV(Lassa virus/H.sapiens-wt/NGA/2016/ISTH_0009;Clade II)__AVO03571__GPC
augggacaaaucauaacauuuuuccaggaaguaccucaugucauagaggaagugaugaacauuguccugauugcucucagccuucuggcaauacugaaggggaucuacaauguugccaccuguggccuccuuggacugguguccuuucuccucuuauguggaaggucaugcucaacaacuuauaaggguguuuaugagcuacaaacucuagagcuggacauggcaagccuuaauaugacaaugccccugucuugcacaaagaacaacagucaccauuacaucauggucggaaaugagacuggcuuggagcugacuuuaacaaauacaaguauuaucaaccacaaguuuuguaaccuuucugaugcacauaaaaagaaucucuaugaccaugcucuaaugaguaucaucucaaccuuccacuuaucuauuccuaauuuuaaccaguaugaagcaaugaguugugacuucaauggggggaggauaaguguucaguacaaccuuagccacucuuaugcuguagaugcagccaaucacugugggacuaucgccaauggcguucuucagacuuucaugaggauggcuugggguggcaguuacauagcacuugauuccggaaaggggaguugggauuguauaaugacuuccuaccaauacuugauaauccagaacaccacuugggaagaucacugccaguuuucucgcccauccccuaucgguuauuuggggcuacugucacagaggaccagagacauuuacaucagucgaagacuucuugggacuuuuacuuggacucucucugauucugaagguaaugaaacaccggguggguacugucuaacaagauggaugcugauugaggccgaguugaagugcuuugggaacacagcaguugcgaaaugcaaugagaaacaugaugaagaguucugugacauguuaagacuguuugauuuuaauaaacaagccauaaggaggcugaagacagaagcacagaugaguauccaacugauaaacaaagcagugaaugcauugaucaaugaccagcuuauuaugaagaaccacuugagagauaucaugggaauuccuuacugcaauuacagcaaguacugguaucuaaaucacacuguaacagggaagacaucguugccaaggugcuggcuugugucaaaugguuccuaccugaaugagacacauuuuuccgaugacauugaacaacaggcagacaacaugauaacagaauuguugcagaaggaguacauagacaggcaagggaaaacacccuugggguuaguagaucuuuuugucuucagcaccagcuuuuaucucauuagcaucuuccuccaccuggucaaaauuccaacccacagacauaucacagggaaacccugccccaaaccacacagacuuaaccacaugggcauaugcucauguggucuauacaaccauccuggugugccagucaaguggaaaagauag

SEQ ID NO: 315 - RNA, 1473 nt, Artificial Sequence
  derived and/or modified protein sequence (wt) from LASV(Lassa virus/H.sapiens-wt/NGA/2016/ISTH_0017;Clade II)__AVO03567__GPC
augggacaaaucauaacauuuuuccaggaaguaccucaugucauagaggaagugaugaacauuguccugauugcucucagccuucuggcaauacugaaagggaucuacaauguugcuaccuguggccucuuuggguugguguccuuccuccucuuaugugggagaucaugcucaacaacuuacaaggguguuuaugagcuacaaacucuagagcuagacauggcaagccuuaauaugacaaugcccuuaucuugcacgaagaacaauucccaccauuacaucauggucggaaaugagacuggcuuggagcugacuuuaacaaauacaagcauuaucaaccacaaguuuuguaaccuuucugaugcacauaaaaagaaucuuuaugaccaugccuuaaugagcaucauuucaaccuuccacuuauccauuccuaacuuuaaucaguaugaagcaaugaguugugacuucaaugggggaaaaauaaguguucaguacaaccuuagccauacuuaugcuauagaugcagcuaaccacugugggaccauugccaauggcguucuucagacuuuuaugaggauggcuugggguggcaguuacauagcacuugauuccggaaagggcagcugggacugcauuaugacuuccuaccaauauuugauaauccagaacaccacuugggaagaucacugccaguuuucucgcccaucccccaucgguuaucuggggcuacugucacaaaggaccagagacauuuacaucagucgaagacuucuugggacuuuuacauggacccucucugacucugaagguaaugaaacaccagguggguacugucuaacgagauggaugcugauugaggccgaguugaagugcuuugggaacacagcaguugcaaaaugcaaugagaaacaugaugaagaguuuugugauauguuaagauuauuugacuuuaacaaacaagcuauaaggaggcugaagacagaagcgcagaugaguauccaacugauaaacaaagcagugaacgcacugaucaaugaccagcugauuaugaagaaucauuuaagagauaucaugggaauuccuuacugcaauuacagcaaguauugguaucuaaaucacacuguaacagggaagacaucauuaccaagaugcuggcuugugucgaaugguuccuaccugaaugagacacauuuuucugaugacauugaacaacaagcagauaacaugauaacagaacuuuugcaaaaggaauauauggauaggcaagggaaaacacccuuaggguuaguagaucuuuuugucuucagcaccagcuuuuaucucauuagcaucuuccuccaccuggucagaaucccaacucacagacaugucauagggaaacccugcccuaaaccacacagacucaaccacaugggcauaugcucauguggucuguacaaacauccuggugugccagucaaauggaaaagauag

SEQ ID NO: 316 - RNA, 1473 nt, Artificial Sequence
  derived and/or modified protein sequence (wt) from LASV(Lassa virus/H.sapiens-wt/NGA/2016/ISTH_0035;Clade II)__AVO03619__GPC
augggacaaaucauaacauucuuccaggaaguaccucaugucauagaggaagugaugaacauuguccugauugcucucagccuucuagcaauacuaaaagggaucuacaauguugcuacuuguggccucuuuggauugguguccuuccuccucuuauguggaagaucaugcucaaugacuuacaaggguguuuaugagcuacaaacucuagagcuagacauggcaagccucaacaugacaaugcccuuaucuugcacgaagaacaacucccaccauuacaucauggucggaaaugagaccggcuuggagcugacuuuaacaaauacaaguaucaucaaccacaaguuuugcaaccuuucugacgcacauaaaaagaaucuuuaugaccaugcuuuaaugaguaucauuucaaccuuccacuuguccaucccuaacuuuaaucaguaugaagcaaugagcugcgacuucaaugggggaaagauaaguguucaauacaaccuuagccacacuuaugcuguagaugcagcuaaccacugugggacuauugccaauggaguucuucagacuuuuaugaggauggcuugggguggcaguuacauagcacuugacuccggaaaggggagcugggauugcauaaugacuuccuaccaauauuugauaauccaaaacaccacuugggaggaucacugccaguuuucucgcccaucccccaucgguuaucugggacugcugucacaaaggaccagggacauuuacaucagucgaaggcuucuugggacuuuuacuuggacucucucugauucugaagguaaugaaacaccggguggguauugucuaacaagauggaugcugauugaggccgaguugaagugcuuugggaacacagcaguugcaaaaugcaaugagaaacaugaugaagaguuuugugacauguuaagauuguuugacuuuaauaaacaagcaauaaggaggcugaagacagaagcacagaugaguauccaacuaauaaacaaagcagugaacgcacugaucaaugaucaacugauuaugaagaaucauuugagagauaucaugggaauucccuacugcaauuacagcaaguauugguaucuaaaucacacuauaacagggaagacaucguugccaagaugcuggcuugugucaaauggcuccuaucugaaugagacacauuuuucugaugacauugaacaacaagcagacaacaugauaacugaacuguuacagaaggaauacauggacagacaagggaaaacaccccuaggguugguggaucuuuuugucuuuagcaccagcuuuuaucucauuaguauuuuccuucaucugguuaaaauuccaacccacagacaugucauagggaaacccugcccuaaaccacacagacucaaccacaugggcauaugcucauguggucuguacaaacauccuggugugccaguuaaguggaaaagauag

SEQ ID NO: 317 - RNA, 1473 nt, Artificial Sequence
  derived and/or modified protein sequence (wt) from LASV(Lassa virus/H.sapiens-wt/NGA/2016/ISTH_0104;Clade II)__AVO03631__GPC
auggggcaagucauaacauucuuccaagaggugccucaugucauagaggagguuaugaacauuguccuaauugcccuuagucuccuagcaauacugaaagggauuuacaauguugcuaccuguggucucuuuggguugaucuccuuccuucuccuauguggcagaucauguucaacaaccuauaaagguguuuacgagcuacaaacucuggagcugaauaugcaaaaccuuaauaugacaaugcccuugucuugcacgaagaacagcagccaucauuauaucaugguuggaaaugaaacaggccuggaacuaacccuaacaaacacaagcaucauuaaucacaaguuuugcaaccuuucugaugcgcauaaaaagaaucucuaugaccaugcuuuaaugaguaucaucucaaccuuccauuuauccauuccaaacuucaaucaguaugaagcaaugaguugugacuucaauggagggaaaauaaguguucaguacaaccucagucacacuuaugcuauagaugcagccaaccacugugggaccguugcuaacgguguucugcagaccuuuaugaggauggcuugggguggcaguuacauagcacuugauucuggaagagggaacugggauuguauaaugacuuccuaucaauacuugauaauucaaaacaccacuugggaagaucacugccaguucucucgcccauccccuauugguuacuugggacuauugucacagagaacuagagauaucuauaucagccgaagacuucucggaaccuucacuuggacccuuucugauucugaggguaaugaagcaccugguggauauugucuaacuagauggauguuaauugaagcggaacugaaaugcuucgggaacacagcaguugcaaagugcaacgagaagcaugaugaagaguuuugugacauguugagacuguuugauuucaacaaacaagcuauaaagaggcugaaaacagaagcgcagaugagcauucagcugauaaacaaggcagugaaugcacuaaucaaugaccagcugauuaugaagaaccaccuaagggacaucaugggaauuccuuauugcaauuacaguaaguacugguaucuaaaccacacugugacagggagaacaucacugccgagauguuggcuugugucaaauggauccuaccugaacgacacacaauuuucugaugacauugaacaacaagcagacaacaugauaacugagauguugcaaaaagaguacauggacaggcaggggaaaacaccuuuaggguuaguggaccuuuuugucuuuagcacuagcuuuuaccucauaagcaucuuccuccaccuggucaagaucccaacucacagacacauuguggggagaccuuguccuaagccgcacaggcucaaccauaugggcauuugcucauguggucuauacaaacaucccggugucccagucaaauggaagagauaa

SEQ ID NO: 318 - RNA, 1476 nt, Artificial Sequence
  derived and/or modified protein sequence (wt) from LASV(Lassa virus/H.sapiens-wt/NGA/2016/ISTH_0133;Clade II)__AVO03635__GPC
auggggcagauaauaacauucuuccaagagguaccucaugucauagaagaggugaugaacauuguuuuaauugcccucagucuucuagcaguacugaaggcgaucuacaauguugcuaccuguggagucuuugggcugaucucauuucuucuucuguguggaagaucaugcucaacaacuuacaagggagucuaugaacuacaaacucuggaguuagacauggcaaaccuuaauaugacgaugcccuuauccuguacaaagaacaacagccaucauuacauuaugguugggaaugaaacaggcuuagagcugaccuugacgaauacaagcaucaucaaccacaaguuuuguaaucuuucugaugcacauaaaaagaaccuuuaugaccauagucuaaugagcaucauuucaacuuuccaccuguccauuccaaacuucaaucaguaugaagcaaugaguugugacuucaacgggggcaaaauuagugugcaauacaaccucagucauucuuacgcuguggaugcagccaaacauugugguaccauugcuaaugguguccugcagaccuuuaugaggauggccugggguggcagcuacauagcacuugauucuggaaaggggggcugggauuguauaaugacuuccuaucaauaucugauaauucaaaacaccaccugggaagaucacugccaguuuucccguccaucuccuauugguuaucugggacuacuuucacagagaaccagggacauuuauaucagccgaaggcuucucggaaccuuuaccuggacccuuucugacucugaaggcaaugaugcaccugguggguacugccuaacuagguggaugcugauugaagccgaacugaaguguuucgggaauacagccauugcaaaguguaacgagaaacaugacgaggaauuuugugacaugcuaagauuguucgacuuuaauaggcaagccauaaagagguugaagacagaagcacaaaugagcauccaauuaauaaacaaggcagugaaugcacuaauuaaugaucagcuaaucaugaagaaccacuugagagacauuaugggaauuccuuauuguaauuacaguaaauacugguauuugaaccacacuauaacagggaaaacaucauugccaagaugcuggcucguuucaaacgguucuuacuuaaacgaaacacauuuuucugaugacauugaacaacaagcagauaacaugauaacagaacuacugcaaaaggaauacauggacagacaagggaaaacaccuuuaggacugguggaccuuuuugucuuuaguacuagcuuuuaucucauaagcaucuuucuucacuuagucaaaaucccaacucauaggcauauugugggaaaaccuuguccuaaaccacacagacuuaaucacaugggcauaugcucauguggucuauauaaacaucccggcgucccagucaaguggaagagacaguga

SEQ ID NO: 319 - RNA, 1473 nt, Artificial Sequence
  derived and/or modified protein sequence (wt) from LASV(Lassa virus/H.sapiens-wt/NGA/2016/ISTH_0141;Clade II)__AVO03649__GPC
augggacaaaucauaacauucuuccaggaaguaccucaugucauagaggaaguuaugaacauuguccugaucacucucagccuucuggcaauacugaaagggaucuacaauguugcuaccuguggccucuuuggauugguguccuuucuccucuuauguggaagaucauguucaacaauuuacaagggugucuaugagcuacaaacuuuagagcuagacauggcaagccuuaauaugacaaugcccuugucuugcacgaagaacaauucccaccauuacaucauggucgggaacgagacuggccuggagcugacuuuaacaaauacaagcauuaucaaccacaaguuuugcaaccuuucugaugcacacaaaaagaaucuuuaugaccaugcuuuaaugaguaucauuucaacuuuccacuuauccauuccuaacuuuaaucaguaugaagcaaugaguugugauuucaaugggggaaagauaaguguucaguacaaccuuagccacacuuaugcuguagaugcagcugaacacugugggacuauugccaauggcguucuucagacuuuuaugaggauggcuugggguggcaguuauauagcacuugauucuggaaaggggagcugggauugcauaaugacuuccuaccaauauuuaauaauccaaaacaccacuugggaagaucacugccaguuuucucgcccaucccccaucgguuaucugggguugcugucacagaggaccagggacauuuacaucagucgaagacuucuuggaacuuuuacuuggacucucucugacucugaagguaaugaaacaccggguggguauugucuaacgagauggaugcugauugaggccgaguugaaguguuuugggaacacagcaguugcaaaaugcaaugagaaacaugaugaagaauuuugugacauguuaagacuguuugacuuuaacaaacaagcuauaaggagacugaagacagaagcacagaugagcauccaacugauaaacaaagcagugaacgcacugaucaaugaccaacugauuaugaagaaucauuugagagauauuaugggaauuccuuacugcaauuacagcaaguauugguaucuaaaucacacuguaacaggaaagacaucgcuaccgagaugcuggcuugugucaaaugguuccuaucugaaugagacacguuucucugaugauauugaacaacaagcagacaacaugauaacagaacucuugcaaaaggaguacauagacaggcaggggaaaacacccuuaggguugguagaccuuuuugucuucagcaccagcuuuuaucucauuagcaucuuccuucaccuggucaagaucccaacccacagacauaucauagggaaacccugcccuaaaccacacagacucaaccauaugggcauauguucauguggucuguacaaacauccugguauaccagucaaguggaaaagauag

SEQ ID NO: 320 - RNA, 1473 nt, Artificial Sequence
  derived and/or modified protein sequence (wt) from LASV(Lassa virus/H.sapiens-wt/NGA/2016/ISTH_0146;Clade II)__AVO03633__GPC
augggacaaaucauaacauucuuccaggaaguaccucaugucauagaggaagugaugaacauugucuugauugcucucagccuucuggcaauacugaaagggaucuacaauguugcuaccuguggccucuuuggauugguguccuuucuccucuuauguggaagaucauguucaacaacuuacaaggguguuuaugagcuacaaacucuagagcuagacauggcaagccuuaauaugacaaugcccuuaucuuguacaaagaacaacucccaccauuacaucauggucggaaaugagacuggcuuggagcugacucuaacaaauacaagcauuaucaaccacaaguucugcaaccuuucugaugcacauaaaaagaaucuuuaugaccaugcuuuaaugaguaucaucucaaccuuucacuugucuauuccaaacuuuaaucaguaugaagcaaugaguugugauuucaauggagggaagauaaguguucaguacaaccuuagccacacuuaugcuguagaugcagcuaaccacugugggacuauugccaauggcguucuucagacuuuuaugaggauggcuugggguggcaguuacauagcacuugauuccggaaaggggagcugggauugcauaaugacuuccuaccaauauuugauaauccaaaacaccacuugggaagaccacugccaguuuucucgcccaucccccaucgguuaucuggggcuacugucacaaaggaccagggacauuuacaucagucgaagacuucucgggacuuuuacuuggacucucucugauucugaagguaaugaaacaccggguggguauugucuaacaagauggaugcugauugaggccgaauugaagugcuuuggaaacacagcaguugcgaaaugcaaugaaaaacaugaugaagaguuuugugacauguuaagauuguuugacuuuaacaagcaagcuauaaggaggcugaagacagaagcacagaugaguauccaacugauaaauaaagcagugaacgcacugaucaaugaccagcugauuaugaagaaucauuuaagagauaucaugggaauuccuuacugcaauuacagcaaguauugguaucuaaaucacacuguaacagggaagacaucgcuaccaagaugcuggcuugugucaaaugguuccuaucuaaaugaaacacauuucucugaugacauugaacaacaagcagacaacaugauaacugaacuguugcaaaaggaguacauggacaggcaagggaagacacccuuaggguuaguggaucuuuuugucuucagcaccagcuuuuaucuuauuagcaucuuccuucacuugguuaaaaucccaacccacagacacguuauagggaaacccugcccuaaaccacacagacucaaccacaugggcauaugcucauguggucuauacaaacauccugguguaccagucaaauggaaaagauaa

SEQ ID NO: 321 - RNA, 1473 nt, Artificial Sequence
  derived and/or modified protein sequence (wt) from LASV(Lassa virus/H.sapiens-wt/NGA/2016/ISTH_0187;Clade II)__AVO03549__GPC
augggacagauugugacauucuuccaagaagucccucauguuauugaggaggugaugaacaucguucucauagcauuaucuguuuuagcaauuuuaaaggggcucuacaacuuugccacaugcggcuugauaggccuuguaacauuccuccuacuuucugggaggucauguucaauggucuacaaaggaguuuaugaacuacaaacccuugaauugaacauggagacauuaaauaugacuaugccauuguccugcacaaaaaacaacagccaucauuacauccgugugggaaaugauacugggcuugaacucacccugaccaacaauacuuuacucaaccauaaguuuugcaaccucucagaugcucacaagaaaaaucucuaugaucaugcccucaugagcaucauuucuaccuuccaucuguccauccccaacuucaaccaguaugaagcaaugaguugugacuucaauggcggacggauaacagugcaauacaaccuaagucacaguuacgcaguugaugcagcaaaccacugcggcacaguggcaaauggugugcugcagacauuuaugagaauggcuuggggaggcagcuacauugcccuugauucuagacaugggaacugggacuguauaaugaccaguuaucaauacuuaauuauccagaauacaacuugggaagaccacugccaguucuccagaccaucucccauuggcuaucucgggcuccucucacaaagaaccagggauauuuacauuaguaggagauuauuagguacguucacuuggacgcucucugacucugaagggaaugagacaccaggaggauacugccucaccagguggauguuaauugaggcugagcugaaguguuuuggaaacacagcaguugccaaguguaaugaaaaacaugaugaagaguuuugugacaugcuaagacuauuugacuuuaacaagcaagccauaaggaggcuaaaggcagaggcccaaaugaguauacaauugaucaacaaagcagucaaugccuuaauaaaugaucagcugauuaugaagaaucaucugagagauauuauggguauaccauacugcaauuauaguaaguauugguaccucaaucacacaucaacagggaagacuucauugccuagauguuggcuuguuucaaacgggucauaccucaaugaaacucacuuuucugaugacauugaacaacaggcugacaacaugauaacugagauguugcaaaaggaauacuuagacagacaaggaaaaaccccuuuagggcuaguugauauuuuugucuuuagcacaaguuuuuaucugaucagcauuuuccuccaucugaucaaaauacccacccauaggcauauuguggggaaaccuugccccaaaccccacaggcuaaaucacaugggcaucuguucuugugguuuauacaaacagccgggggugccugucagauggaagagauaa

SEQ ID NO: 322 - RNA, 1473 nt, Artificial Sequence
  derived and/or modified protein sequence (wt) from LASV(Lassa virus/H.sapiens-wt/NGA/2016/ISTH_0199;Clade II)__AVO03653__GPC
augggacaaaucauaacauuuuuccaggaaguaccucaugucauagaggaagugaugaacauugucuugauugcucucagccuucuggcaauacugaaaggaaucuacaauguugccaccuguggccucuuuggauugguguccuuucuccucuuauguggaagaucaugcucaacaacuuacaaggguguuuaugagcuacaaacccuggagcuagacauggcaagccuuaauaugacaaugcccuuaucuugcacaaagaauaacagucaccauuacaucauggucggaaaugagacuggcuuggagcugacuuugacaaauacaaguaucaucaaccacaaguuuuguaaccuuucugaugcacauaaaaagaaucuuuaugaucacgcuuugaugaguaucaucucaaccuuccacuuauccauuccuaacuucaaucaguaugaagcaaugaguugugacuucaauggggggaagauaaguguucaguacaaccuuagccacacuuaugcuguagaugcagccaaccacugugggaccaucgccaauggcguucuucaaacuuuuaugaggauggcuugggguggcaguuacauagcacuugauucuggaaagggaaauugggacuguauaaugacuuccuaccaauauuugauaauccagaacaccacuugggaagaucacugccaguuuucucgcccauccccuaucgguuaccuggggcuacugucacagaggaccagggacaucuacaucagucgaagacuucuugggacuuuuacuuggacucucucugauucugaagguaaugaaacaccagguggguauugucuaacaagauggaugcugauugaggccgaguugaagugcuuugggaacacagcaguugcaaaaugcaaugagaaacaugaugaagaguuuugugacauguuaagauuguuugacuuuaacaaacaagccauaagcaggcugaagacagaagcacaaaugaguauccaacugauaaacaaagcagugaacgcacugaucaaugaccagcugauuaugaagaaucauuugagagauaucaugggaauuccuuacugcaauuacagcaaguacugguaucugaaucacacuguaacagggaagacaucauugccaaggugcuggcuuguaucaaaugguuccuaccuaaaugaaacacacuuuucugaugauauugaacaacaagcagacaacaugauaacagaaauguugcaaaaggaguacauagacaggcaagggaagacacccuugggguuaguggaucuuuuugucuucagcaccagcuuuuaccucauuagcaucuuccuccaccugguuaaaaucccaacccacagacaugucauaggaaaacccugccccaaaccacacagacucaaccauaugggcauaugcucaugugguuuauacaaacauccugguguaccagucaaguggaaaagauaa

SEQ ID NO: 323 - RNA, 1473 nt, Artificial Sequence
  derived and/or modified protein sequence (wt) from LASV(Lassa virus/H.sapiens-wt/NGA/2016/ISTH_0419;Clade II)__AVO03539__GPC
augggacaaauagugacauucuuucaagaagucccucauguuauugaggaagucaugaacauuguccucauugcuuugucccuacuugcaauucucaaggggauauacaacuuugcuacaugcggccuuauuggccugaucacauuccucuuucuuuguggaaggucguguucggcgaucuacaagggaagcuaucaacuccagacaauugagcuaaacauggaaacacucaacaugacuaugccccuaucuuguacaaagaacagcagccaccacuacauaagagugggcaaugagacaggauuggaauuaaccuuaacuaacauaaguaucauugaccauaaauuuugcaaucucucugaugcacacaaaaagaaucucuaugaccacgcccucaugaguaucauuuccacuuuccauuuauccauccccaauuucaaucaguaugaggcaaugagcugugacuucaauggaggcaagaucaguguccaguauaaucugagucauacuuaugcaguggaugcagcuaaucauugcggcacuguggcaaauggugugcugcagacuuucaugagaauggccuggggugggagcuacaucgcgcuugauucaggccgaggaaauugggacugcauaaugacaagcuaccaauacuuaaucauucaaaauacgacaugggaggaccacugucaguucucaagaccaucuccuauugguuaucuuggacuucuaucacagagaaccagagauauuuacaucagcagaagacuguugggaacauucacauggacacuaucagacucugaaggcaaagaaaccccaggaggcuacugcuuaacuagauggauguuaaucgaagcugaacuaaaguguuucggaaacacugcaguagcuaaaugcaaugagaaacaugaugaggaauuuugugauauguugaggcuuuuugacuucaacaaacaagccauucagagguugaaggcugaggcccagaugagcauccaacuuaucaacaaggcagucaacgcucuuauaaaugaccagcugauaaugaaaaaccaccucagggauaucaugggcauaccauauugcaacuacaguaaauacugguaucuuaaucacacguccacagguaggacuucacuaccaagauguuggcuugugucaaacggauccuaccucaaugagacccauuuuucagaugauauagagcaacaagccgacaacaugauaacggagauguugcagaaggaauacauugauaggcaagggaagaccccacuuggauuaguugacuuauuuguauucagcacuaguuucuaccuuaucagcaucuuccuucauuugaucaaaaucccaacccauaggcacauugugggcaaaucaugccccaaaccucauaggcuaaaccacaugggcaucugcuccuguggacuguacaaacagccagguguaccugugaaauggaagagauga

SEQ ID NO: 324 - RNA, 1473 nt, Artificial Sequence
  derived and/or modified protein sequence (wt) from LASV(Lassa virus/H.sapiens-wt/NGA/2016/ISTH_0447;Clade II)__AVO03559__GPC
augggacaaaucauaacauucuuccaggaagugccucaugucauagaggaagugaugaacauuguccugauugcucucagccuucuggcaauauugaaagggaucuacaauauugcuaccuguggccucuuuggguugguguccuuccuccucuuauguggaagaucaugcucaacaacauacaaggguguuuacgaacuacaaacccuagagcuagacauggcaagccuuaauaugacaaugccccugucuugcacgaagaacaauucccaccauuacaucauggucggaaaugagacuggcuuagaauugacuuuaacaaauacaagcauuaucaaccacaaguuuugcaaccuuucugaugcacauaaaaagaaucuuuaugaccacacuuuaaugaguaucaucucaaccuuccacuuauccauuccuaacuuuaaucaguaugaggcaaugaguugugauuucaaugggggaaagauaaguguucaguacaaccuuagccacgcuuaugcuguagaugcagccaaccacugugggaccauugccaauggcguucuccagacuuuuaugaggauggcuugggguggcaguuacauagcacuugauucuggaaaggggaacugggauugcauaaugacuuccuaccaguauuuaauaauccaaaacaccacuugggaagaucauugucaguuuucucgcccaucccccaucgguuaucuggggcugcugucgcaaaggaccagggacauuuacaucagucgaagacuucuugggacuuuuacuuggacucucucugacucugaagguaaugaaacaccggguggauauugucuaacaagauggauguugauugaggcugaguugaagugcuuugggaacacagcaguugcaaaauguaaugagaaacaugaugaggaguuuugugacauguugagauuguuugacuuuaacaaacaagcuauaaggaggcugaagacagaagcgcagaugagcauccaacugauaaacaaagcagugaacgcacugaucaaugaccagcugauuaugaagaaccauuugagggauaucaugggaauuccuuacugcaauuacagcaaauauugguaucuaaaucacacugugacagggaagacaucauugccaagaugcuggcuuguaucaaaugguuccuaccugaaugagacacauuuuucugaugacauugaacaacaagcagacaacaugauaacagaauuguugcaaaaggaguacauagacaggcaaggaaaaacacccuuaggguuaguagaucuuuuugucuucagcaccagcuuuuaucucauuagcaucuuccuccaccugguuaaaaucccaacccacagacauguuguagggaaacccugccccaaaccacauagacucaaucacaugggcauaugcucaugugguuuguacaaacauccuggugugccagucaaguggaaaagauag

SEQ ID NO: 325 - RNA, 1473 nt, Artificial Sequence
  derived and/or modified protein sequence (wt) from LASV(Lassa virus/H.sapiens-wt/NGA/2016/ISTH_0543;Clade II)__AVO03595__GPC
auggggcaaauaauaacauucuuucaggaaguuccucaugucauagaagaggugaugaauauuguccugauugcucucagccuccuggcgauacugaaggggauuuacaauauugcuacuuguggccucuucgggcugaucuccuuucuucuucuguguggaagaucaugcucaacaaccuacaaaggugucuaugagcuacaaaccuuggagcuggauauggcaaaccucaacaugaccaugccucuaucuuguacaaaaaacaacagccaucacuauaucaugguugggaaugagacaggccuagaacugaccuugacaaacacaaguauaaucaaucacaaguucugcaaccuuucugaugcacacaaaaagaaucuuuaugaucaugccuugaugagcaucauuucaacuuuccacuuauccauuccgaacuucaaucaguaugaagcaaugaguugugacuuuaauggagggaagauaagugugcaauacaaucucagucauaguuaugcuguagaugcagccggccacugugggaccauugccaacgguguccuacagacuuucaugagaauggcuuggggcggcaguuacauagcacuugauucuggaaaggggaacugggauugcauaaugacuuccuaucaguauuugguuauccaaaacaccaccugggaagaucacugucaauuuucccgcccauccccuauuggauaccuaggacugcugucacaaagaacuagagauauuuacauuagucggagacuucuuggaaccuucaccuggacucucucugacucugagggcaaugaagcaccggguggauacugccuuacuagauggaugcuaauugaagcugaauugaagugcuuugggaacacagccauugcaaaguguaaugagaagcacgaugaggaauucugugauauguugagacuuuuugacuucaacaaacaagccauaagaaggcuaaaagcagaagcacagaugagcauccaguugauaaauaaagcaguaaaugcacugaucaaugaccaguugaucaugaagaaccacuugagggauaucaugggaauuccuuauugcaauuacagcaaguacugguaucuaaaccacacugugacagggaagacaucauugccaaaguguuggcuuguuucaaaugguucuuaccuaaaugagacacauuucuccgaugauauugaacagcaagcagauaacaugauaacagaacugcugcaaaaggaguacauggacaggcaggggaaaacacccuuaggguuaguggaucuuuuuguuuucagcacuagcuuuuaucucauaaguauuuuccuccaccuggucaaaauuccgacccauagacacauuguggggagacccugccccaaaccacacagacucaaccacaugggcauaugcucaugugguuuguacaaacauccugguguaccugucaaguggaagagauag

SEQ ID NO: 326 - RNA, 1473 nt, Artificial Sequence
  derived and/or modified protein sequence (wt) from LASV(Lassa virus/H.sapiens-wt/NGA/2016/ISTH_0565;Clade II)__AVO03637__GPC
augggacaaauaguaacauucuuucaggaagucccucaugucauagaagaggugaugaauauuguccugauugcucucagucuccuggcgauacugaaggggauuuacaauguugccacuuguggccucuuuggacuaaucuccuuccuucuucuguguggaagaucaugcucaacaaccuacaaaggugucuaugagcuacaaacucuggaguuggacauggcaaaccucaacaugacuaugccucuaucuuguacaaaaaacagcagccaucacuauaucaugguugggaaugaaacaggccuagaacugaccuugacaaacacaagcauaaucaaucacaaguuuugcaaccucucugaugcacacaagaagaaucuuuaugaucaugccuugaugagcaucauuucaacuuuccacuuauccauuccgaacuucaaucaguaugaagcaaugaguugugacuuuaauggagggaaaauaagugugcaauacaaucucagucauacuuaugcuguagaugcagccaaccacugugggaccauugccaacgguguccuacagacuuuuaugagaauggcuuggggcggcaguuacauagcacuugacucugggaaagggaauugggauugcauaaugacuuccuaucaguacuugauuauccagaacaccaccugggaagaucacugucaauuuucccgcccguccccuauuggauacuuaggacuguuaucacagagaacuagagauauuuacauuagucggagacuucuuggaacuuucaccuggacucucucugacucugagggcaaugaggcacccgguggauacugccuuacuagauggaugcuaauugaagcugaauugaagugcuuugggaacacagccauugcgaaguguaaugagaagcacgaugaggaauuuugugauauguugagacuuuuugacuuuaacaaacaagccauaaaaaggcuuaaaucagaagcacagaugagcauccaauugauaaauaaagcaguaaaugcacuaaucaaugaucaguuaaucaugaagaaccacuugagggauaucauggggauuccuuauugcaauuacagcagguacugguauuugaaccacacugugacagggaagacaucauugccaagguguuggcucauuucaaaugguucuuaccuaaaugagacacauuucuccgaugauauugaacagcaagcagauaacaugauaacagagcuguugcaaaaggaguauauggacaggcaggggaaaacacccuuaggguuaguggaucuuuuuguuuucagcacuagcuuuuaucucauaagcauuuuccuucacuuggucaaaaucccgacccauaggcacauuguggggagaccuugccccaagccacacagacucaaccacaugggcauaugcucguguggucuguacaaacauccugguguaccagucaaguggaagagauag

SEQ ID NO: 327 - RNA, 1473 nt, Artificial Sequence
  derived and/or modified protein sequence (wt) from LASV(Lassa virus/H.sapiens-wt/NGA/2016/ISTH_0572;Clade II)__AVO03611__GPC
augggacaaaucauaacauuuuuccaggaaguaccucaugucauagaggaagugaugaacauuguucugauugcucuuagccuucuggcaauacugaaagggaucuacaauguugccaccuguggccucuuuggauugguggccuuucuccucuuguguggaagaucaugcucgacaaccuacaagggcguuuaugagcuacaaaccuuagagcuagacauggcaagccucaauaugacaaugccuuuaucuugcacgaagaacaacagccaucauuacaucauggucggaaaugagacuggcuuggagcugacuuuaacaaauacaaguauuaucaaccacaaguuuuguaaccuuucugaugcacauaaaaagaaucuuuaugaccaugcuuuaaugaguaucaucucaaccuuccacuuauccauucccaacuuuaaucagcaugaagcgaugaguugugacuucaauggaggaaagauaaguguucaguacaaccuuagccacacuuaugcuguagaugcagcuaaccacuguggaaccauugccaaugguguucuucagacuuuuaugaggauggcuugggguggcaguuacauagcacuugauuccggaaaggggaguugggacugcauaaugacuuccuaucaauauuugauaauccaaaacaccacuugggaagaucacugccaauuuucucgcccauccccuaucgguuaucuggggcuacugucacaaaggaccagggauauuuacaucagccgaaggcuccuuggaacuuuuacuuggacucucucugauucugaagguaaugaaacaccagguggguauugucuaacaagauggaugcugauugaggccgagcugaagugcuuugggaacacagcaguugcgaagugcaaugagaaacacgaugaagaguuuugugacauguuaagguuguuugacuuuaacaaacaagcuauaaggaggcugaagacggaagcacagaugaguauccaacugauaaacaaagcagugaacgcacuaaucaaugaccagcugaucaugaagaaucauuuaagagauaucauggggauucccuacugcaauuacagcaaauacugguaucuaaaucauacugugacagggagaacaucacugccaaggugcuggcuugugucaaaugguuccuaccugaaugagacacauuucucugaugacauugaacaacaagcagacaacaugauaacagaacuguugcaaaaggaguacauggacaggcaagggaaaacacccuuaggguuaguagaucuuuuugucuucagcaccagcuuuuaucucauuagcaucuuccuccaccugauuaaaaucccaacccauagacaugucauagggaaacccugcccuaaaccacacagacucaaccacaugggcauaugcucauguggucuguacaaacauccugguguaccaguuaaguggaaaagauag

SEQ ID NO: 328 - RNA, 1473 nt, Artificial Sequence
  derived and/or modified protein sequence (wt) from LASV(Lassa virus/H.sapiens-wt/NGA/2016/ISTH_0610;Clade II)__AVO03585__GPC
auggggcaaaucauaacauuuuuucaggaagugccucaugucauagaagaagugaugaacauuguccugauugcccuuagccuucuggcaauauugaaaggggucuacaauguugcuacuuguggccucuuuggacugguguccuuucuucucuuauguggaagaucaugcuccacaacuuacaaagguguuuaugagcuacaaacucuagagcuagacauggcaagccuuaauaugacaaugcccuuaucuuguacaaagaauaauagccaccauuacaucauggucggaaaugaaacuggcuuagagcugacuuuaacaaauacaaguaucaucaaccacaaguuuuguaaccuuucugaugcacauaaaaagaaucuuuaugaccaugcuuuaaugagcaucaucucaaccuuccacuuauccauuccuaacuuuaaucaguaugaggcaaugaguugugacuucaauggggggaagauaaguguucaguacaaccuuagccacacuuaugcuguagaugcagccaaccacugugggacuauugccaauggcguucuucagacuuucaugaggauggcuugggguggcagcuacauagcacuugauuccggaagagggaguugggauuguauaaugacuuccuaccaauauuugauaauccagaacaccacuugggaagaucacugccaguuuucucgcccaucccccaucgguuaucugggacuacugucacaaagaaccagggauauuuacaucagucgaagacuccuugggacuuuuacuuggacccucucugauucugaaggcaaugaaacuccagguggguauugucugacaagguggauguuaauugaggccgaguugaagugcuuugggaacacagcaguugcgaaaugcaaugagaaacaugaugaagaguuuugugacaugcuaagauuguuugacuuuaacaaacaagcuauaaggaggcugaaagcagaagcacagaugaguauccaacuaauaaacaaagcagugaacgcacugauuaaugaccagcugauaaugaagaaucauuuaagagauaucauggggauuccuuacugcaauuacaguaaguauugguauuugaaucacacuguaacagggaggacaucguuaccaagaugcuggcuugugucaaaugguuccuaccugaaugagacacauuuuucugaugacauugaacaacaagcagacaacaugauaacagaacuguugcagaaggaguacauagauaggcaagggaaaacaccuuuaggguuaguagaucuuuuugucuucagcaccaguuuuuaucucaucaguaucuuccuccaccugguuaaaaucccaacccacagacauaucauagggaaacccugcccuaaaccacauagacucaaccacaugggcauaugcucauguggucuguacaagcauccuggugugccagucaaguggaaaagauag

SEQ ID NO: 329 - RNA, 1473 nt, Artificial Sequence
  derived and/or modified protein sequence (wt) from LASV(Lassa virus/H.sapiens-wt/NGA/2016/ISTH_0621;Clade II)__AVO03543__GPC
augggacaaauaguaacauucuuucaagaaaucccucauguuguugaggaaaucaugaauauuguccucaucaccuugucucuacuugcaauuuuaaagggguuauacaacuuugccacauguggucuuauuggcuugaucacauuccuuuuccucuguggaaggucauguucaacaauauacaaagggaguuaccaacuccaagcacuugagcuaaauauggaaacacucaacaugaccaugccucuauccugcacaaaaaacaacagucaccauuauauaagggugggcaaugaaacaggacucgaacugaccuuaaccaauacgagcaucauagaccauaaguucugcaaucuuucugaugcacacaaacggaaucucuaugaucacacccucaugagcaucaucuccacuuuccauuuguccaucccuaauuucaaccaguaugaagcaaugaguugugauuucaauggagguaagaucagugugcaauacaauuuaagucacaguuaugcaggagaugcugcuaggcauugcggcacuguggcaaauggcguccuacaaaccuuuaugagaauggccuggggugggaguuacauugcacuugacucaggcaaaggaaacugggacuguauaaugacaaguuaucaauacuuaaucauccagaauacaacuugggagaaccacugucaguucucgaggccaucuccuauugguuaucuuggacuucucucacaaagaaccagagacauuuacaucagcagaaggcuguuaggaacguucacauggacacugucagauucugaggguaaagaaaccccuggagguuacuguuugaccagauggauguuaauugaagcugaacugaaauguuuuggcaacacugcaguagccaagugcaaugagaaacaugaugaagaguucugugauauguuaaggcuuuuugacuucaacaagcaagcuauucagaggcuaaagacugaggcccagaugaguauucagcucauuaacaaggcagucaaugcccuuauaaaugaucagcuuauaaugaaaaaccaucuuagggacaucaugggaauaccauacugcaauuauagcaaauacugguaccucaaucacacaaccacaggcaaaacuucacuaccaaaauguuggcuugugucaaauggauccuaucucaaugaaacucauuuuucagaugacauagagcagcaagcugauaacaugauaacagaaaugcugcagaaggaauacauugauaggcaagggaaaacuccauuaggacugguugaccucuuuguguuuaguacuagcuucuaucuuaucagcauuuuccugcauuuaaucaagauaccaacucauaggcacauugugggcaagucgugcccuaaaccccacaggcuaaaccacaugggcauuugcuccugugggcuuuacaaacaaccaggggugcuugugaaguggaagagauaa

SEQ ID NO: 330 - RNA, 1473 nt, Artificial Sequence
  derived and/or modified protein sequence (wt) from LASV(Lassa virus/H.sapiens-wt/NGA/2016/ISTH_0701;Clade II)__AVO03629__GPC
augggacaaaucauaacauuuuuccaggaaguaccucauguuauagaggaagugaugaacauuguccugauugcucucagccuucuggcaauacugaaggggaucuacaauguugccaccuguggccucuuuggauugguguccuuccuccucuuauguggaagaucauguucaacaacuuacaaggguguuuaugagcuacaaacucuggagcuagacauggcaagccuuaauaugacaaugcccuuaucuugcacgaagaacaacagccaccauuacaucauggucggaaaugagacuggcuuggagcugacuuuaacaaauacaaguaucauuggccacaaauuuuguaaccucucugaugcacauaaaaagaaucuuuaugaucaugcuuuaaugaguaucauuucaaccuuccacuuauccauuccuaacuuuaaucaguaugaagcaaugagcugugauuucaaugggggaaagauaaguguucaguacaaccuuagccacgcuuaugcuguagaugcagccaaccacugugggaccaucgccaauggcguucuucagacuuuuaugaggauggcuugggguggcaguuauauagcacuugauuccggaaaggggaguugggacuguauaaugacuuccuaccaauauuugauaauccaaaacaccacuugggaagaucacugccaguuuucucgcccauccccuauugguuaccuggggcuauugucacagaggaccagggacauuuacaucagucgaagacuucuugggacuuuuacuuggacucucucugauucugaagguaaugaaacaccggguggguauugucuaacaagauggaugcugauugaggccgaguugaaaugcuuugggaacacagcaguugcgaaaugcaaugagaaacaugaugaagaguuuugugacauguuaagauuguuugacuuuaauaaacaagcuauaaggaggcuaaagacggaagcacagaugaguauccagcugauaaacaaagcagugaacgcacugaucaaugaccagcugauuaugaagaaucauuugagagauaucauggggauuccuuacugcaauuacagcaaguacugguaucuaaaucauacuguaacagggaagacaucguugccaaggugcuggcuugugucaaaugguuccuaccugaaugagacacauuuuucugaugacauugaacaacaagcagacaauaugauaacagaacugcugcaaaaggaguacauagacaggcaaggaaaaacaccuuuaggguuaguagaucuuuuugucuucagcaccagcuuuuaucucauuagcaucuuucuccaccugguuaaaaucccaacccacagacaugucauaggaaaacccugcccuaaaccacacagacuuaaccacaugggcauauguucauguggucuauacaaacauccuggugugccagucaaguggaaaagauag

SEQ ID NO: 331 - RNA, 1473 nt, Artificial Sequence
  derived and/or modified protein sequence (wt) from LASV(Lassa virus/H.sapiens-wt/NGA/2016/ISTH_0702;Clade II)__AVO03557__GPC
augggacaaaucauaacauuuuuccaggaaguaccccaugucauagaggaagugaugaacauuguucugauugcucuuagccuucuggcaguacugaaagggaucuacaauguugccaccuguggccucuuuggauugguggccuuucuccucuuguguggaaggucaugcucgacaaccuacaagggcguuuaugagcuacaaacccuagagcuagacauggcaaaccucaauaugacaaugccuuuaucuugcacgaagaacaacagccaucauuacaucauggucggaaaugagacuggcuuggagcugacuuuaacaaauacaaguauuaucaaccacaaguuuuguaaccuuucugaugcacauaaaaagaaucuuuaugaccaugcuuuaaugaguaucaucucaaccuuccacuuauccauucccaacuuuaaucaguaugaagcgaugaguugugacuucaauggaggaaagauaaguguucaguacaaccuuagccacacuuaugcuguagaugcagcuaaccauuguggaaccauugccaaugguguucuucagacuuuuaugaggauggcuugggguggcaguuacauagcacuugauuccggaaaggggaguugggacugcauaaugacuuccuaccaauauuugauaauccaaaacaccacuugggaagaucacugccaauuuucucgcccauccccuauugguuaucuggggcuacugucacaaaggaccagggauauuuacaucagccgaaggcuccuuggaacuuuuacuuggacucucucugauucugaagguaaugaaacaccggguggguauugucuaacaagauggaugcugauugaggccgagcugaagugcuuugggaacacagcaguugcgaagugcaaugagaaacacgaugaagaguuuugugacauguuaagguuguuugacuuuaacaaacaagcuauaaggaggcugaagacggaagcacagaugagcauccaacugauaaacaaagcagugaacgcacuaaucaaugaccagcugaucaugaagaaucauuugagagauaucaugggaauucccuacugcaauuacagcaaauacugguaucuaaaucauacugugacagggagaacaucacugccaaggugcuggcuugugucaaaugguuccuaccugaaugagacacauuucucugaugacauugaacaacaagcagacaacaugauaacagaacuguugcaaaaggaguacauggacaggcaagggaaaacacccuuaggguuaguagaucuuuuugucuucagcaccagcuuuuaucucauuagcaucuuccuccaccugauuaaaaucccaacccauagacaugucauagggaaacccugcccaaaaccacacagacucaaccacaugggcauaugcucauguggucuguacaaacauccugguguaccagucaaguggaaaagauag

SEQ ID NO: 332 - RNA, 1473 nt, Artificial Sequence
  derived and/or modified protein sequence (wt) from LASV(Lassa virus/H.sapiens-wt/NGA/2016/ISTH_0703;Clade II)__AVO03597__GPC
augggacaaauuauaacauuuuuccaggaaguaccucaugucauagaggaagugaugaacauuguccugauugcucuuagccuucuggcaauacugaaagggaucuacaauguugcuaccuguggccucuuuggauugguguccuuucuccucuugugcggaagaucaugcucgacgaccuacaagggcguuuaugagcuacaaacccuagagcuagacauggcaagccuuaauaugacaaugccuuuaucuugcacgaagaacaacagccaucauuacaucauggucggaaaugagacuggcuuggagcugacuuuaacaaauacaaguauuaucaaccacaaguuuuguaaccuuucugaugcacauaaaaagaaucuuuaugaccaugcuuuaaugaguauuaucucaaccuuccacuuauccauucccaacuuuaaucaguaugaagcaaugaguugugacuucaauggaggaaagauaaguguucaguacaaccucagccacacuuaugcuguagaugcagcuagccacuguggaaccauugccaaugguguucuucagacuuuuaugaggauggcuugggguggcaguuacauagcacuugauuccggaaaggggaguugggacugcauaaugacuuccuaucaauauuugauaauccaaaacaccaccugggaagaucauugccaauuuucucgcccauccccuaucgguuaucuggggcuacugucacaaagaaccagggauauuuacaucagccgaaggcuucuuggaacuuuuacuuggacucucucugauucugaagguaaugaaacaccggguggguauugucuaacaagauggauguugauugaggccgagcugaaaugcuuugggaacacagcaguugcgaagugcaaugagaaacacgaugaggaguuuugugacauguuaagguuguuugacuuuaacaaacaagcuauaaggaggcugaagacggaggcacagaugaguauucaacugauaaacaaagcaguaaacgcacuaaucaaugaccaacugaucaugaagaaucauuugagagauauuaugggaauucccuacugcaauuacagcaaauacugguaucuaaaucauacugugacagggaggacaucacugccaagaugcuggcuugugucaaaugguuccuaccugaaugagacacauuuuucugaugacauugaacaacaagcagacaacaugauaacagaacuguugcaaaaggaguacauagagaggcaagggaaaacacccuuaggguugguagaucuuuuugucuucagcacuagcuuuuaucucauuagcaucuuccuccaccugauuaaaaucccaacccauagacaugucauagggaaacccugcccuaaaccacacagacucaaccacaugggcauaugcucauguggucuauacaaacauccugguguaccaguuaaguggaaaagauag

SEQ ID NO: 333 - RNA, 1473 nt, Artificial Sequence
  derived and/or modified protein sequence (wt) from LASV(Lassa virus/H.sapiens-wt/NGA/2016/ISTH_0717;Clade II)__AVO03547__GPC
augggacagauugugacauucuuccaagaagucccucaugucaucgaggaggugaugaacaucguccucauagcauugucaauuuuggcaauucugaaaggacucuauaauguugccacaugcggcuuaauaggucuugucacauuucuccuacuuucugggagaucaugcucaaugauuuauaaaggaguuuaugagcuacaaacccuugagcugaacauggagacucugaauaugaccaugccgcuauccugcacgaaaaauaacagccaccauuacaucaugguggggaaugagacagggcuugagcuuacccuaaccaacacuagcuuacucaaccauaaguucugcaaccuuucagaugcucauaagaagaaucuuuaugaccauacucucaugagcauuaucuccacauuccauuuguccauucccaacuucaaucaguaugaggcaaugagcugcgauuucaauggcggcaaaaucacugugcaauacaaucuaagccacaccuaugcaguugacgcaguaaaucauuguggcacacuggcaaaugguauacugcaaacauuuaugagaauggcuuggggagguaguuacauugcucuugauuccagacaugggaguugggauuguauaaugacuaguuaucaguaccugaucauccagaacacaaccugggaggaucauugucaauuuuccagaccaucucccauuggguaccuugggcuccucucacagagaaccagagacauuuacaucaguagaagacugcuaggaacguuuaccuggacacucucugauucagaaggaaaugagacaccaggagguuacugccucacuagguggaugcugauugaagcugaacugaaguguuucgggaauacagcuguggccaaguguaaugaaaaacacgaugaagaguuuugugacaugcucagacuauuugacuucaauaaacaagccauaaggagauuaaaggcagaggcccaaaugaguauacagcugaucaacaaggcagucaaugcucuaauaaacgaucagcuaauuaugaagaaucaccugagggacaucaugggcauaccguacuguaacuacagcaaauauugguaccucaaucauacuucaacagggagaaccucauugccaagauguuggcuugucucaaaugguucauaucucaaugagacucacuucucagaugacaucgagcagcaagcugauaauaugauaacugaaauguugcaaaaggaguauuuagauaggcagggaaagaccccgcugggauugguagaucuuuuugucuucaguacaaguuucuacuugauuaguauuuuccuccaucuaaucaagauaccaacccauagacacauuguggggaagccuugcccuaaaccccacaggcugaaccacauggguauuugcuccuguggucuauacaagcagccaggagugccuguuagauggaagagauaa

SEQ ID NO: 334 - RNA, 1473 nt, Artificial Sequence
  derived and/or modified protein sequence (wt) from LASV(Lassa virus/H.sapiens-wt/NGA/2016/ISTH_0753;Clade II)__AVO03609__GPC
auggggcaaauuauaacauuuuuccaggaaguaccucaugucauagaggaagugaugaacauuguccugauugcucucagccuucuggcaauucugaaagggaucuacaauguugcuacauguggccuuuuuggacugguguccuuucuccucuuauguggaagaucaugcucaacaacuuauaaggguguuuaugagcuacaaacucuagagcuagacauggcaagccuuaacaugacaaugcccuuaucuugcacgaagaacaacucccaccauuacaucauggucggaaaugagacuggcuuggagcugacuuuaacaaacacaaguauuaucaaccacaaauuuuguaaccucucugaugcacauaagaagaaucuuuaugaccaugcuuuaaugaguaucaucucaaccuuccacuuauccauucccaacuuuaaucaguaugaagcaaugagcugugacuucaauggagggaagauaagugugcaauacaaccucagccacacuuaugcuguggaugcggcuaaccauugugggaccauugccaauggcguucuucagacuuuuaugaggauggcuugggguggcaguuacauagcacuugauuccggaaaggggaacugggauugcauaaugacuuccuaccaauaucugauaauccaaaacaccacuugggaagaucacugucaguuuucucgcccaucccccaucgguuaucuggggcuacugucacaaaggaccagagacauuuacaucagucgaagacuccuugggacuuuuacuuggacucucucugauucugaaggcaaugaaacaccggguggguauugucuaacaagauggaugcugauugaggccgaguugaagugcuuugggaacacagcaguugcaaaaugcaaugagaaacaugaugaagaguuuugugacauguuaagauuguuugacuuuaacaaacaagcuauaaguaggcugaagacagaagcacagaugaguauccaacugauaaauaaagcagugaaugcacugaucaaugaccagcugauuaugaagaaucauuugagagauaucaugggaauuccuuauugcaauuacagcaaguauugguaucuaaaucacacuguaacagggagaacaucguugccaagaugcuggcuugugucaaaugguuccuaccugaaugagacacauuuuucugaugacauugaacaacaagcagacaacaugauaacagaacuguugcaaaaggaguacauggacaggcaaggaaaaacacccuuaggguuaguggaucuuuuuguuuuuagcaccaguuuuuaucucauuagcaucuuccuccaccugguuaaaaucccaacccacagacaugucauagggaaacccugcccuaaaccacacagacucaaccacaugggcauaugcucauguggucuauacaaacauccuggugugccaguuaaguggaaaagauag

SEQ ID NO: 335 - RNA, 1473 nt, Artificial Sequence
  derived and/or modified protein sequence (wt) from LASV(Lassa virus/H.sapiens-wt/NGA/2016/ISTH_0759;Clade II)__AVO03593__GPC
auggggcaaaucauaacauuuuuccaggaagugccucaugucauugaagaggugaugaacauugucuuaauugcccucagccuucuagcaauacuaaaagggauuuacaauguugcuaccuguggccucuuuggguugguguccuuucuucucuuauguggaaggucaugcucaacaacuuacaaggguguuuaugagcuucaaacucuggagcuggauauggcgagccuuaauaugacaaugcccuuauccugcacgaagaacaacagucaccacuacaucaugguuggaaaugagacuggcuuggagcugaccuuaacaaacacaaguaucaucaaccacaaguuuugcaaccuuucugaugcacauaaaaagaaucucuaugaccauacuuuaaugagcaucaucucaaccuuccaccuauccaucccuaacuuuaaucaguaugaagcaaugaguugugacuucaauggggggaagauaaguguucaguacaaccucagccauacuuaugcuguggaugcagcuaaccauugugggaccauugccaauggaguccuucaaacuuuuaugaggauggcuugggguggcaguuacauagcacuugauucuggaaaggggaguugggauuguauaaugacguccuaccaauauuugauaauucaaaauaccaguugggaagaucacugccaguuuucucgcccguccccuaucgguuaucuggggcuacuuucacaaagaaccagggacauuuacaucagccgaagacuccuuggaacuuuuacuuggacucucucugauucugaaggcaaugaaacaccggguggguauuguuuaacaagauggaugcugauugaagccgaauugaagugcuuugggaacacagcaguugcgaaaugcaaugagaagcaugaugaagaguuuugugacauguuaagguuguuugacuuuaauaaacaggcuauaaggaggcuaaagacagaagcacagaugagcauccaacuaauaaacaaagcagugaaugcacugaucaaugaccagcucauuaugaagaaucauuuaagagauaucaugggaauuccuuauugcaauuacagcaaguauugguacuuaaaccacacuguaacagggaagacaucguuaccaagauguuggcuuguaucaaaugguuccuaccugaaugaaacacauuuuucugaugacauugagcaacaagcagacaacaugauaacagaguuguuacagaaagaguacauugauaggcaagggaaaacacccuuaggguugguggaucuuuuugucuuuagcacuagcuucuaccuuauuagcaucuuccuccaccugguuaaaaucccaacccacagacaugucauagggaaacccugccccaagccacacagacucaaccacaugggcauaugcucauguggucuguacaaacauccugguguaccagucaaauggaaaagauag

SEQ ID NO: 336 - RNA, 1473 nt, Artificial Sequence
  derived and/or modified protein sequence (wt) from LASV(Lassa virus/H.sapiens-wt/NGA/2016/ISTH_0777;Clade II)__AVO03615__GPC
auggggcaaauaauaacauucuuucaggaaguuccucaugucauagaagaggugaugaacauuguccugauugcccucagucuccuggcgauauugaaggggauuuacaauguugccacuuguggccuucuugggcugaucuccuuccuucuuuuauguggaagaucaugcucaacaaccuacaaggguguauaugagcuacaaacucuggagcuggacauggcaaaucuuaacaugacuaugccucuauccuguacaaagaacagcagccaucacuacaucaugguugggaaugaaacgggccuagaacugaccuugacaaacacaaguauaaucaaucauaaauucugcaaccuuucugaugcacacaagaagaaucuuuaugaucaugcucugaugagcaucauuucaacuuuccauuuguccauuccgaacuucaaucaguaugaggcaaugagcugugacuucaauggggggaaaauaagugugcaauacaaucuuagucaugcuuaugcuguagaugcagccaaccacugugggacuauugccaauggugucuuacagacuuuuaugagaauggcuuggggcggcagcuacauagcacucgacucuggaaaagggaacugggacuguauaaugacuuccuaucaguaccugauaauucaaaacaccaccugggaggaucacugucaauuuucccgcccaucccccauuggauaccuaggacugcugucacagagaacuagagauauuuacaucagucgaagacuccuuggaacuuucaccuggacucucucugacucugagggcaaugaggcaccugguggauacugucuuacuagauggaugcuaauugaagcugaacugaagugcuuugggaacacagccauugcgaagugcaacgagaagcacgaugaggaauuuugugauauguugagacuuuucgacuucaacaaacaagcuauaaggagauuaaaaacagaagcacaaaugagcauccaauugauaaauaaagcaguaaaugcacuaauuaaugaccaguugaucaugaagaaccaccugagggauaucauggggauuccuuauugcaauuacagcaaguauugguaucuaaaccauacuguaacagggaagacaucacugccaagguguuggcuuaucucgaaugguucuuaccuaaacgagacacauuuuucugaugauauugaacagcaagcagacaacaugauaacagaacuguuacaaaaggaguacauggauaggcaaggaaaaacacccuuaggguuaguagaccuuuuuguuuuuagcacuagcuuuuaucucauaagcauuuuccuccacuuggucaaaaucccgacccauaggcacauuguggggaaacccugccccaagccacacagacucaaccacaugggcauaugcucaugugguuuguacaagcauccugguguaccagucaaguggaagagauag

SEQ ID NO: 337 - RNA, 1473 nt, Artificial Sequence
  derived and/or modified protein sequence (wt) from LASV(Lassa virus/H.sapiens-wt/NGA/2016/ISTH_0779;Clade II)__AVO03655__GPC
augggacaaauaauaaccuuuuuccaagagguaccccauguuguagaggaggugaugaauguaguccuaauugcacucagucuuuuggcaauauugaaaggaauuuacaacauugccacuugugggcuuuuugggcugaucucguuucuucuucugugcggcagaucaugcucaacuacuuacaaggguguuuaugaguugcaaaccuuggaacuggauauggcaaaucuuaacaugacaaugccuuuauccugcacaaaaaacaacagccaucacuacaucauggucgggaaugagacaggucuagaguuaacuuugaccaacacgagcauuaucaaccacaaauucugcaaccuuucugaugcucacaagaagaaccucuaugaccacacuuugaugaguaucaucucaaccuuccaccuguccaucccaaacuucaaucaauaugaagcuaugagcugugacuuuaacggggggaagauaaguguccaauacaaccucagucaugguuaugcuguagaugcagccaaucauuguggaacuaucgcaaauggggucuugcagaccuucaugaggauggcuugggguggaaguuauauagcacuugacucuggaaagggaaacugggacugcauaaugacuuccuaccaguacuuagugauucaaaacacuacuugggaggaucauugccaguuuucccguccaucuccuauugguuaucuuggauugcugucacagaggaccagagacauuuacaucagccgaagacuucucgguacuuucaccuggacucucucugauuccgaaggcaaugaugcaccugguggguacugucugaccagauggaugcuuauugaagcugaguugaaguguuuugggaauacagcuaucgcgaaaugcaaugagaaacaugacgaagaguucugcgacauguuaagacucuuugauuuuaacagacaagccauaaaaaggcuaaagacagaggcacagaugagcauucagcuuauaaauaaagcagucaaugcgcuuaucaaugaccaacugaucaugaaaaaucaccugagggacaucaugggcauuccuuacuguaauuauaguaaguacugguaccugaacaacacggugacagguaagucaucacuaccaaaauguuggcuuguuucgaaugggucuuaucugaaugagacacauuuuucugaugacauugaacaacaagcagauaacaugauaacagaaauguuacagaaagaguacauagauaggcaggggaaaacaccuuuaggguuaguggaucuuuuugucuuuagcaccagcuucuaucuuauaagcaucuuccuccacuuggucagaauuccgacccacaggcacauuacugggaaaccuugucccaagccacacagacucaaccacaugggcauuugcucauguggucuauacaaacaacccgguguaccaguuaaauggaagagauaa

SEQ ID NO: 338 - RNA, 1473 nt, Artificial Sequence
  derived and/or modified protein sequence (wt) from LASV(Lassa virus/H.sapiens-wt/NGA/2016/ISTH_0917;Clade II)__AVO03535__GPC
augggucagauagugacauucuuucaggaaguuccucaugucauugaggaaauuaugaacauuguccucaucacuuuaucucugcuagcaaucuuaaaggguguguacaauuuggccacguguggccuuauuggucugauaacauuccuuuuccucuguggaaggucauguucgaugaccuacaaagggaauuaucaacuugaaacccuugaacugaacauggagaugcuuaacaugacuaugccucuguccugcacaaaaaauaacagucaccacuacauaaggguggguaaugaaacagggcucgagcugaccuuaaccaacacaagcaucauacaacacaaguucuguaaucucucugaugcacacaaaaggaaucucuacgaccacucucucaugagcauugucuccacuuuucaucuguccaucccuaacuuuaaucaguaugaagcuaugaguugugacuucaacggaggcaagaucagcauccaauacaauuugagccacaccuaugcaggagaugcagccaaacauuguggcacucuggcaaaugguauacugcaaaccuucaugaggauggcuuggggugggaguuacauugcacuugacucaggucgaggaggcugggauuguauaaugacuaacuaccaauaccuaaucauucagaauguaacuugggaggaccauugucaauucucgagaccaucacccauuggcuaucuugggcuccucucucaaaggaccagagaaguuuacaucaguagaagauuacuaggaacauucacauggacauuaucagauucugagggcaaugaagcuccaggggguuacugcuuaaccagauggauguuaauugaagcugaacugaaauguuuugggaauacugcaguagcuaagugcaaugagaaacaugaugaggaauucugugacaugcugaggcuuuuugauuucaacaaacaagccauucggagauugaaggcugagacucaaaugaguauccagcuuauuaacaaagcagucaaugcccucauaaaugaccagcuuauaaugaaaaaucaucucagagacauuaugggcauaccauauugcaacuauagcaaauauugguaucuuaaucauacaaucacggguagaacuucacuaccaagauguuggcuugugucaaacggguccuaucucaaugagacucauuucucagacgacauagaacaacaagcugacaacaugauaacagaaauguugcagaaagaguacaucgauagacaaggaaagaccccacugggcuugguugacuuguuuguguucagcacaaguuucuauuugaucagcauuuuccuacacuuagucaagauaccaacucauagacacauuguagguaagucaugccccaaaccucacaggcugaaucacaugggcauuugcucuugugggcuauacaagcggccaggagugucugugagguggaagagauaa

SEQ ID NO: 339 - RNA, 1473 nt, Artificial Sequence
  derived and/or modified protein sequence (wt) from LASV(Lassa virus/H.sapiens-wt/NGA/2016/ISTH_1006;Clade II)__AVO03643__GPC
augggacaaaucauaacauuuuuccaggaaguaccucaugucauagaggaagugaugaacauuguucugauugcucuuagccuucuggcaauacugaaagggaucuacaauguugccaccuguggccucuuuggauugguggccuuucuccucuuguguggaagaucaugcucgacaaccuacaagggcguuuaugagcuacaaacccuagagcuggacauggcaagccucaauaugacaaugccuuuaucuugcacgaagaacaacagccaucauuacaucauggucggaaaugagacuggcuuggagcugacuuuaacaaauacaaguauuaucaaccacaaguuuuguaaccuuucugaugcacauaaaaagaaucuuuaugaccaugcuuuaaugaguaucaucucaaccuuccacuuauccauucccaacuuuaaucaguaugaagcgauggguugugacuucaauggaggaaagauaaguguucaguacaaccuuagccacaguuaugcuguagaugcagccaaccacuguggaaccauugccaaugguguucuucagacuuuuaugaggauggcuugggguggcaguuacauagcacuugauuccggaaaggggaguugggacugcauaaugacuuccuaccaauauuugauaauccaaaacaccacuugggaagaucacugccaauuuucucgcccauccccuaucgguuaucuggggcuacugucacaaaggaccagggauauuuacaucagccgaaggcuccuuggaacuuuuacuuggacucucucugauucugaagguaacgaaacaccggguggguauugucuaacaagauggaugcugauugaggccgagcugaagugcuuugggaacacagcaguugcgaagugcaaugagaaacacgaugaagaguuuugugacauguuaagguuguuugacuuuaacaaacaagcuauaaggaggcugaagacggaagcacagaugaguauccaacugauaaacaaagcagugaacgcacuaaucaaugaccagcugaucaugaagaaucauuuaagagauaucaugggaauucccuacugcaauuacaguaaauacugguaccuaaaucauacugugacagggagaacaucacugccaaggugcuggcuugugucaaaugguuccuaccugaaugagacacauuucucugaugacauugaacaacaagcagacaacaugauaacagaacuguugcaaaaggaguacauggacaggcaagggaaaacacccuuaggguuaguagaucuuuuugucuucagcaccagcuuuuaucucauuagcaucuuccuccaccugauuaaaaucccaacccauagacaugucauagggaaacccugcccuaaaccacacagacucaaccacaugggcauaugcucauguggucuguacaaacauccugguguaccaguuaaguggaaaagauag

SEQ ID NO: 340 - RNA, 1473 nt, Artificial Sequence
  derived and/or modified protein sequence (wt) from LASV(Lassa virus/H.sapiens-wt/NGA/2016/ISTH_1026;Clade II)__AVO03589__GPC
augggacaaaucauaacauuuuuccaggaaguaccucaugucauagaggaagugaugaacauuguccugauugcucucagccuucuggcaauacugaaggggaucuacaauguugcuaccuguggccucuuuggauugguguccuuccuccucuuauguggaaggucauguucaacaacuuacaaggguguuuaugagcuacaaacucuggagcuagacauggcaagccuuaauaugacaaugcccuuaucuugcacgaagaacaacagccaccauuacaucauggucggaaaugagacuggcuuggagcugacuuuaacaaauacaaguaucaucaaccacaaauuuuguaaccucucugaugcacauaaaaagaaucuuuaugaucaugcuuuaaugaguaucauuucaaccuuccacuuguccauuccuaacuuuaaucaguaugaagcaaugagcugugacuucaauggggggaagauaaguguucaguacaaccuuagccacgcuuaugcuauagaugcagccagccacugugggacuaucgccaauggcguccuucagacuuuuaugaggauggcuugggguggcaguuauauagcacuugauuccggaaaggggaguugggacuguauaaugacuuccuaccaauauuugauaauccaaaacaccacuugggaagaucacugccaguuuucucgcccauccccuaucgguuaccuagggcuacugucacaaaggaccagggacauuuacaucagucgaagacuucuugggacuuuuacuuggacucucucugauucugaagguaaugaaacaccggguggguauugucuaacaagauggauguugauugaggccgaguugaaaugcuuugggaacacagcaguugcaaaaugcaaugagaaacaugaugaagaguuuugugacauguuaagauuguuugacuuuaacaaacaagcuauaaggaggcuaaagacagaagcacagaugaguauccagcugauaaacaaagcagugaaugcacugaucaaugaccagcugauuaugaagaaucauuugagagauaucauggggauuccuuacugcaauuacagcaaguacugguaucuaaaucauacuguaacagggaagacaucguugccaaggugcuggcuugugucaaaugguuccuaccugaaugagacacauuuuucugaugauauugagcaacaggcagacaacaugauaacagaacugcugcaaaaggaguacuuagacaggcaagggaaaacaccuuuaggguuaguagaucuuuuugucuucagcaccagcuuuuaucucauuagcaucuuccuccaccugguuaaaaucccaacccacagacaugucauaggaaggcccugcccuaaaccacacagacucaaccacaugggcauauguucauguggucuauacaaacauccuggugugccagucaaguggaaaagauag

SEQ ID NO: 341 - RNA, 1473 nt, Artificial Sequence
  derived and/or modified protein sequence (wt) from LASV(Lassa virus/H.sapiens-wt/NGA/2016/ISTH_1070;Clade II)__AVO03651__GPC
augggacaaaucauaacauuuuuccaggaaguaccucaugucauagaagaagugaugaacauuguccugauugcccucagccuucuggcgauuuugaaagggaucuacaauguugccaccuguggccucuuuggauugguauccuuccuucucuuauguggaagaucaugcucaacaacuuacaaagguguuuaugagcuacaaacucuggagcuagacauggcaagccuuaacaugacaaugcccuuaucuugcacaaagaacaacagccaccacuacaucauggucggaaaugagacuggcuuagaguugacuuuaacaaauacaaguaucaucaaccacaaguucuguaaccuuucugaugcacauaaaaagaaucuuuaugaccaugcuuuaaugaguaucaucucaaccuuccacuuauccauuccuaacuuuaaucaguaugaggcaaugagcugugacuucaauggggggaagauaaguguucaguacaaccuuagccacacuuuugcuguagaugcagcuaaccacugugggacuauugcuaauggcguucuccagacuuucaugaggauggcuugggguggcaguuacauagcacuugauuccggaaaggggagcugggauugcauaaugacuuccuaccaguauuugauaauucagaacaccacuugggaagaucacugccaguuuucucgcccaucccccaucgguuaucuggggcugcugucacaaaggaccagggacauuuacaucagucgaagacuccuugggacuuuuacuuggacccucucugauucugaaggcaaugaaacaccggguggguauugucuaacaagauggaugcugauugaagccgaauugaagugcuuugggaacacagcaguugcgaaaugcaaugagaaacaugaugaggaguuuugugacauguuaagauuguuugacuuuaacaaacaagcuauaaggaggcugaagacugaagcacagaugaguauccaacugauaaacaaagcagugaacgcauugauuaaugaccagcugauuaugaagaaucauuuaagagacaucaugggaauuccuuacugcaauuacagcaaauauugguauuugaaucacacuguaacagggaagacaucguuaccaagaugcuggcuugugucaaaugguuccuaccugaaugagacacauuuuucugaugauauugaacaacaagcagacaacaugauaacagaacuguugcagaaagaguacauggacaggcaagggaaaacacccuuaggguuaguagaucuuuuugucuucagcaccaguuuuuaucucauuagcaucuuucuccaccuaguuaaaaucccaacucauagacauauuauuggaaaacccuguccuaaaccacacagacucaaccacaugggcauaugcucauguggucuguacaaacauccugguguaccagucaaauggaaaagauag

SEQ ID NO: 342 - RNA, 1473 nt, Artificial Sequence
  derived and/or modified protein sequence (wt) from LASV(Lassa virus/H.sapiens-wt/NGA/2016/ISTH_1123;Clade II)__AVO03645__GPC
auggggcaaaucauaacauuuuuccaggaagugccucaugucauugaggaggugaugaacauugucuuaauugcucucagccuucuagcaauacuaaaagggauuuacaauguugcuaccuguggucucuuuggguuggugucuuuucuucucuuauguggaaggucaugcucaacaacuuacaaggguguuuaugagcuucaaacucuggagcuggauaugggaagccuuaauaugacaaugcccuuauccugcacgaagaacaacagccaccacuacaucaugguuggaaaugagacuggcuuggagcugacuuuaacaaacacaaguaucauuaaccacaaauucugcaaccuuucugaugcacauaaaaagaaucucuaugaccaugcuuuaaugagcaucaucucaaccuuccaccuaucuaucccuaacuuuaaucaguaugaagcaaugaguugugacuucaauggaggaaagauaaguguucaguacaaccucagccaugcuuaugcuguggaugcagcuaaccauugugggaccauugccaauggaguccuucaaacuuuuaugaggauggccugggguggcaguuacauagcacuugauucuggaaaggggaguugggauuguauaaugacguccuaccaauauuugauaauccaaaacaccaguugggaagaucacugccaguuuucucgcccguccccuaucgguuaucuggggcuacugucacaaagaaccagggacauuuacaucagccgaaggcuccuuggaaccuuuacuuggacucucucugacucugagggcaaugaaacaccggguggguacuguuuaacaagauggauguugauugaggccgaauuaaagugcuuugggaacacagcagucgcgaagugcaaugagaaacaugaugaagaguuuugugacauguuaagauuguuugacuuuaacaaacaggcuauaaggaggcuaaagacagaagcacagaugaguauccaacuaauaaacaaagcagugaacgcacugaucaaugaccagcucauuaugaagaaucauuuaagagauaucaugggaauuccuuacugcaauuacagcaaguauugguauuuaaaccacacuguaacagggaagacaucguugccaagaugcuggcuuguaucaaaugguuccuaccugaaugaaacacauuuuucugaugacauugagcaacaagcagacaacaugauaacagaauuguuacagaaagaguacauugacaggcaagggaaaacacccuuaggguugguggaucuuuuugucuucagcacuagcuucuaccuuauuagcaucuuccuccaccugguuaaaaucccaacccauagacaugucauagggaaacccugccccaagccacacagacucaaccacaugggcauaugcucauguggucucuacaaacauccugguguaccagucaaguggaaaagauag

SEQ ID NO: 343 - RNA, 1473 nt, Artificial Sequence
  derived and/or modified protein sequence (wt) from LASV(Lassa virus/H.sapiens-wt/NGA/2016/ISTH_1150;Clade II)__AVO03627__GPC
augggacaaguaauaacauucuuucaggaaauaccucaugucauagaagaggugaugaauauuguccugauuacccucagucuucuggcgauauugaaggggaucuacaauguggccaccuguggccuuuuugggcugaucuccuuucuccuucuguguggaaggucaugcucaacaaccuacaaaggugucuaugaacugcaaacucuggagcuggacauggcaaaccucaacaugaccaugccucuaucuugcacaaaaaacagcagccaucauuacaucaugguugggaaugaaacuggccuagaauugacucugacaaacacgaguauaauuaaucauaaauucugcaaccuuagugaugcacacaaaaagaaucuuuaugaucaugcuuugaugagcaucaucucaacuuuccacuuguccauuccgaacuuuaaucaguaugaggcaaugaguugugacuucaauggagggaaaauaagcguacaauacaaccuuagccaugcuuaugcuguagaugcagccaaucacugugggaccauagcuaaugguguuuuacagaccuuuaugagaauggcuuggggcggcagcuauauagcacuugacucugggaaagggaacugggauuguauaaugacuuccuaucaguauuugauaauucaaaacacuacuugggaagaucacugucaauuuucccgcccauccccuauuggauaccugggacuguuaucacagaggacuagagacauuuacaucagucgaagacuucucggaacuuucaccuggacucucucugacucugagggcaaugaagcacccgguggguacugccuuaccagauggaugcuaauugaagcugaacugaagugcuuugggaacacagccauugcaaaguguaacgagaagcacgaugaagaauucugugauauguugagacuuuucgacuucaacaaacaagccauacguaggcugaaaacagaagcacaaaagagcauccaauuaauaaauaaagcaguaaaugcacuaauuaaugaccaguugaucaugaagaaccaccugagggauaucauggggauuccuuauugcaauuacagcaaguacugguacuuaaaccauacagugacaggaaaaacaucacugccaaaaugcuggcuuauuucgaaugguucuuaccuaaaugagacacacuucuccgaugauauugaacagcaagcagacaauaugauuacagaacuguugcaaaaagaguauauggacagacaggggaaaacacccuuaggguugguagaucuuuuuguuuuuagcacuagcuuuuaucucauaagcauuuuccuccacuuaguuaagaucccgacccauaggcacauuguggggagacccugccccaaaccacacagacucaaccacaugggcauaugcucaugugguuuguacaaacauccugguguaccagucaaguggaagagauag

SEQ ID NO: 344 - RNA, 1473 nt, Artificial Sequence
  derived and/or modified protein sequence (wt) from LASV(Lassa virus/H.sapiens-wt/NGA/2016/ISTH_1174;Clade II)__AVO03555__GPC
augggacaaaucauaacauucuuccaggaaguaccucaugucauagaggaagugaugaacauuguccugauugcucucagccuucuggcaauacugaaagggaucuacaauguugcuaccuguggcuucuuuggauugguguccuuucuccucuuauguggaagaucauguucaacaauuuacaaggguguuuaugagcuacaaacucuagagcuagacauggcaagccuuaauaugacaaugcccuuaucuugcacaaagaacaacucccaccauuacaucauggucggaaaugagacuggcuuggagcugacucuaacaaauacaaguauuaucaaccacaaguuuugcaaccuuucugaugcacauaaaaagaaucuuuaugaccaugcuuuaaugaguaucaucucaaccuuccacuugucuauuccacacuuuaaucaguaugaagcaaugaguugugauuuuaauggagggaagauaaguguucaguacaaccuuagccacacuuaugcuguagaugcagcuaaccacugugggacuauugccaauggcguccuucagacuuuuaugaggauggcuugggguggcaguuacauagcacuugauuccggaaaggggagcugggauugcauaaugaccuccuaccaauauuugauaauccaaaacaccacuugggaagaucacugccaguuuucucguccaucccccaucgguuaucuggggcuacugucacaaaggaccagggacaucuacaucagucgaagacuucuugggacuuuuacuuggacucucucugauucugaagguaaugaaacaccggguggguauugucuaacaagauggaugcugauugaggccgaguugaagugcuuugggaacacagcaguugcgaaaugcaaugaaaaacaugaugaagaguuuugugacauguuaagauuguuugacuuuaacaaacaagcuauaaggaagcugaagacagaagcacagaugaguauccaacugauaaauaaagcagugaacgcacugaucaaugaccagcugaucaugaagaaucauuuaagagauaucaugggaauuccuuauugcaauuacagcaaguacugguaucuaaaucacacuguaacagggaagacaucguugccaagaugcuggcuugugucaaaugguuccuaucuaaaugaaacacauuuuucugaugacauugaacaacaagcagacaacaugauaacagaacuguugcaaaaggaguacauggacaggcaggggaagacacccuuagggcuaguagaucuuuuugucuucagcaccagcuuuuaucuuauuagcaucuuccuccaccugguuaaaaucccaacucacagacaugucauagggaaacccuguccuaaaccacacagacucaaccacaugggcauaugcucauguggucuguacaaacauccuggugugccaguuaaguggaaaagauaa

SEQ ID NO: 345 - RNA, 1473 nt, Artificial Sequence
  derived and/or modified protein sequence (wt) from LASV(Lassa virus/H.sapiens-wt/NGA/2016/ISTH_1207;Clade II)__AVO03599__GPC
augggacaaauuauaacauuuuuccaggaaguaccccaugucauagaggaagugaugaacauuguccugauugcucucagccuucuggcaauauugaaaggaaucuacaauguugcuaccuguggccucuuuggauugguguccuuucuccucuuauguggaagaucaugcucaacaacuuacaaggguguuuaugagcuacaaacccuagagcuagacaugacaagccucaauaugacaaugcccuuauccugcacaaagaacaacagccaccauuacaucaugguuggaaaugagacuggcuuggagcugacuuuaacaaauacaaguauuaucaaccacaaguuuuguaaucuuucugaugcacauaaaaagaaucucuaugaccaugcuuuaaugagcaucaucucaaccuuccacuuauccauucccaauuuuaaucaguaugaagcaaugaguugugacuuuaauggagggaagauaaguguucaguacaaccucagccacacuuaugcuguagaugcagccaaucacugugggacuaucgccaauggcguucuucagacuuuuaugaggauggcuuggggcggcaguuacauagcacuugauuccggaaaggggaguugggauuguauaaugacuuccuaccaauauuugauaauccaaaacaccacuugggaagaucacugccaguuuucucgcccaucccccaucgguuaccuggggcuacugucacaaaggacuagggacauuuacaucagucgaagacuucuagguacuuuuacuuggacucuuucugauucugaaggcaaugauacaccggguggauauugucuaacaagauggaugcugauugaggcugaguugaagugcuuugggaacacagcaguugcaaaaugcaaugagaaacacgaugaagaguuuugugacauguuaagauuguuugacuuuaacaaacaagcuauaaggaggcuaaagacagaggcacagaugagcauccaacugauaaacaaagcagugaacgcacugaucaaugaucaacucauuaugaagaaucacuugagagauaucaugggaauuccuuacugcaauuacagcaaguacugguaucuaaaucacacuguaacagggaagacaucguugccaaggugcuggcuuguaucaaaugguuccuaccugaaugagacacauuuuucugaugacaucgaacaacaagcagauaacaugauaacagaacuguugcaaaaggaguacauagacaggcaagggaaaacacccuuaggguuaguggaucuuuuuguuuucagcaccaguuuuuaucucauuagcaucuuccuccaccuggucaaaaucccaacccacagacauguuauagggaaacccugcccuaaaccacacagacucaaccacaugggcauaugcucauguggccuguacaaacauccugguguaccagucaaguggaaaagauag

SEQ ID NO: 346 - RNA, 1473 nt, Artificial Sequence
  derived and/or modified protein sequence (wt) from LASV(Lassa virus/H.sapiens-wt/NGA/2016/ISTH_1306;Clade II)__AVO03623__GPC
augggacaaaucauaacauuuuuccaagaaguaccucaugucauagaggaagugaugaacauuguccugauugcucuuagccuccuggcaauacugaaagggaucuacaauguugcuaccuguggccucuuuggauugguguccuuucuccucuuauguggaagaucaugcucaacaaccuacaaggguguuuaugagcuacaaacucuagagcuagacauggcaagccuuaauaugacaaugcccuuaucuuguacgaagaacaacagccaccauuacaucauggucggaaaugagacuggcuuggagcugacuuuaacaaauacaagcauuaucaaccacaaguuuuguaaccuuucugaugcacauaaaaagaaucuuuaugaccaugcuuuaaugagcaucaucucaaccuuccauuuaucuauucccaacuucaaucaguaugaagcaaugaguugugacuucaaugggggaaagauaaguguucaguauaaccucagccacacuuacgcuguagaugcagccaaccacugugggacugucgccaauggcguccuucagacuuucaugaggauggcuugggguggcaguuacauagcacuugauuccggaaaagggaguugggauuguauaaugacuuccuaccaauauuugauaauccaaaacacuacuugggaagaucacugccaguuuucucgcccaucuccuaucgguuaucuggggcuacugucacaaaggaccagagacauuuacaucagucgaagacuucuugggacuuuuacuuggacucucucugauucugaagguaaugaaacaccggguggguauugucuaacaagauggaugcugauugaggcugaguugaaaugcuuugggaacacagcaguugcgaaauguaaugagaaacaugaugaagaguuuugugacauguuaagauuguuugacuuuaacaaacaagcuauaaggagguugaagacagaagcacaaaugaguauucaacugauaaacaaagcagugaacgcacugaucaaugaccagcuaauuaugaagaaucauuuaagagacaucaugggaauuccuuacugcaauuacagcaaguacugguaucuaaaucacacuguaacagggaggacaucguugccaaggugcuggcuugugucaaaugguuccuaccugaaugagacacauuuuucugaugacauugaacaacaagcagacaacaugauaacagaacuauugcaaaaagaguacauagauaggcaagggaaaacacccuuaggguuaguggaucuuuuugucuucagcaccagcuuuuaucucauuagcaucuuucuucaccuggucaaaaucccaacucacagacaugucauaggaaaacccugcccuaaaccacacagacucaaccacaugggcauaugcucauguggucuauacaaacauccugguguaccagucaaguggaaaagauag

SEQ ID NO: 347 - RNA, 1473 nt, Artificial Sequence
  derived and/or modified protein sequence (wt) from LASV(Lassa virus/H.sapiens-wt/NGA/2016/ISTH_1311;Clade II)__AVO03575__GPC
augggacaaauagugacauucuuucaagaaguaccucaugucauagaagaggugaugaacauuguccugauugcucucagucuccuagcgauacugaaggggauuuacaauguagcuacuuguggccuuuuugggcugaucuccuuucuccuucuguguggaagaucaugcucaacaaccuacaagggugucuaugagcugcaaacucuagagcuggacauggcaaaccuuaacaugacuaugccucuaucuugcacaaaaaacaacagucaucauuacaucaugguuggaaaugaaacaggcuuagaacugaccuugacaaacacaaguauaaucaaucacaaauucuguaaccuuucugaugcacacaaaaagaaucuuuaugaucaugcuuugaugagcaucaucucaaccuuccacuuauccauuccgaacuucaaucaguaugaagcaaugagcugugauuuuaauggagggaaaauaaguguacaauacaaucuuagucaugcuuaugcuggagaugcagccagccacugugggaccauugccaauggugucuugcagacuuucaugagaauggcuuggggcggcagcuacauagcacuugauucuggaaaaggaaacugggauuguauaaugacuuccuaucaguacuuaauaauucaaaacaccacuugggaagaucacugccaauuuucccgcccaucccccauuggauaccuaggacuccuaucacagagaacuagagacaucuacaucagucggagacuucuuggaacuuucaccuggacacucucugauucugaggguaaugaugcacccgguggauacugccuuacuagauggauguuaauugaagcugaacugaagugcuuugggaacacagccauugcgaaguguaaugagaaacacgaugaggaauucugugauauguugagacuuuuugacuucaacaaacaagcuauaaaaaggcuaaaaacagaagcacagaugaguauccaauuaauaaauaaagcagugaaugcacuaaucaaugaccaguugaucaugaagaaccaccugagggacaucauggggauuccuuauugcaauuacagcaaguacugguacuuaaaucauaccacaacagggaagacaucauugccgaagugcuggcuuauuucgaaugguucuuaccugaaugagacacacuucuccgaugauauugaacaacaagcggacaacaugauaacagaacuguugcaaaaggaguauuuggacagacaggggaaaacacccuuagguuugguagaucuuuuuguuuuuagcacuagcuuuuaucucauaaguauuuuccuccacuugauuaaaaucccaacccauaggcacauuguggggagacccugccccaagccacacagacucaaccauauggguauaugcucaugugguuuauauaaacauccuggugugccagucaaguggaagagauag

SEQ ID NO: 348 - RNA, 1473 nt, Artificial Sequence
  derived and/or modified protein sequence (wt) from LASV(Lassa virus/H.sapiens-wt/NGA/2016/ISTH_1423;Clade II)__AVO03577__GPC
auggggcagaucgugacauuuuuccaagaagugccucaugucauagaggaaguaaugaacauugucuugauugcccucagucuucuggcaauacugaaagggaucuacaauguugccaccuguggccucuucggguugguguccuuucuucuccuauguggaagaucaugcucaacaacuuacaaagguguuuaugaacuucaaacuuuagagcuggacauggcaaaccuuaauaugacaaugcccuugucuugcacaaagaacaacagccaccacuacauuaugguuggaaaugagacuggcuuggaauuaacuuuaacaaacacaagcaucaucaaccacaaguuuuguaaccuuucugaugcacauaaaaagaaucuuuaugaccaugcuuuaaugagcaucaucucaaccuuccacuuaucaauucccaacuuuaaucaguaugaggcaaugaguugugauuucaauggagggaagauaaguguucaguacaaucuuagccacucuuaugcuguggaugcagcuaaccacugugggaccguugcuaauggcguucugcagacuuucaugaggauggcuugggguggcaguuauauagcacuugauucugggaaggggagcugggacuguauaaugacuuccuaccaauauuuaauaauccaaaacaucaccugggaagaucauugccaguuuucucgcccauccccuaucgguuaucuagggcuauugucacaaagaacuagagacaucuacaucagucguagacuccuuggaacuuuuacuuggacucuuucugauucugaagguaaagaaacaccggguggauacuguuugacaagauggaugcugauugaggcugaguugaagugcuuugggaauacagcaguugcgaagugcaaugagaaacaugaugaagaauuuugugacauguugagacuguuugacuuuaacaaacaagcuauaaggaggcugaagacagaagcacagaugaguauccaauuaauaaacaaagcagugaaugcacugaucaaugaccaauugaucaugaagaaccauuuaagggauaucaugggaauuccuuacugcaacuacaguaaguauugguauuugaaucacacuguaacagggaaaacgucguugccaagaugcuggcuugugucaaaugguucuuaccuaaaugagacacacuuuucugaugacauugagcaacaagcagacaacaugauaacagaacuguugcagaaagaauacauagacagacaagggaaaacaccucuaggguuaguagaccuuuuuguuuucaguaccagcuuuuaucucauuagcaucuuccuccaucugguuaagaucccaacucacagacauaucuuagggaaacccugcccuaaaccacacagacucaaccacaugggcauaugcucauguggucuguacaagcacccugguguaccagucaaguggaaaagauaa

SEQ ID NO: 349 - RNA, 1473 nt, Artificial Sequence
  derived and/or modified protein sequence (wt) from LASV(Lassa virus/H.sapiens-wt/NGA/2016/ISTH_1462;Clade II)__AVO03587__GPC
augggacaaaucauaacauuuuuccaggaaguaccucaugucauagaggaagugaugaacauuguccugauugcucuuagccuucuggcaauauugaaagggaucuacaauguugcuaccuguggccucuuuggauugguguccuuucuccucuugugcggaagaucaugcucgacaaccuacaagggcguuuaugagcuacaaacccuagagcuagacauggcuagccuuaauaugacaaugccuuuaucuugcacgaagaacaacagccaucauuacaucauggucggaaaugagacuggcuuggagcugacuuuaacaaauacaaguauuaucaaccacaaguuuuguaaccuuucugaugcacauaaaaagaaucuuuaugaccaugcuuuaaugaguaucaucucaaccuuccaccuauccauucccaacuuuaaucaguaugaagcaaugaguugugacuucaauggaggaaagauaaguguucaguacaaccucagccacacuuaugccguagaugcagcuaaccacuguggaaccauugccaaugguguucuucagacuuuuaugaggauggcuugggguggcaguuacauagcacuugauuccggaaaggggaguugggacugcauaaugacuuccuaccaauauuugauaauccaaaacaccacuugggaagaucauugccaauuuucucgcccauccccuaucgguuaucuggggcuacugucacaaaggaccagggauauuuacaucagccgaaggcuucuuggaaccuuuacuuggacucucucugauucugaagguaaugaaacaccggguggguauugucuaacaagauggauguugauugaggccgagcugaaaugcuuugggaacacagcaguugcgaagugcaaugagaaacacgaugaggaguuuugugacauguuaagguuguuugacuuuaacaaacaagcuauaaggaggcugaagacggaagcacagaugagcauucaacugauaaacaaagcaguaaacgcacuaaucaaugaccaacugaucaugaagaaucauuugagagauaucaugggaauucccuacugcaauuacagcaaauacugguaucuaaaucauacugugacagggaggacaucacuaccaagaugcuggcuugugucaaaugguuccuaccugaaugagacacauuuuucugaugacauugaacaacaagcagacaacaugauaacagaacuguugcaaaaggaguacauagagaggcaagggaaaacacccuuaggguuaguagaucuuuuugucuucagcacuagcuuuuaucucauuagcaucuuccuccaccugauuaaaaucccaacccauagacaugucauagggaaacccugcccuaaaccacacagacucaaccacaugggcauaugcucauguggucuauacaaacauccugguguaccaguuaaguggaaaagauag

SEQ ID NO: 350 - RNA, 1473 nt, Artificial Sequence
  derived and/or modified protein sequence (wt) from LASV(Lassa virus/H.sapiens-wt/NGA/2016/ISTH_1472;Clade II)__AVO03605__GPC
augggacaaaucauaacuuuuuuccaggaaguaccucaugucauagaggaagugaugaacauuguccugauugcccuuagccuucuggcaauacugaaagggaucuacaauguugcuaccuguggccucuuuggauugguguccuuucuccucuuguguggaagaucaugcucgacaaccuacaaggguguuuaugagcuacaaacccuagagcuagacauggcaagccuuaauaugacaaugccuuuaucuugcacgaagaacaacagccaucauuacaucauggucggaaacgagacuggcuuggagcugacuuuaacaaauacaaguauuaucaaccacaaguuuuguaaccuuucugaugcacauaaaaagaaucuuuaugaccaugcuuuaaugaguaucaucucaaccuuccacuuauccauucccaacuuuaaucaguaugaagcaaugaguugugacuucaauggaggaaagauaaguguucaguacaaccuuagccacacuuaugcuguagaugcagcuaaccacuguggaaccauugccaaugguguucuucagacuuuuaugaggauggcuugggguggcaguuacauagcacuugauuccggaaaggggaguugggacugcauaaugacuuccuaccaauauuugauaauucaaaacaccacuugggaagaucacugccaauuuucucgcccauccccuauugguuaucuggggcuauugucacaaaggaccagggauauuuacaucagccgaaggcuucuuggaacuuuuacuuggacucucucugauucugaagguaaugaaacaccggguggguauugucugacaagauggauguugauugaagccgagcugaagugcuuugggaacacagcaguugcgaagugcaaugagaaacacgaugaagaguuuugugacauguuaagguuguuugacuuuaacaaacaagcuauaaggaggcugaagacggaagcacaaaugaguauccaacugauaaacaaagcaguaaacgcacuaaucaaugaccagcuaaucaugaagaaucauuugagagauaucaugggaauucccuacugcaauuacagcaaauacugguaucugaaucauacugugacagggaggacaucacugccaagaugcuggcuugugucaaaugguuccuacuugaaugagacacauuuuucugaugacauugaacaacaagcagacaacaugauaacagaacuguugcaaaaggaguacauagauaggcaagggaaaacacccuuaggguuaguagaucuauuugucuucagcaccagcuuuuaucucauuagcaucuuccuccaccugauuaaaaucccaacccauagacaugucauagggaaacccugcccuaaaccacacagacucaaccacaugggcauaugcucauguggucuguacaaacauccugguguaccaguuaaguggaaaagauag

SEQ ID NO: 351 - RNA, 1473 nt, Artificial Sequence
  derived and/or modified protein sequence (wt) from LASV(Lassa virus/H.sapiens-wt/NGA/2016/ISTH_1474;Clade II)__AVO03613__GPC
augggacaaauuauaacauuuuuccaggaaguaccucaugucauagaggaagugaugaacauuguccugauugcucucagccuucuggcaauacuaaaagggaucuacaauguugcuaccuguggccucuuuggauugguguccuuccuccuccuauguggaagaucaugcucaacaacuuacaaagguguuuaugagcuacaaacucuagagcuagacauggcaagccuuaauaugacaaugcccuuaucuugcacgaagaacaacucccaccauuacaucauggucgggaaugagacuggcuuggagcugacuuugacaaauacaagcauuauccaccacaaguuuuguaaccuuucugaugcgcauaagaagaaucuuuaugaccaugcuuuaaugagcaucaucucaaccuuccacuuauccauuccuaacuuuaaucaguaugaagcaaugaguugugacuucaauggaggaaagauaaguguucaguacaaccuuagccacacuuaugcuguagaugcagcuaaccacuguggaaccauugccaauggcguucuucagacuuucaugaggauggcuugggguggcaguuacauagcacuugauuccggaaagggaaguugggacugcauaaugacuuccuaccaauauuugauaauucaaaacaccacuugggaagaucacugccaauuuucucgcccauccccuauugguuaucuggggcuauugucacaaaggaccagggauauuuacaucagccgaaggcuucuuggaacuuuuacuuggacucucucugauucugaagguaaugaaacaccggguggguauugucugacaagauggauguugauugaagccgagcugaagugcuuugggaacacagcaguugcgaagugcaaugagaaacacgaugaagaguuuugugacauguuaagguuguuugacuuuaacaaacaagcuauaaggaggcugaagacggaagcacaaaugaguauccaacugauaaacaaagcaguaaacgcacuaaucaaugaccagcuaaucaugaagaaucauuugagagauaucaugggaauucccuacugcaauuacagcaaauacugguaucugaaucauacugugacagggaggacaucacugccaagaugcuggcuugugucaaaugguuccuacuugaaugagacacauuuuucugaugacauugaacaacaagcagacaacaugauaacagaacuguugcaaaaggaguacauagauaggcaagggaaaacacccuuaggguuaguagaucuauuugucuucagcaccagcuuuuaucucauuagcaucuuccuccaccugauuaaaaucccaacccauagacaugucauagggaagcccugcccuaaaccacacagacucaaccacaugggcauauguucaugugguuuguacaaacauccuggcgugccagucaaguggaaaagauag

SEQ ID NO: 352 - RNA, 1476 nt, Artificial Sequence
  derived and/or modified protein sequence (wt) from LASV(Lassa virus/H.sapiens-wt/NGA/2016/ISTH_1496;Clade II)__AVO03579__GPC
augggacaaauuauaacauuuuuccaggaaguaccucaugucauagaggaagugaugaacauuguccugauugcucucagccuucuggcaauauugaaaggggucuacaauguugccaccuguggccucuuuggauugguguccuuucuccucuuauguggaagaucaugcucaacaacaauauacaaggguguuuaugagcuacaaacucuagaguuagacauggcaagccuuaauaugacaaugccccuauccugcacgaagaacaacagccaccauuacaucauggucggaaaugagacugguuuggagcugacucuaacaaacacaagcauuaucaaccacaaguuuuguaaccuuucugaugcacauaaaaagaaucucuaugaccaugcuuuaaugaguaucaucucaaccuuccacuuauccauuccuaacuuuaaucaguaugaagcaaugaguugugacuucaauggggggaagauaaguguucaauacaaucuuagccacgcuuaugcuguagaugcagcuaaucacugugggaccaucgccaauggcguucuucagacuuuuaugaggauggcuugggguggcaguuacauagcacuugauuccggaaagaggaguugggauuguauaaugacuuccuaccaauauuugauaauccaaaacaccacuugggaagaucacugccaguuuucucgcccaucccccaucgguuaucuggggcuacugucacagaggaccagagacauuuacaucagucgaagacuucuugggacuuucacauggacucuuucugauucugaagguaaugaaacaccagguggguauugucuaacaagauggaugcugauugaagccgaguugaagugcuuugggaacacagcaguugcgaaaugcaaugaaaaacaugaugaagaguuuugugacauguuaagauuguuugacuuuaacaaacaagcuauaagaaggcugaagacagaagcacagaugaguauccagcugauaaacaaagcagugaacgcacugaucaaugaccagcugaucaugaagaaucauuugagagauaucaugggaauuccuuacugcaauuacagcaaguauugguaucuaaaucacacuguaacagggaagacaucguugcccaggugcuggcuugugucaaaugguuccuaccugaaugagacacauuuuucugaugauauugaacaacaagcagacaacaugauaacagaacuguugcaaaaggaguacauagacaggcaagggaaaacacccuuaggauuaguagaucuuuuugucuuuagcaccaguuuuuaucucauuagcaucuuccuccaucuggucaaaauuccaacucauagacauguuauagggaagcccugcccuaaaccacacagacucaaccacauggguauaugcucauguggucuauacaaacauccugguguaccagucaaauggaaaagauag

SEQ ID NO: 353 - RNA, 1473 nt, Artificial Sequence
  derived and/or modified protein sequence (wt) from LASV(Lassa virus/H.sapiens-wt/NGA/2016/ISTH_1541;Clade II)__AVO03553__GPC
auggggcaaauagugacauucuuucaagaaguuccucaugucauugaggagauuaugaauauuguccucaucacuuugucccuacuugcuguuuuaaagggaauauauaacuuugccacauguggucuaauuggcuugaucacauuccuuuuccucuguggaagaucaugcucgacaaucuacaaaggaaacuaucaacuucagacacuugagcugaacauggagacacucaacaugacuaugccucuauccugcacaaaaaacaacagucaccacuacauaagagugggcaaugaaacaggacucgaauugacccugaccaacguaaguaucauaaaccacagauucuguaaucuuucugaugcacacaagaggaaucucuaugaucacacccucaugagcaucaucuccaccuuccauuuguccaucccaaauuucaaucaauacgaggcaaugaguugugauuucaauggagggaagaucaguguucaauauaaccuaagccacggauaugcgguggaugcggcuaagcauugugguacuguggcaaaugguguguugcagaccuuuaugaggauggccuggggugggagcuauauugcacuugacucaggcaaagggaacugggauuguauaaugacaaguuaucaauaccugaucauucaaaacacgacuugggaggaucacugucaguucucaaggccaucucccauugguuaucuuggacuucuuucacagaggaccagagauauuuacaucaguagaaggcuguugggaacauucacauggacacugucagacucugaggguagagaaaccccuggagguuacuguuugaccagauggaugcugauugaagcugaauugaaguguuucggcaacacugcaguagccaaaugcaaugagaaacaugaugaagaguuuugugacauguugagacuuuucgacuucaacaaacaagccauucagaggcugaagacugaggcccaaaugaguauucagcucauuaacaaggcggucaaugcccuuauaaaugaccagcuuauaaugaaaaaccaucugagggacaucaugggcauaccauacugcaauuacagcaaauauugguaucucaaucacacaaccacaggcaaaacuucacuaccaaaguguuggcuugugacaaauggauccuaucuuaaugaaacucauuuuucagaugacauagaacaacaagcugacaacaugauaacggaaaugcugcaaaaggaauauauugauaggcaagggaaaacuccacuuggacuaguugaccucuucguauucagcaccagcuucuaucucaucagcauuuuccuucauuuaauuaagauaccgaaccacaggcacauuguggguaagccaugccccaaaccccauagacugaaccauaugggcauuugcuccuguggguuuuacaaacaaccaggaguacccgugagguggaagagauag

SEQ ID NO: 354 - RNA, 1473 nt, Artificial Sequence
  derived and/or modified protein sequence (wt) from LASV(Lassa virus/H.sapiens-wt/NGA/2016/ISTH_1546;Clade II)__AVO03537__GPC
auggggcaaauagugacauucuuucaagaaaucccucauguuguugaggaaaucaugaauauuguccucaucaccuuaucccuacuugcaauuuuaaaggguuuauacaacuuugccacauguggucucauuggcuugaucacauuccuuuuccucuguggaagaucauguucaacaauauauaaagggaguuaccaacuccaggcacuugaguugaacauggaaacacucaauaugacuaugccucuauccugcacaaaaaacaacagucaccacuacauaagggugggcaaugagacaggacucgaguugaccuuaaccaauacgagcaucauaaaucauaaguucugcaaccuuucugaugcacacaaaaagaaccucuaugaucacacccucaugagcaucaucuccaccuuccacuuguccauccccaauuuuaaucaguaugaagcaaugaguugugauuucaauggagguaaaaucaguguacaguacaaucuaagucacaguuaugcaggagaugcggcuaggcauugcggcacuguggcaaauggugucuuacaaacuuuuaugaggauggccuggggugggaguuacauugcacucgacucaggcaaaggaaacugggacuguauaaugacgaguuaucaauacuuaaucauucagaacacaacuugggaggaccacugucaguucucgaggccaucucccaucgguuaucuuggacuucucucgcaaagaaccagagacaucuacaucaguagaaggcuguuaggaacauuuacauggacacugucagauucugaagguaaagaaacuccuggagguuacuguuugacuagauggaugcuaauugaagcugaacugaaauguuuuggcaacacugcaguagccaagugcaaugagaaacaugaugaagaauuuugugacauguuaaggcuuuucgacuucaacaaacaagccauucagaggcugaagacugaggcccagaugagcauccagcucaucaacaaggcagucaaugcccuuauaaaugaucaacuuauaaugaaaaaccaucuuagggacaucaugggcauaccauacugcaauuacagcaaauauugguaccucaaccacacaaccacaggcaaaacuucacuaccaagauguuggcuugugucaaauggguccuaucuuaaugaaacucauuucucagaugacauagaacaacaggcugacaacaugauaacagaaaugcugcagaaggaauacauugauaggcaagggaaaacuccacuaggacuaguugaccucuuuguguuuagcacuagcuucuaccuuaucagcauuuuccugcauuugaucaagauaccaacccacaggcacauugugggcaagucaugccccaagccccauaggcuaaaucacaugggcauuugcuccugugggcuuuacaaacaaccagggguaccugugaaauggaagagauaa

SEQ ID NO: 355 - RNA, 1473 nt, Artificial Sequence
  derived and/or modified protein sequence (wt) from LASV(Lassa virus/H.sapiens-wt/NGA/2016/ISTH_1591;Clade II)__AVO03647__GPC
augggacaaaucauaacauuuuuccaggaaguaccucaugucauagaggaagugaugaacauugucuugauugcucuuagccuucuggcaauacugaaaggaaucuacaauguugcuaccuguggccuuuuuggauugguguccuuucuccuccuauguggaagaucaugcucaacaacuuacaaggguguuuaugagcuacaaacucuagagcuagauauggcaagccuuaauaugacaaugcccuuaucuugcacgaagaacaacucccaccauuacaucaugguuggaaaugaaacuggcuuggagcugacuuuaacaaacacaaguauuauccagcacaaguuuuguaaccuuucugaugcacauaaaaagaaucuuuaugaccaugcuuuaaugagcaucgucucaaccuuccauuuauccauuccaaacuuuaaucaguaugaagcaaugagcugugacuucaauggagggaagauaacuguucaguacaaccuuagccacucuuaugcuauagaugcagcaaaccacugugggacuguugccaauggcguucuucagacuuuuaugaggauggcuugggguggcaguuacauagcacuugauucuggaaggggaagcugggauugcauaaugacuuccuaccaauaucugauaauccaaaacaccacuugggaagaucacugccaguuuucucgcccaucccccaucgguuaucuggggcuacugucacaaaggaccagggacauuuauaucagucgaagacuucuugggacuuuuacuuggacucucucugauucugaagguaaugaaacaccagguggguauugucuaacaagguggaugcugauugaggcagaguuaaagugcuuugggaacacagcaguugcgaaaugcaaugagaaacaugaugaagaguuuugugacauguugagauuguuugacuuuaacaaacaagcuauaagaaggcugaaggcagaagcacaaaugaguauccaacugauaaacaaagcggugaacgcacugaucaaugaccagcugauuaugaagaaucauuugagggauaucaugggaauuccuuacugcaauuacagcaaguauugguaucuaaaucacacuguaacagggaggacaucguugccaagaugcuggcuugugucaaauggcuccuaccuaaaugagacacauuuuucugaugacauugaacaacaagcagauaacaugauaacagaacuguugcagaaggaguacauggacaggcaagggaaaacacccuuaggguuaguagaccucuuugucuucagcaccagcuuuuaucucauuagcaucuuccuccaccugguuaaaaucccaacccacagacacaucauagggaaacccugccccaaaccacacaggcucaaccacaugggcguaugcucauguggucuguacaaacacccuggugugccagucaaguggaaaagauag

SEQ ID NO: 356 - RNA, 1473 nt, Artificial Sequence
  derived and/or modified protein sequence (wt) from LASV(Lassa virus/H.sapiens-wt/NGA/2016/ISTH_1604;Clade II)__AVO03541__GPC
augggucagauagugacauucuuucaggaaguuccucaugucauugaggaaauuaugaacauuguccucaucacuuuaucucugcuugcaaucuugaaagguguguacaauuuggccacguguggccuuauuggucugauaacauuccuuuuccucuguggaaggucauguucgaugaccuacaaagggaguuaucaacuugaaacccuugaacugaacauggagacacuuaacaugaccaugccucuguccugcacaaaaaauaccagucaccacuacauaaggguggguaaugaaacagggcuugagcugacauuaaccaauacaagcauuauaaaccacaaguucugcaaucucucugaugcccacaaaaagaaucucuacgaccacucucucaugagcauugucaguaccuuucaccuguccaucccuaacuucaaucaguaugaagcuaugaguugugacuucaauggagguaagaucaguauccaauacaauuuaagccacgccuaugcaggagaugcagccaaacauuguggcaccuuggcaaauggugugcuacaaaccuucaugaggauggcuuggggugggaguuacauugcacuugacucaggucgaggaaacugggauuguauaaugacuagcuaccaauacuuaaucauucagaauacaacuugggaggaccauugucaguuuucgagaccaucacccauuggcuaucucggacuucucucucaaaggaccagagaaauuuacauuaguagaagacugcuaggaacauuuacauggacauuaucagauucugaaggcaaugaagcuccaggggguuacugcuuaacuagauggauguuaauugaagccgaacugaaauguuuugggaaugcugcaguagcuaaaugcaaugagaagcaugaugaggaauuuugugacaugcugaggcuuuuugauuuuaacaaacaagccauucagagauugaagacugaggcucaaaugaguauucagcuuauuaacaaagcugucaaugcccucauaaaugaccaacuuauaaugaaaaaucaucucagggacauuaugggcauaccauauugcaacuauagcaaauauugguaucuuaaucauacgacuacggguagaacuucacuaccaagauguuggcuuguaucaaacggguccuaucucaaugagacucauuucucagacgacauagaacaacaggcugacaauaugauaacagaaauguugcagaaagaguacaucgauagacaaggaaagaccccauuaggccugguugacuuguuuguguucagcacaagcuucuacuugaucagcauuuuucuacacuuggucaagauaccaacucauagacacauuguagguaaaucaugccccaagccucacaggcugaaccauaugggcauuugcucuugugggcuauauaaacagccaggagugccugugagguggaagagauga

SEQ ID NO: 357 - RNA, 1473 nt, Artificial Sequence
  derived and/or modified protein sequence (wt) from LASV(Lassa virus/H.sapiens-wt/NGA/2016/ISTH_1609;Clade II)__AVO03661__GPC
auggggcaaauagugacauucuuucaagaaauuccucauguaauugaggaaguaaugaacauuguucucaucaccuuaucccuacuugcaguuuuaaagggaauauacaacuuugcaacauguggucucauugguuugauaacauuucuuuuccucugugggaggucauguucaacaauuuauaaagggagcuaucaacugcaaaaacuugaacuaaacauggaaacacucaacaugaccaugccucuauccugcacaaaaaauagcagucaccacuacauaagagugggcaaugaaacaggacucgaauugaccuuaaccaacacaagcaucauuagccauaaguucugcaaucuuucugaugcacacaagaaaaaucuuuaugaucaugcccucaugagcaucaucuccacuuuccaucuguccauucccaacuuuaaucaguacgaagcaaugaguugugauuucaauggagguaaaaucagugugcaauacaaucuaagccacagcuaugcaggugaugcggcuaggcauugugguacccuggcaaauggugugcuacagacuuuuaugaggauggccuggggugggaguuacauugcacuugacucgggcaaagguaacugggacuguauaaugacaaguuaucaauucuugauuauucagaacacaaccugggaggaccacugucaguuuucgaggccaucuccuauggguuaccucggacuucucucacagagaacuagagacaucuacaucaguagaaggcuguugggaacguucacauggacacugucggauucugaaggaaaagaaaccccuggagguuacuguuuaaccagauggaugcuaauugaggcugaacuaaaaugcuuugguaacacugcaguggccaaguguaaugagaaacaugaugaggaguuuugugacauguuaaggcuuuuugauuucaacaagcaagccauucagagguuaaaaacugaagcccagaugaguauucagcucauuaacaaggcagucaaugcccuuauaaaugaccaacuuauaaugaagaaccaccucagggauaucaugggcauaccauacugcaauuacagccaauauugguaccuuaaucauacaauuacaggcaaaacuucacugccaaaguguuggcuugugucaaauggauccuaucuuaaugaaacucauuuuucagaugacauagagcaacaagcugacaacaugaucacagaaaugcugcagaaggaguauauugauaggcaagggaaaacuccacuuggacuaguugaccuuuuuguauuuaguacuagcuucuaucuuaucagcauuuuuuugcauuuaaucaagauaccaacucauaggcacauugugggcaaaucaugccccaagccccacaggcuaaaccgaauggguauuugcuccuguggacuuuauaaacaaccaggaguaccugugaaauggaagagauaa

SEQ ID NO: 358 - RNA, 1473 nt, Artificial Sequence
  derived and/or modified protein sequence (wt) from LASV(Lassa virus/H.sapiens-wt/NGA/2016/ISTH_1610;Clade II)__AVO03603__GPC
auggggcaaaucauaacauuuuuccaggaagugccucaugucauagaggaagugaugaacauugucuugauugcucucagccuucuggcgauacugaaagggaucuacaauguugcuacuuguggccuuuuuggguugguguccuuccuuuucuuauguggaagaucaugcucaacaacuuacaaaggugucuaugagcuacaaacucuagaguuggauauggcaagccuuaacaugacaaugcccuuaucuugcacgaagaacaacagccaccauuacaucaugguugggaaugaaacuggcuuggagcuaacccugacaaacacaagcaucaucaaccacaaguuuugcaaccuuucugaugcacauaagaagaaccuuuaugaccaugcuuuaaugagcaucaucucaaccuuccauuuauccauccccaacuuuaaucaguaugaagcaaugaguugugacuucaaugggggaaagauaaguguucaguacaaccuuagccacacuuaugcuauagaugcagccaaccacugugggaccauugccaaugguguccugcagacuuuuaugaggauggcuugggguggcaguuacauagcacuugauucuggaagggggaguugggauuguauaaugacuuccuaccaauauuugauaauccagaacaccacuugggaagaucacugccaguucucccgcccaucuccuaucgguuaucuggggcuacugucacagagaacuagagacaucuauaucagucgaagacuucuuggaacuuuuaccuggacucuuucugauucugaaggcaaugagacaccagguggauauuguuuaacaagauggaugcuaauugaggccgaguugaagugcuuugggaacacagcaguugcgaaguguaaugaaaagcaugaugaagaguucugugacauguuaaggcuguuugacuuuaacaaacaagcuauaagaaggcugaaggcagaagcacagaugaauauucaauuaauaaacaaagcagugaacgcauugaucaaugaccaguugauuaugaagaaccauuuaagggauaucaugggaauuccuuacugcaauuacaguaaguauugguauuuaaaccauacuguaacaggaaggacaucguugccaagaugcuggcuuguaucaaaugguuccuaccuaaaugagacacacuucucugacgacauugagcagcaagcagacaauaugauaacagaauuguuacaaaaggaauacauggacaggcaagggaaaacacccuuaggguuaguagaucuuuuugucuucagcaccagcuuuuaucucauuagcaucuuccuccaccugauuaaaaucccaacccacagacauauuguagggaaacccugcccuaaaccacacagacucaaccacaugggcauaugcucauguggcuuguauaaacauccuggugugccagucaaguggaaaagauag

SEQ ID NO: 359 - RNA, 1473 nt, Artificial Sequence
  derived and/or modified protein sequence (wt) from LASV(Lassa virus/H.sapiens-wt/NGA/2018/ISTH_0959;Clade II)__AVV65099__GPC
augggacaaaucauaacauuuuuccaggaaguaccucaugucauagaggaagugaugaacauuguccugauugcucucagccuuuuggcaauacugaaggggaucuacaauguuguuaccuguggccucuuuggauugguguccuuccuccucuuauguggaagaucauguucaacaacuuacaaggguguuuaugagcuacaaacucuggagcuggacauggcaagccuuaauaugacaaugcccuuaucuugcacgaagaacaacagccaccauuacaucauggucggaaaugagacuggcuuggagcugacuuuaacaaauacaaguaucaucaaccauaaauuuuguaaccucucugaugcacauaaaaagaaucuuuaugaucaugcuuuaaugaguaucauuucaaccuuccacuuauccauuccaaacuuuaaucaguaugaagcaaugagcugugacuucaaugggggaaagauaaguguucaguacaaccuuagccacgccuaugcuauagaugcagccaaccacugcgggacuauugccaauggcguucuucaaacuuuuaugaggauggcuugggguggcagcuauauagcacuugauuccggaaaggggaguugggacuguauaaugacuuccuaccaguauuugauaauccaaaacaccacuugggaagaucauugucaguuuucucgcccauccccuaucgguuaccuagggcuacugucacaaaggaccagggacauuuacaucagucgaagacuucuugggacuuuuacuuggacucucucugauucugaagguaaugaaacaccggguggguauugucuaacaagauggaugcugauugaggccgaguugaaaugcuuugggaacacagcaguugcgaaaugcaaugagaaacaugaugaagaguuuugugacauguuaagauuguuugacuuuaacaaacaagcuauaaggaggcuaaagacagaagcacagaugaguauccagcugauaaacaaagcagugaacgcacugaucaaugaccagcugauuaugaaaaaucauuugagagauaucauggggauuccuuacugcaauuacagcaaguacugguaucuaaaucauacuguaacagggaagacaucguugccaaggugcuggcuugugucaaaugguuccuaccugaaugagacacauuuuucugaugacauugaacaacaagcagacaauaugauaacagaacugcugcaaaaggaguacauagacaggcaagggaaaacaccuuuaggguuaguagaucuuuuugucuucagcaccagcuuuuaucucauuagcaucuuccuccaccugguuaaaaucccaacccacagacaugucauaggaaaacccugcccuaaaccacacagacuuaaucacaugggcauauguucauguggucuauacaaacauccuggugugccagucaaguggaaaagauag

SEQ ID NO: 360 - RNA, 1473 nt, Artificial Sequence
  derived and/or modified protein sequence (wt) from LASV(Lassa virus/H.sapiens-wt/NGA/2018/ISTH_1024;Clade II)__AVV65105__GPC
augggacaaaucauaacauuuuuccaggaaguaccucaugucauagaggaagugaugaacauuguuuugauugcucucagccuucuggcaauacugaaaggggucuacaauguugcuaccuguggccucuuuggauuggugucuuuucuucucuuauguggaagaucaugcucaacaacuuacaagggcguuuaugaguugcaaacucuagagcuagacauggcaaaccuuaacaugacaaugcccuuaucuugcacgaagaauaacagccaccauuacaucagggucggaaaugagacuggucuggagcugacuuuaacaaacacgagcaucaucaaccacaaguuuuguaaccuuucugaugcacauaaaaauaaucuuuaugaccaugcuuuaaugaguaucaucucaacuuuccacuuauccauuccuaacuuuaaucaguaugaggcaaugaguugugacuucaauggggggaagauaaguguucaguacaaccucagccacgcuuaugcuguggaugcagcuaaccauugugggaccauugccaauggcguucuucaaacuuuuaugagaauggcuugggguggcaguuacauagcacuugauuccggaagggggaguugggauuguauaaugacuuccuaccaauacuugauaauccaaaacaccacuugggaagaucacugccaguuuucucguccauccccuaucgguuaucuggggcuacugucacagaggaccagggacauuuacaucagucggaggcuucuugggacuuuuacuuggacucucucugauucugaagguaaugaaacaccggguggauauugucuaacaagguggaugcugauugaggcugaguugaagugcuuugggaacacagcaguugcaaaaugcaacgagaaacaugaugaagaguuuugugacauguuaagauuguuugacuuuaacaaacaagcuauaaggaggcugaaaacagaagcacaaaugaguauccaacugauaaacaaagcagugaacgcacugauuaaugaccagcugaucaugaagaaucauuuaagagauaucaugggaauuccuuauugcaauuacagcaaguauugguacuuaaaucacacuguaacagggaagacaucguugccaagaugcuggcuuguaucaaaugguaccuaccugaaugagacacauuuuucugaugacauugaacaacaagcagacaauaugauaacagaacuguugcagaaggaguacauggacaggcaagggaaaacacccuuaggguuaguagaucuuuuugucuucagcaccagcuuuuaucucauuagcaucuuccuccaucugguuaagaucccaacccacagacaugucauagggaaacccugcccuaaaccacacagacucaaccacaugggcauaugcucauguggucuauacaaacauccugguguaccagucaaguggaagagauag

SEQ ID NO: 361 - RNA, 1473 nt, Artificial Sequence
  derived and/or modified protein sequence (wt) from LASV(Lassa virus/H.sapiens-wt/NGA/2018/ISTH_1079;Clade II)__AVV65107__GPC
augggacaaaucauaacauuuuuccaggaaguaccucaugucauagaggaagugaugaacauuguccugauugcucuuagccuucuggcaauacugaaagggaucuacaauguugccaccuguggccucuuuggauugguggccuuucuccucuugugugggagaucaugcucgacaaccuacaaggguguuuaugagcuacaaacccuagagcuagacauggcaagccucaauaugacaaugccuuuaucuugcacgaagaacaacagccaucauuacaucauggucggaaaugagacuggcuuggagcugacuuuaacaaauacaaguauuauuaaccacaaguuuuguaaccuuucugaugcacauaaaaagaaucuuuaugaccaugcuuuaaugaguaucaucucaaccuuucacuuauccauucccaacuuuaaucaguaugaagcgaugaguugugacuucaauggaggaaagauaaguguucaguacaaccuuagccacacuuaugcuguagaugcagcuaaccacuguggaaccauugccaaugguguucuucagacuuuuaugaggauggcuugggguggcaguuacauagcacuugauuccggaaaggggagcugggacugcauaaugacuuccuaccaauauuugauaauccaaaacaccacuugggaagaucacugccaauuuucucgcccauccccuaucgguuaccuggggcuacugucacaaaggaccagggauauuuacaucagccgaaggcuucuugggacuuuuaccuggacucucucugacucugaagguaaugaaacaccggguggguauugucuaacaagauggaugcugauugaggccgagcugaagugcuuugggaacacagcaguugcgaagugcaaugagaaacacgaugaagaguuuugugacauguuaagguuguuugacuuuaacaaacaagcuauaaggaggcugaaaacggaagcacagaugagcauccaacugauaaacaaagcagugaacgcacuaaucaaugaccagcugaucaugaagaaucauuuaagagauaucaugggaauucccuacugcaauuacagcaaauacugguaucuaaaucauacugugacagggagaacaucacugccaaggugcuggcuugugucaaaugguuccuaccugaaugagacacauuucucugaugacauugaacaacaagcagacaacaugauaacagaacuguugcaaaaggaguacauggacaggcaagggaaaacacccuuaggguuaguagaucuuuuugucuucagcaccagcuuuuaucucauuagcaucuuccuccaccugauuaaaaucccaacccauagacaugucauagggaaacccugcccuaaaccacacagacucaaccacaugggcauaugcucauguggucuguacaaacauccugguguaccaguuaaguggaaaagauag

SEQ ID NO: 362 - RNA, 1473 nt, Artificial Sequence
  derived and/or modified protein sequence (wt) from LASV(Lassa virus/H.sapiens-wt/NGA/2018/ISTH_1177;Clade II)__AVV65101__GPC
augggacaaauuauaacauuuuuccaggaaguaccucauguuauagaagaagugaugaacauuguccugauugcccucagccuucuggcaauauugaaagggaucuacaauguugcuaccuguggccucuuuggauugguguccuuccuucucuuauguggaagaucaugcucaacaacuuacaaagguguuuaugagcugcaaacucuagagcuggacauggcaagccuuaacaugacaaugcccuuauccugcacaaaaaauaacagccaccauuacaucaggguuggaaaugagacuggcuuagaguugacuuuaacaaauacaaguaucaucgaccacaaguucuguaaccuuucugaugcacauaaaaagaaccuuuaugaccaugcuuuaaugaguaucaucucaaccuuccacuuauccauuccuaacuuuaaucaguaugaagcaaugaguugugacuucaauggggggaagauaaguguucaguacaaccuuagccacacuuacgcuguagaugcagcuaaccacugugggacuauugcuaauggcguucuccagacuuucaugaggauggcuuggggugguaguuacauagcacuugauuccggaaaaggaagcugggauugcauaaugacuuccuaccaauauuugauaauccagaacaccacuugggaagaucacugccaguuuucucgcccauccccuaucgguuaucuggggcugcugucacaaaggaccagggacauuuacaucagucgaagacuccuugggacuuuuacuuggacccucucugauucugaaggcaaugaaacaccggguggguauugucuaacaagauggaugcugauugaggccgaauugaagugcuuuggaaacacagcaguugcgaaaugcaaugagaaacaugaugaggaguuuugugacauguuaagauuguuugacuuuaacaaacaagcuauaaggaggcugaagacagaagcacagaugaguauccaacugauaaacaaagcagugaacgcacugaucaaugaccagcugauuaugaagaaucauuuaagagauaucaugggaauuccuuacugcaauuacagcaaguacugguauuuaaaucacacuauaacagggaggacaucguuaccaagaugcuggcuugugucaaaugguuccuaccugaaugagacacauuuuucugaugacauugaacaacaagcagacaacaugauaacagaacuguugcagaaggaguacauggauaggcaagggaaaacacccuugggguuaguagaucuuuuugucuucagcaccaguuuuuaucucauuagcaucuuucuccaccuaguuaaaaucccaacucacagacauguuauaggaaaacccugcccuaaaccacacagacucaaccacaugggcauaugcucauguggucuguacaaacauccugguguaccagucaaauggaaaagauag

SEQ ID NO: 363 - RNA, 1473 nt, Artificial Sequence
  derived and/or modified protein sequence (wt) from LASV(Lassa virus/H.sapiens-wt/NGA/2018/ISTH_1375;Clade II)__AVV65115__GPC
augggacaaaucauaacauuuuuccaggaaguaccucauguuauagaggaagugaugaacauuguccugauugcucucagccuucuggcaauacugaaggggaucuacaauauugcuaccuguggccucuuuggauugguguccuuucuccucuuauguggaagaucauguucaacaacuuacaaggguguuuaugagcuacaaacucuggagcuagacauggcaagccuuaauaugacaaugcccuuaucuugcacgaagaacaacagccaccauuacaucauggucggaaaugagacuggcuuggagcugacuuuaacaaauacaaguaucaucaaccacagguuuuguaaucucucugaugcacauaaaaagaaucuuuaugaucaugcuuuaaugaguaucauuucaaccuuccacuuauccauuccuaacuuuaaucaguaugaagcaaugagcugugacuucaaugggggaaagauaaguguucaguacaaccuuagccacgcuuaugcuguagaugcagccaaccacugugggaccaucgccaauggcguucuucagacuuuuaugaggauggcuugggguggcaguuauauagcacuugauuccggaaaggggaguugggacuguauaaugacuuccuaccaauauuugauaauccaaaacaccacuugggaagaucacugccaguuuucucgcccauccccuaucgguuaccuggggcuauugucacagaggaccagggacauuuacaucagucgaaggcuccuugggacuuuuacuuggacucucucugauucugaagguaaugaaacaccggguggguauugucuaacaagauggaugcugauugaggccgaguugaaaugcuuugggaacacagcaguugcgaaaugcaaugagaaacaugaugaagaguuuugugacauguuaagauuguuugacuuuaauaaacaagcuauaaggaggcugaagacggaagcacagaugaguauccagcugauaaacaaagcagugaacgcacugaucaaugaccagcugauuaugaagaaucauuugagagauaucauggggauuccuuacugcaauuacagcaaguacugguaucuaaaucauacuguaacagggaagacaucguugccaaggugcuggcuugugucaaaugguuccuaccugaaugagacacauuuuucugaugacauugaacaacaagcagacaauaugauaacagaacugcugcaaaaggaguacauagacaggcaaggaaaaacaccuuuaggguuaguagaucuuuuugucuucagcaccagcuuuuaucucauuagcaucuuccuccaccuggucaaaaucccaacccacagacaugucauaggaaaacccugcccuaaaccacacagacuuaaccacaugggcauauguucauguggucuauacaaacauccuggugugccagucaaguggaaaagauag

SEQ ID NO: 364 - RNA, 1473 nt, Artificial Sequence
  derived and/or modified protein sequence (wt) from LASV(Lassa virus/H.sapiens-wt/NGA/2018/ISTH_1381;Clade II)__AVV65111__GPC
augggacaaauuguaacauuuuuccaggaaguaccucaugucauagaggaagugaugaacauugucuugauugcucucagccuucuggcaauacugaaagggaucuacaauguugcuaccuguggccucuuuggauugguauccuuucuucucuuguguggaagaucaugcucaacaacuuacaaggguguuuaugagcuacaaacucuagagcuagacauggcaagccuuaauaugacaaugcccuuaucuugcacgaagaacaacagccaccauuacaucauggucggaaaugagacuggcuuagagcugaccuuaacaaauacaaguauuaucaaccacaaguuuugcaaccuuucugaugcacauaaaaagaaccuuuaugaccaugcuuuaaugaguaucaucucaaccuuccacuuauccauucccaacuuuaaucaguaugaagcaaugaguugugacuucaauggggggaagauaaguguucaguacaaccuuagccacacuuaugcuguagaugcagccaaccacugugggacuaucgccaauggcguccuucagaccuuuaugaggauggcuuggggaggcagcuacauagcacuugauuccggaaaggggaguugggacuguauaaugacuuccuaccaauauuugauaauccaaaacaccacuugggaagaucacugccaguuuucucgcccauccccuaucgguuaccugggguuguugucacaaaggaccagggacauuuacaucagucgaagacuucuugggacuuuuacuuggacucuuucugauucugaaggcaaugagacaccggguggguauugucuaacaagguggaugcugauugaggccgaauugaagugcuuugggaacacagcgguugcgaaaugcaaugagaaacaugaugaagaguuuugugacauguuaagacuguuugacuuuaacaaacaagccauaaggaggcugaagacggaagcacagaugaguauccaacuaauaaacaaagcagugaacgcacugaucaaugaccaguugaucaugaaaaaucauuuaagagauaucaugggaauuccuuacugcaauuacagcaaguacugguaucuaaaucacacuguaacagggaagacaucgcugccaagauguuggcuugugucaaaugguuccuaccugaaugagacacauuuuucugaugacauugaacagcaagcagacaacaugauaacagaacuguugcaaaaggaguacauggacaggcaagggaaaacacccuuaggguuaguagaucuuuuugucuucagcaccagcuuuuaucucaucaguaucuuccuccacuugguuaaaauuccaacccacagacauguuguagggaagccuugcccuaaaccacacagacuuaaucacauggguauaugcucauguggucuguacaaacauccugguguaccagucagauggaaaagauaa

SEQ ID NO: 365 - RNA, 1473 nt, Artificial Sequence
  derived and/or modified protein sequence (wt) from LASV(Lassa virus/H.sapiens-wt/NGA/2018/ISTH_1643;Clade II)__AVV65119__GPC
auggggcaaaucauaacauuuuuccaggaagugccucaugucauugaggaggugaugaacauugucuuaauugcucucagccuucuagcaauacuaaaagggauuuacaauguugcuaccuguggccucuuuggguugguguccuuucuucucuuauguggaaggucaugcucaacaacuuacaaggguguuuaugagcuucaaacucuggagcuggauauggcaagccuuaauaugacaaugcccuuauccugcacgaagaacaacagccaccacuacaucaugguuggaaaugagacuggcuuggagcugacuuuaacaaacacaaguaucaucaaccacaaguuuugcaaccuuucugaugcacauaaaaagaaucucuaugaccaugcuuuaaugagcaucaucucaaccuuccaccuauccaucccuaacuuuaaucaguaugaagcaaugaguugugauuucaaugggggaaagauaaguguucaguacaaccucagccauacuuaugcuguggaugcagcuaaccauugugggaccauugccaauggaguccuucaaacuuuuaugaggauggcuugggguggcaguuacauagcacuugauucuggaaaagggaguugggauuguauaaugacauccuaccaauauuugauaauccaaaacaccaguugggaagaucacugccaguuuucucgcccguccccuaucgguuaucugggacuacuuucacaaagaaccagagacauuuacaucagccgaagacuccuugggacuuuuacuuggacucucucugauucugagggcaaugaaacaccggguggguauuguuuaacaagauggaugcugauugaagccgaauugaagugcuuugggaacacagcaguugcgaaaugcaaugagaaacaugaugaagaguuuugugacauguuaagguuguuugacuuuaauaaacaggcuauaaggaggcuaaagacagaagcacagaugaguauccaacuaauaaacaaagcagugaaugcauugaucaaugaccagcucauuaugaagaaucauuuaagagauaucaugggaauuccuuacugcaauuacagcaaguauugguacuuaaaccacacuguaacagggaagacgucguugccaagguguuggcuuguaucaaaugguaccuaccugaaugaaacacauuuuucugaugacauugagcaacaagcagacaacaugauaacagaauuguuacagaaagaguacauugauaggcaagggaaaacacccuuaggguugguggaucuuuuugucuucagcacuagcuucuaccuuauuagcaucuuccuccaccugguuaaaaucccaacccacagacaugucauagggaaacccugccccaagccacacagacucaaccacaugggcauaugcucauguggucuguauaaacauccugguguaccagucaaguggaaaagauaa

SEQ ID NO: 366 - RNA, 1473 nt, Artificial Sequence
  derived and/or modified protein sequence (wt) from LASV(LASV003-NIG-2008;Clade II)__AIT17580__GPC
auggggcaaaucauaacauuuuuccaggaagugccucaugucauagaagaagugaugaacauuguccugauugcccucagccuuuuggcaauauugaaagggaucuacaauguugcuacuuguggccucuuuggacugguguccuuucuucucuuauguggaagaucaugcucaacaacuuacaaagguguuuaugagcuacaaacucuagagcuagacauggcaagccuuaauaugacaaugcccuuaucuugcacaaagaauaauagccaccauuacaucauggucggaaaugaaacuggcuuagagcugacuuuaacaaauacaaguaucaucaaccacaaguuuuguaaccuuucugaugcacauaaaaagaaucuuuaugaccaugcuuuaaugagcaucaucucaaccuuccacuuauccauuccuaacuuuaaucaauaugaagcaaugaguugugacuucaauggggggaagauaaguguucaguacaaccuuagccacacuuaugcuguagaugcagcuaaccacugugggacuauugccaauggcguucuucagacuuucaugaggauggcuugggguggcagcuacauagcacuugauuccggaaaagggaguugggauuguauaaugacuuccuaccaauaucugauaauccagaacaccacuugggaagaucauugccaguuuucucgcccaucccccaucgguuaucuggggcuacugucacaaaggaccagggacauuuacaucagucgaagacuccuugggacuuuuacuuggacccucucugauucugaaagcaaugaaacuccagguggguauugucuaacaagguggauguugauugaggccgagcugaagugcuuugggaacacagcaguugcgaaaugcaaugaaaaacaugaugaagaguuuugugacaugcuaagauuguuugacuuuaacaaacaagcuauaaggaggcugaaagcagaagcacagaugagcauccaacuaauaaacaaagcagugaaugcacugaucaaugaccagcugauaaugaagaaucauuuaagagauaucaugggaauuccuuacugcaauuacagcaaauauugguacuugaaucacacuguaacagggaggacaucguuaccaagaugcuggcuugugucaaaugguuccuaccugaaugagacacauuuuucugacgacauugaacaacaagcagacaauaugauaacagaacuguugcagaaggaguacauggacaggcaagggaaaacaccuuuaggguuaguagaucuuuuugucuucagcaccagcuuuuaucucaucagcaucuuccuccaccugguuaaaaucccaacccacagacaugucauagggaaacccugcccuaaaccacacagacucaaccacaugggcauaugcucauguggucuguacaaacauccuggugugccagucaaguggaaaagauag

SEQ ID NO: 367 - RNA, 1473 nt, Artificial Sequence
  derived and/or modified protein sequence (wt) from LASV(LASV006-NIG-2008;Clade II)__AIT17584__GPC
augggacaaaucauaacauuuuuccaggaaguaccucaagucauagaggaagugaugaacauuguccugauugcucucagccuucuggcaauacugaaagggaucuacaauguugcuaccuguggccucuuuggauugguguccuuucuccucuuguguggaagaucaugcucgacaaccuacaagggcguuuaugagcuacaaacccuagagcuagacauggcaagccuuaauaugacaaugcccuuaucuugcacgaagaacaacagccaucauuacaucauggucggaaaugagacuggcuuggagcugacuuuaacaaaccaaaguauuaucaaccacaaguuuuguaaccuuucugaugcacauaaaaagaaucuuuaugaccaugcuuuaaugaguaucaucucaaccuuccacuuauccauucccaacuuuaaucaauaugaagcaaugaguugugacuucaauggaggaaagauaaguguucaguacaaccuuagccacucuuuugcuguagaugcagcuaaccacuguggaaccauugccaaugguguucuucagacuuuuaugaggauggcuugggguggcaguuacauagcacuugauuccggaaaggggaguugggacugcauaaugacuuccuaccaauauuugauaauccaaaacaccacuugggaagaucacugucaauuuucucgcccauccccuaucgguuaucuggggcuacugucacaaaggaccagggauauuuacaucagccgaaggcuucuugggacuuucacuuggacucucucugauucugaagguaaugaaacaccggguggguauugucuaacaagauggaugcugauugaggccgagcugaagugcuuugggaacacagcaguugcgaagugcaaugagaaacacgaugaagaguuuugugacauguuaagguuguuugacuuuaacaaacaagcuauaaggaggcugaagacggaagcacagaugaguauccaauuaauaaacaaagcaguaaacgcacuaaucaaugaccagcugaucaugaagaaucauuugagagauaucaugggaauucccuacugcaauuacagcaaauacugguacuuaaaucauacuaagacagggaagacaucacugccaagaugcuggcuugugucaaaugguuccuaccugaaugagacacauuuuucugaugacauugaacaacaagcagacaacaugauaacagaacuguugcaaaaggaguacauggacagacaagggaaaacacccuuaggguuaguagaucuuuuugucuucagcaccagcuuuuaucuuauuagcaucuuccuccaccugguuaaaaucccaacccauagacaugucauagggaaacccugcccuaaaccacacagacucaaccacaugggcauaugcucauguggucuguacaaacauccugguguaccaguuaaguggaaaagauag

SEQ ID NO: 368 - RNA, 1473 nt, Artificial Sequence
  derived and/or modified protein sequence (wt) from LASV(LASV035-NIG-2009;Clade II)__AIT17588__GPC
auggggcaaaucauaacauuuuuccaggaagugccucaugucauugaggaggugaugaacauugucuuaauugcucucagucuucuagcaauacugaaagggauuuacaauguugcuaccuguggccucuuuggguugguguccuuucuucucuuauguggaaggucaugcucaacaacuuacaaggguguuuaugagcuucaaacucuagagcuggauauggcaagccuuaauaugacaaugcccuuauccugcacgaagaacaacagccaccacuacaucaugguuggaaaugagacuggcuuggagcugacuuugacaaacacaaguaucaucaaccacaaguucugcaaccuuuccgaugcacauaaaaagaaucucuaugaccaugcuuuaaugagcaucaucucaacuuuccaccuauccaucccuaacuuuaaucaguaugaagcaaugaguugugacuucaauggggggaagauaaguguucaguacaaccucagccacgcuuaugcuguagaugcagcuaaccauugugggaccauugccaauggaguucuucaaacuuuuaugaggauggcuugggguggcaguuacauagcacuugauucuggaaaggggaguugggauuguauaaugacuuccuaccaauauuugauaauccaaaacaccacuugggaagaucacugccaguuuucucgcccauccccuauugguuaucuggggcuacugucacaaagaaccagggauauuuacaucagccgaagacuccuuggaacuuuuacuuggacucucucugauucugaaggcaaugaaacaccggguggauauuguuuaacaagauggaugcugauugaggccgaauuaaagugcuuugggaacacagcaguugcgaaaugcaaugagaaacaugaugaagaguuuugugacauguuaagguuguuugacuuuaacaaacaggcuauaaggaggcuaaaggcagaagcacagaugagcauccaacuaauaaacaaagcagugaacgcacugaucaaugaccagcucauuaugaagaaucauuuaagagauaucaugggaauuccuuacugcaauuacagcaaguauugguauuuaaaucacacuguaacagggaagacaucguugccaagaugcuggcuuguaucaaaugguuccuaccugaaugaaacacauuuuucugaugacauugaacaacaagcagauaacaugauaacagaauuguuacagaaagaguacauugacaggcaagggaaaacacccuuaggguugguggaucuuuuugucuucagcacuagcuucuaccuuauuagcaucuuccuccaccugguuaaaaucccaacccacagacaugucauagggaagcccugccccaagccacacagacucaaccacaugggcauaugcucauguggucuguacaaacauccugguguaccagucaaguggaaaagauag

SEQ ID NO: 369 - RNA, 1473 nt, Artificial Sequence
  derived and/or modified protein sequence (wt) from LASV(LASV042-NIG-2009;Clade II)__AIT17592__GPC
augggacaaaucauaacauuuuuccaggaagugccucaugucauagaggaagugaugaacauuguccugauugcucucagccuucuggcaauauugaaagggaucuacaauguugcuaccuguggccucuuuggauugguguccuuccuccucuuauguggaagaucaugcucaacaacuuacaaggguguuuacgaacuacaaacccuugagcuagacauggcaagccuuaauaugacaaugccccugucuugcacgaagaacaauucccaccauuacaucauggucggaaaugagacuggcuuggaauugacuuuaacaaauacaagcauuaucaaccacaaguuuugcaaccuuucugaugcacauaaaaagaaucuuuaugaccacacuuuaaugaguaucaucucaaccuuccacuuauccauuccuaacuuuaaucaguaugaagcaaugaguugugacuucaaugggggaaggauaaguguucaguacaaccuuagccacgcuuaugcuguagaugcagccaaccacugugggaccauugccaauggcguucuccaaacuuuuaugaggauggcuugggguggcaguuacauagcacuugauucuggaaaggggagcugggauugcauaaugacuuccuaccaguauuuaauaauccaaaacaccacuugggaagaucauugucaguuuucucgcccaucccccaucgguuaucuggggcugcugucgcaaaggaccagggacauuuacaucagucgaagacuucuugggacuuuuacuuggacucucucugacucugaagguaaugaaacaccggguggauauugucuaacaagauggaugcugauugaggcugaguugaagugcuuugggaacacagcaguugcaaaaugcaaugagaaacaugaugaggaguuuugugacauguugagauuguuugacuuuaacaaacaagcuauaaggaggcugaagacagaagcacagaugagcauccaacugauaaacaaagcagugaacgcacugaucaaugaccagcugauuaugaagaaccauuugagagauaucaugggaauuccuuacugcaauuacagcaaauauugguaucuaaaucacacuauaacagggaaaacaucauugccaagaugcuggcuuguaucaaaugguuccuaccugaaugagacacauuuuucugaugacauugaacaacaagcagacaacaugauaacagaacuguugcaaaaggaguacauagacaggcaaggaaaaacacccuuaggguugguagaucuuuuugucuucagcaccagcuuuuaucuuauuagcaucuuccuccaccugguuaaaaucccaacccacagacaugucguagggaaacccugccccaaaccacauagacucaaucacaugggcauaugcucaugugguuuguacaaacauccuggugugccagucaaguggaaaagauag

SEQ ID NO: 370 - RNA, 1473 nt, Artificial Sequence
  derived and/or modified protein sequence (wt) from LASV(LASV045-NIG-2009;Clade II)__AIT17596__GPC
auggggcaaaucauaacauuuuuccaggaagugccucaugucauugaggaggugaugaacauugucuuaauugcucucagccuucuagcaauacuaaaagggauuuacaauguugcuaccuguggccucuuuggguugguguccuuucuucucuuauguggaaggucaugcucaacaacuuacaaggguguuuaugagcuucaaacucuggagcuggauauggcaagccuuaauaugacaaugcccuuauccugcacgaagaacaauagccaccacuacaucaugguuggaaaugagacuggcuuggagcugacuuuaacaaacacaaguaucaucaaccacaaguuuugcaaccuuucugaugcacauaaaaagaaucucuaugaccaugcuuuaaugagcaucaucucaaccuuccaccuauccaucccuaacuuuaaucaguaugaagcaaugaguugugauuucaauggggggaagauaaguguucaguacaaccucagccauacuuaugcuguggaugcagcuaaccauugugggaccauugccaauggaguccuucaaacuuuuaugaggauggcuugggguggcaguuacauagcacuugauucuggaaaggggaguugggauuguauaaugacguccuaccaauauuugauaauccaaaacacuaguugggaagaucacugccaguuuucucgcccguccccuaucgguuaucuggggcuacuuucacaaagaaccagggacauuuacaucagccgaagacuccuuggaaccuuuacuuggacucucucugauucugagggcaaugaaacaccggguggguauuguuuaacaagauggaugcugauugaagccgaauugaagugcuuugggaacacagcaguugcgaaaugcaaugagaaacaugaugaagaguuuugugacauguuaagguuguuugacuuuaauaaacaggccauaaggaggcuaaagacagaagcacagaugaguauccaacuaauaaacaaagcagugaaugcacugaucaaugaccagcucauuaugaagaaucauuuaagagauaucaugggaauuccuuacugcaauuacagcaaguauugguacuuaaaccacacuguaacagggaagacaucguugccaagauguuggcuuguaucaaaugguuccuaccugaaugaaacacauuuuucugaugacauugagcaacaagcagacaacaugauaacagaauuguuacagaaagaguacauugauaggcaagggaaaacacccuuaggguugguggaucuuuuuguuuucagcacuagcuucuaccuuauuagcaucuuccuccaccuggucaaaaucccaacccacagacaugucauagggaaacccugccccaagccacacagacucaaccacaugggcauaugcucauguggucuguacaaacauccugguguaccagucaaguggaaaagauag

SEQ ID NO: 371 - RNA, 1473 nt, Artificial Sequence
  derived and/or modified protein sequence (wt) from LASV(LASV046-NIG-2009;Clade II)__AIT17600__GPC
augggacaaaucauaacauuuuuccaggaaguaccucaugucauagaggaagugaugaacauuguccugauugcucucagucuucuagcaauacugaaggggaucuacaauguugcuaccuguggccucuuuggauugguguccuuccuccucuuauguggaagaucauguucaacaacuuacaaggguguuuaugagcuacaaacucuggagcuagacauggcaagccuuaauaugacaaugcccuuaucuugcacgaagaacaacagccaccauuacaucaugguuggaaaugagacuggcuuggagcugacuuuaacaaauacaaguaucaucaaccacaaauuuuguaaccucucugaugcacauaaaaagaaucuuuaugaucaugcuuuaaugaguaucauuucaaccuuccacuuauccauuccuaacuuuaaucaguaugaagcaaugagcugugacuucaauggggggaagauaaguguucaguacaaccuuagccacgcuuaugcuggagaugcagccaaccacuguggaacuaucgccaaugguguucuucagacuuuuaugaggauggcuugggguggcaguuauauagcacuugauuccggaaaggggaguugggacuguauaaugacuuccuaccaauauuugauaauccaaaacaccacuugggaggaucacugccaguuuucucgcccauccccuaucgguuaccuagggcuacugucacaaaggaccagggacauuuacaucagucgaagacuucuugggacuuucacuuggacucucucugauucugaagguaaugaaacaccggguggguauugucuaacaagauggaugcugauugaggccgaguugaaaugcuuugggaacacagcaguugcgaaaugcaaugagaaacaugaugaagaguuuugugacauguuaagauuguuugacuuuaacaaacaagcuauaaggaggcuaaagacagaagcacagaugaguauccagcugauaaacaaagcagugaacgcacugaucaaugaccagcugauuaugaagaaucauuugagagauaucauggggauuccuuacugcaauuacagcaaguacugguaucuaaaucauacuguaacagggaagacaucguugccaaggugcuggcuugugucaaaugguucauaccugaaugagacacauuuuucugaugacauugaacaacaagcagacaauaugauaacagaacugcugcaaaaggaguacauagacaggcaagggaaaacaccuuuaggguuaguagaucuuuuugucuucagcaccagcuuuuaccucauuagcaucuuccuccaccugguuaaaaucccaacccacagacaugucauaggaaaacccugcccuaaaccacacagacuuaaccacaugggcauauguucauguggucuauacaaacauccuggugugccagucaaguggaaaagauag

SEQ ID NO: 372 - RNA, 1473 nt, Artificial Sequence
  derived and/or modified protein sequence (wt) from LASV(LASV049-NIG-2009;Clade II)__AIT17604__GPC
augggacaaaucauuacauuuuuccaggaaguaccucaugucauagaggaagugaugaacauuguucugauugcucucagccuucuggcaauacugaaggggaucuacaauguugcuaccuguggccuuuuuggauugguguccuuucuccucuuauguggaagaucaugcucaacaaccuauaaggguguuuaugagcuacaaacucuagagcuggacaugacaagccucaauaugacaaugcccuuaucuugcacgaagaacaauagccaccauuacaucauggucgggaaugagacuggcuuagagcugacuuuaacaaauacaaguaucaucaaccacaaguuuuguaaccuuucugaugcacauaaaaaagaucuuuaugaccaugcuuuaaugaguaucaucucaaccuuccacuuaucuaucccuaacuucaaucaauaugaggcaaugaguugugacuucaauggggggaagauaaguguucaguacaaccuuagccacacuuacgcuguagaugcagcuaaacacugugggaccaucgccaacggcguucuucagacuuucaugagaauggcuugggguggcaguuacauagcacuugauuccggaaaggggaguugggauugcauaaugaccuccuaccaauauuugauaauccaaaacacuacuugggaagaucacugccaguuuucucgcccauccccugucgguuaucuggggcugcuaucacaaaggaccagggacauuuacaucagucgaagacuucuugggacuuuuacuuggacucucucugauucugaagguaaugaaacaccggguggguauugucuaacaagauggaugcugauugaggccgaguugaaaugcuucgggaacacagcaguugcuaaaugcaaugagaaacaugaugaagaguucugugacauguuaagauuguuugacuucaacaaacaagcuauaaggagacugaagacagaagcacagaugaguauccaacugauaaacaaagcaguaaacgcacugaucaaugaccagcugaucaugaagaaucauuugagagauaucaugggaauuccuuacugcaauuauaguaaguacugguaucuaaaucacacuguuacagggaagacaucguugccaagaugcuggcuugugucaaaugguuccuaccugaaugagacacauuuuucugaugacauugaacaacaagcagacaacaugauaacagaacuguugcaaaaagaguacuuagacaggcaagggaaaacacccuuaggguuaguagaucuguuugucuucagcaccagcuuuuaucucauuagcaucuuccuccaccugguuaaaaucccaacccacagacaugucauagggaaacccugcccuaaaccacacagacucaaccacaugggcauaugcucauguggucuguacaaacacccuggugugccagucaaguggaaaagauag

SEQ ID NO: 373 - RNA, 1473 nt, Artificial Sequence
  derived and/or modified protein sequence (wt) from LASV(LASV052-NIG-2008;Clade II)__AIT17608__GPC
augggacaaaucauaacauuuuuccaggaaguaccucaugucauagaggaagugaugaacauuguccugauugcucucagccuucuggcaauacugaaagggaucuacaauguugcuaccuguggccucuuuggauugguguccuuucuccucuuauguggaagaucaugcucaacaacuuacaaggguguuuaugagcuacaaacuuuagagcuagacauggcaagccuuaacaugacaaugcccuugucuugcacgaagaacaacucccaccauuacaucauggucggaaaugagacuggccuggagcugacuuuaacaaauacaagcaucaucaaccacaaguuuuguaaccuuucugaugcacauaaaaggaaucuuuauaaccaugcuuuaaugaguaucaucucaaccuuccacuuauccauuccuaacuuuaaucaguaugaagcaaugagcugugacuucaaugggggaaagauaaguguucaguacaaucuuagccacacuuaugcuguagaugcagcuaaccacugugggaccauugccaauggcguucuucagacuuuuaugaggauggcuugggguggcaguuacauagcacuugauuccggaaaggggagcugggauugcauaaugacuuccuaccaauauuugauaauccagaacacuacuugggaagaucacugccaguuuucucgcccaucccccaucgguuaucugggguugcugucacaaaggaccagggacauuuacaucagucgaagacuucuuggaacuuucacuuggacucucucugacucugaagguaaugaaacaccggguggguauuguuuaacaagauggaugcugauugaagccgaauugaagugcuuugggaacacagcaguugcaaaaugcaaugagaaacaugaugaagaauuuugugacauguuaagauuguuugauuuuaacaaacaagcuauaaggaggcugaagacagaagcacagaugaguauucaacugauaaacaaagcagugaacgcacugauuaaugaccagcugauuaugaagaaucauuugagagauauuaugggaauuccuuacugcaauuacagcaaguauugguaucuaaaucacacugucacagggaagacaucauuaccaagaugcuggcuugugucaaaugguucuuaccugaaugagacacauuuuucugaugacauugaacaacaagcagacaacaugauaacagaacuguugcaaaaggaguacauagacaggcaagggaaaacacccuuaggguuaguagaccuuuuugucuucagcaccagcuuuuaucucaucagcaucuuccuccaccugguuaaaaucccaacccauagacauaucauagggaaacccugcccuaaaccacacagacucaaccauaugggcauauguucauguggucuguacaaacauccuggugugccagucaaguggagaagauag

SEQ ID NO: 374 - RNA, 1473 nt, Artificial Sequence
  derived and/or modified protein sequence (wt) from LASV(LASV056-NIG-2008;Clade II)__AIT17612__GPC
augggacaaaucauaacauuuuuccaggaaguaccucaugucauagaggaagugaugaacauuguccugauugcucuuagccuuuuggcaauacugaaagggaucuacaauguugcuaccuguggucucuuuggauugguguccuuucuccucuuauguggaagaucauguucaacaacuuacaaggguguuuaugagcuacaaacucuagagcuagacauggcaagccuuaacaugacaaugcccuugucuugcacgaagaacaacucccaccauuacaucagggucggaaaugagacuggcuuggagcugaccuuaacaaacacaagcauuauuaaccacaaguuuuguaaccuuucugaugcacacaaaaagaaucuuuaugaccauucuuugaugaguaucaucucaaccuuccacuuauccauuccuaacuuuaaucaguaugaagcaaugaguugugacuucaauggggggaagauaaguguucaguacaaccuuagccacaccuaugcuguggaugcggcuaaccacugcgggaccauugccaauggcguucuucagacuuuuaugaggauggcuugggguggcaguuacauagcacuugauuccggaaaggggaacugggauugcauaaugacuuccuaccaauauuugauaauccaaaacaccacuugggaagaucacugucaguuuucucgcccaucccccaucggcuaucuggggcuguugucacaaaggaccagggacauuuacaucagucgaagacuucuugggacuuuuacuuggacucucucugacucugaagguaaugaaacaccggguggguauugucuaacaagauggaugcugauugaggccgaguugaagugcuuugggaacacagcaguugcaaaaugcaaugagaaacaugaugaggaauuuugugacauguuaagauuguuugacuucaauaaacaagccauaaggagacugaagacagaagcacagaugaguauccaacugauaaacaaagcagugaacgcacugaucaaugaccagcugauuaugaagaaucacuugagagauaucauggggauuccuuacugcaauuacagcaaguauugguaucuaaaucacacuguaacagggaagacaucgcuuccaagaugcuggcuugugucaaaugguuccuaccuaaaugagacacauuuuucugaugacauugaacaacaagcggacaauaugauaacugaacuguugcagaaggaguacauagacaggcaaggaaaaacacccuugggguuaguagaucuuuuugucuucagcaccagcuuuuaucucauuagcaucuuccuccaccugguuaaaaucccaacccacagacaugucguggggaaacccugcccuaaaccacacagacucaaccacaugggcauaugcucauguggucuguacaaacauccuggugugccagucaaguggaaaagauag

SEQ ID NO: 375 - RNA, 1473 nt, Artificial Sequence
  derived and/or modified protein sequence (wt) from LASV(LASV058-NIG-2008;Clade II)__AIT17616__GPC
augggacaaaucauaacauuuuuccaggaaguaccucaugucauagaggaagugaugaacauuguccugauugcucucagucuucuggcaauacugaaggggaucuacaauguugcuaccuguggccucuuuggauugguauccuuucuccucuuauguggaagaucaugcucaacaacuuacaaggguguuuaugagcuacaaacucuagagcuagacauggcaagccuuaacaugacaaugcccuuaucuugcacgaaaaacaacucccaccauuacaucauggucggaaaugagacuggcuuggagcugaccuuaacaaauacaagcaucaucaaccacaaguuuuguaaccuuucugaugcacauaaaaagaaucucuaugaccaugccuugaugaguaucaucucaaccuuccacuuauccauuccuaacuuuaaucaguacgaagcaaugaguugugacuucaaugggggaaagauaaguguucaguacaaccuuagccacgccuaugcuguagaugcagccaaucacugugggaccauugccaauggcguucuucagacuuucaugaggauggccugggguggcaguuacauagcacuugauuccggaaaggggagcugggauugcauaaugacuuccuaccaauauuugauaauccaaaauaccacuugggaagaucacugccaguucucccgcccaucccccaucggcuaucugggguugcugucacaaaggaccagggacauuuacaucaguagaagacuucuugggaccuuuacuuggacucucucugacucugaagguaaugagacaccggguggguauugucuaacaagauggaugcuaauugaggcugaguugaagugcuuugggaacacagcaguugcaaagugcaaugagaaacaugaugaagaguuuugugacauguugagauuguuugacuucaacaaacaagcuauaaggagacugaaaacagaagcacagaugaguauccaacugauaaacaaagcagugaacgcacugaucaaugaccagcuuauuaugaagaaucacuugagggauaucaugggaauuccuuacugcaauuacaguaaauauugguaucuaaaccacacuguaacagggaagacaucgcugccaagaugcuggcuugugucaaaugguuccuaccugaaugagacacauuuuucugaugacauugaacaacaagcagacaacaugauaacagaacuguugcaaaaggaguacauagacaggcaagggaaaacacccuuaggguuaguagaucuuuuugucuucagcaccagcuucuaucucauuagcaucuuucuccacuugguuaaaaucccaacccacagacaugucauagggaaacccugcccuaaaccacacagacucaaccacaugggcauaugcucauguggucuguacaaacauccuggugugccagucaaguggaagagauag

SEQ ID NO: 376 - RNA, 1473 nt, Artificial Sequence
  derived and/or modified protein sequence (wt) from LASV(LASV063-NIG-2009;Clade II)__AIT17620__GPC
augggacaaaucauaacauuuuuccaagagguaccucaugucauagaggaagugaugaacauuguccugauugcucucagccuucuggcaauacugaaagggaucuacaauguugcuaccuguggccucuuuggguugguguccuuucuccucuuauguggaagaucaugcucaacaacuuacaaggguguuuaugagcuacaaacucuagagcuagacauggcaagccuuaauaugacaaugcccuugucuugcacgaagaacaacucccaccauuacaucauggucggaaaugagacuggccuggagcuaacuuuaacaaauacaagcauuaucagccacaaguucuguaaccuuucugaugcacauaaaaagaaucuuuaugaccaugcuuuaaugaguauuaucucaaccuuucacuuauccauuccuaacuuuaaucaguaugaagcaaugaguugugacuucaauggggggaagauaaguguucaguacaaccuuagccaugcuuaugccauagaugcagcuaaccacugugggaccguugccaauggcguucuacagacuuuuaugaggauggcuugggguggcaguuacauagcacuugauuccggaaaagggagcugggauugcauaaugacuuccuaccaauauuuaauaauccaaaacaccacuugggaagaucacugccaguuuucucgcccaucccccaucgguuaucuggggcuacugucacaaaggaccagggacauuuacaucagucgaagacuucuugggacuuucacuuggacucucucugacucugaggguaaugaaacaccggguggauauugucuaacaagauggaugcugauugaggccgaguugaagugcuuugggaacacagcaguugcaaaaugcaaugagaaacacgaugaagaguuuugugacauguuaagauuguuugacuuuaacaaacaagccauaagaaggcugaaggcagaagcacaaaugaguauccaacugauaaacaaagcagugaacgcacugaucaaugaccagcugauuaugaagaaucauuugagagauaucaugggaauuccuuacugcaauuacagcaaguauugguaucuaaaucacacuguaacagggaagacaucacugccaagaugcuggcuugugucaaauggguccuaccugaaugagacacauuuuucugacgacauugaacaacaagcagacaacaugauaacagaacuguugcaaaaggaguacauggacagacaagggaaaacacccuuaggguuaguugaucuuuuugucuucagcaccagcuuuuaucucauuagcaucuuccuccaccugguuaaaauuccaacccacagacaugucauagggaaacccugcccuaaaccacacagacucaaccauaugggcauaugcucaugugguuuguacaaacauccuggugugccagucaaguggaaaagauag

SEQ ID NO: 377 - RNA, 1473 nt, Artificial Sequence
  derived and/or modified protein sequence (wt) from LASV(LASV1000-NIG-2009;Clade II)__AIT17782__GPC
augggacaaaucauaacauuuuuccaggaaguuccucaugucauagaggaagugaugaacauuguccugauugcucucagccuccuggcaauacuaaaagggaucuacaauguugcuaccuguggccucuuuggauugguguccuuccuccucuuauguggaagaucaugcucaacaacuuacaaggguguuuaugagcugcaaacucuagagcuagacauggcaagccuuaauaugacaaugccucuaucuugcacgaagaauaacagccaccauuacaucauggucggaaaugagacuggcuuggagcugacuuuaacaaacacaaguauuaucaaucacaaguuuuguaaccuuucugaugcacacaaaaagaaucuuuaugaccaugcuuuaaugagcaucaucucaaccuuccauuuaucuauucccaacuucaaucaguaugaagcaaugaguugugacuucaaugggggaaagauaaguguucaguacaaccuuagccacacuuaugcuguagaugcagccaaccacugugggacuaucgccaauggcguccuucagaccuuuaugaggauggcuugggguggcaguuacauagcacuugauuccggaaaggggaguugggacuguauaaugacuuccuaucaauaucugauaauccaaaacaccacuugggaagaucacugccaguuuucucgcccaucuccuaucgguuaucuggggcuacugucacaaaggaccagagacauuuacaucagucgaagacuucuugggacuuucacuuggacucucucugauucugaagguaaugaaacaccggguggguacugucuaacaagguggaugcugauugaggccgaguugaagugcuuugggaacacagcaguugcgaaaugcaaugagaaacaugaugaagaguuuugugacauguuaagauuguuugacuuuaacaaacaagcuauaaagaggcugaagacagaagcacagaugaguauucaacugauaaacaaagcagugaacgcacugaucaaugaccagcugauuaugaagaaucauuugagagacaucaugggaauuccuuacuguaauuacagcaaguauugguaucuaaaucacaccguaacagggaagacaucguugccaaggugcuggcuugugucaaaugguuccuaccugaaugagacacacuuuucugaugacauugaacaacaagcagauaacaugauaacagaacuauugcaaaaggaguacauagacaggcaagggaaaacacccuuaggguuaguagaccuuuuugucuuuagcaccagcuuuuaucucauuagcaucuuccuccaccuggucaaaaucccaacccauagacaugucguagggaaacccugcccuaaaccacacagacucaaccacaugggcauaugcucauguggucuauacaaacauccugguguaccagucaaauggaaaagauag

SEQ ID NO: 378 - RNA, 1473 nt, Artificial Sequence
  derived and/or modified protein sequence (wt) from LASV(LASV1008-NIG-2009;Clade II)__AIT17786__GPC
augggacaaaucauaacauuuuuccaggaaguaccucaugucauagaagaagugaugaacauuguccugauugcccucagccuucuggcaauuuugaaagggaucuacaauguugcuaccuguggccucuuuggauugguguccuuucuucucuuauguggaagaucaugcucaacaacuuacaaagguguuuaugagcuacaaacucuagagcuagacauggcaagccuuaauaugacuaugcccuuaucuugcacaaagaauaacagccaccauuacaucauggucggaaaugagacuggcuuagagcugacuuuaacaaauacaaguaucaucaaccacaaguucuguaaccuuucugaugcacauaaaaagaaucuuuaugaccaugcuuuaaugaguaucaucucaaccuuccacuuauccauuccuaacuuuaaucaguaugaagcaaugaguugugacuucaauggggggaagauaaguguucaguacaaccuuagccacgcuuaugcuauagaugcagcugaccacugugggacuauugcuaauggcguucuucagacuuucaugaggauggcuugggguggcaguuacauagcacuugauuccggaaaagggagcugggauugcauaaugacuuccuaccaauauuugauaauccagaacaccacuugggaagaucacugccaguuuucucgcccaucccccaucgguuaucuggggcugcugucacaaaggaccagggacauuuacaucagucgaagacuccuugggacuuuuacuuggacccucucugauucugaaggcaaugaaacaccggguggguauugucuaacaagauggaugcugauugaagccgaauugaagugcuuugggaacacagcaguugcgaaaugcaaugagaaacaugaugaggaguuuugugacauguuaagauuguuugacuuuaacaaacaagcuauaaggaggcugaagacagaagcacagaugaguauccaacugauaaacaaagcagugaacgcacugaucaaugaccagcugauuaugaagaaucauuuaagagauaucaugggaauuccuuacugcaauuacagcaaguauugguauuuaaaucacacuguaacagggaagacaucguugccaagaugcuggcuugugucaaaugguuccuaccugaaugagacacauuuuucugaugacauugaacaacaagcagacaacaugauaacagaacuguugcagaaggaguacauggacaggcaagggaaaacacccuuaggguuaguagaucuuuuugucuucagcaccaguuuuuaucucauuagcaucuuucuccaccuaguuaaaaucccaacucacagacauaucacaggaaaacccugcccuaaaccacacagacucaaccacaugggcauaugcucauguggucuguacaaacauccugguguaccagucaaauggaaaagauag

SEQ ID NO: 379 - RNA, 1473 nt, Artificial Sequence
  derived and/or modified protein sequence (wt) from LASV(LASV1011-NIG-2009;Clade II)__AIT17790__GPC
augggacaaaucauaacauuuuuccaggaaguaccucauguuauagaggaagugaugaacauuguccugauugcucucagccuucuggcaauacugaaagggauuuacaauguugcuacuuguggccucuuuggauugguguccuuucuccucuuauguggaagaucaugcucaacaacuuacaaggguguuuaugagcuacaaacucuagaguuagacauggcaagccucaauaugacaaugcccuuaucuugcacgaagaacaacagccaccacuacaucauggucggaaaugagacuggcuuggagcugacuuuaacaaauacaaguauuaucaaccacaaguuuuguaaccuuucugaugcacauaaaaagaaucuuuaugaccaugcuuuaaugagcaucaucucaaccuuccacuuauccauuccuaacuucaaucaguaugaagcaaugaguugugacuuuaauggagggaagauaaguguucaguacaaccuuagccacacuuaugcuguagaugcagccaaccacugugggacuaucgccaauggcguucuucagaccuucaugaggauggccugggguggcaguuacauagcacuugauuccggaaaggggaguugggacuguauaaugacuuccuaccaauauuuaauaauccaaaacaccacuugggaagaucacugccaguuuucccgcccaucuccuauugguuaucuggggcuacugucacaaaggaccagggacauuuacaucagucggagacuucuugggacuuuuacuuggacucucucugauucugaaggcaaugaaacaccagguggguauugucugacaagauggaugcugauugaggccgaguugaagugcuuugggaacacggcaguugcgaaaugcaaugagaaacaugaugaagaguuuugugacauguuaagauuguuugacuuuaacaaacaagcuauaaggaggcugaagacagaagcacagaugaguauccaacuaauaaacaaagcagugaacgcacugaucaaugaccagcugauuaugaagaaucauuugagagauaucaugggaauuccuuacugcaauuacagcaaguacugguaucuaaaucacacuguaacagggaagacaucguugccgaggugcuggcuugugucaaaugguuccuaccugaaugagacacauuuuucugaugacauugaacaacaagcagacaacaugauaacagaacuguugcaaaaggaguauauggacaggcaagggaaaacacccuuaggguuaguagaucuuuuugucuucagcaccagcuuuuaucucauuagcaucuuccuccaccuggucaagaucccaacccacagacauaucacagggaaacccugcccuaaaccacacagacucaaccacaugggcauaugcucauguggucuauacaaacauccugguguaccaguuaaguggaaaagauag

SEQ ID NO: 380 - RNA, 1473 nt, Artificial Sequence
  derived and/or modified protein sequence (wt) from LASV(LASV1016-NIG-2009;Clade II)__AIT17798__GPC
augggacaaaucauaacauuuuuccaggaaguaccucaugucauagaggaagugaugaacauuguccugauugcucucagccuucuggcaauacugaaagggaucuacaauguugcuaccuguggccucuuuggauugguguccuuucuccuuuuauguggaagaucauguucaacaaccuacaaagguguuuaugagcuacaaacucuagagcuggacauggcaagccuuaauaugacaaugcccuuaucuugcacgaagaacaacagccaccauuacaucauggucggaaaugagacuggcuuagagcugacuuuaacaaauacaagcauuaucaaccacaaguuuuguaaccuuucugaugcacauaaaaagaaucuuuaugaccaugcuuuaaugaguaucauuucaaccuuccacuuauccauuccuaacuuuaaucaguaugaagcgaugaguugugacuucaauggggggaagauaaguguucaguacaaccuuagccacacuuaugcuguagaugcagccaaccacugugggacuaucgccaauggcguucuucagacuuuuaugaggauggcuugggguggcagcuacauagcacuugauuccggaaaagggaguugggauuguauaaugacuuccuaccaauauuugauaauccaaaacaccacuugggaagaucauugccaguuuucucgcccauccccuaucgguuaccuggggcuacuaucacaaagaaccagggacauuuacaucagucgaagacuucuugggacuuucacuuggacucucucugauucugaagguaaugaaacaccggguggguauugucuaacaagauggaugcugauugaggccgaguugaagugcuuugggaacacagcaguugcgaagugcaaugagaaacaugaugaagaguuuugugacauguuaagauuguuugacuuuaacaaacaagcuauaaugaggcugaagacagaagcacagaugaguauccaauugauaaacaaagcagugaacgcacugaucaaugaccagcugauuaugaagaaucauuugagagacaucaugggaauuccuuacugcaauuacagcaaauacugguaucuaaaucacacuguuacagggaagacaucguugccgaggugcuggcuugugucaaaugguucuuaccugaaugagacacauuuuucugaugacauugaacaacaagcagacaacaugauaacagaaauguugcaaaaggaguacuuagacaggcaagggaaaacacccuuaggguuaguagaucuuuuugucuuuagcaccagcuuuuaucucauuagcaucuuccuccaccuggucaaaaucccaacccacagacacaucauagggaaacccugccccaaaccgcacagacucaaccacaugggcauaugcucauguggucuauacaaacauccugguguaccagucaaguggaaaagauaa

SEQ ID NO: 381 - RNA, 1473 nt, Artificial Sequence
  derived and/or modified protein sequence (wt) from LASV(LASV221-NIG-2010;Clade II)__AIT17624__GPC
augggacaaaucauaacauuuuuccaggaaguaccucaugucauagaggaagugaugaacauuguccugauugcucucagccuucuggcaauacugaaagggaucuacaauguugcuaccuguggccucuuuggauugguguccuuccuccucuuauguggaagaucaugcucaacaacuuacaaggguguuuaugagcuacaaacucuagagcuagacauggcaagccuuaauaugacaaugcccuuaucuugcacgaagaacaacucccaccauuacaucauggucggaaaugagacuggcuuggagcugacuuugacaaauacaagcauuaucaaccacaaguuuuguaaccuuucugaugcgcauaaaaagaaucuuuaugaccaugcuuuaaugaguaucaucucaaccuuccacuuguccauuccuaacuuuaaucaguaugaagcaaugaguugugauuucaaugggggaaagauaaguguucaguacaaccuuagccacacuuaugcuauagaugcagccaaccacugugggaccauugccaauggcguucuucagacuuucaugagaauggcuugggguggcaguuacauagcacuugauuccggaaaggggagcugggauugcauaaugacuuccuaccaauauuugauaauccaaaacaccacaugggaagaucacugccaguuuucucgcccaucccccaucgguuaucuggggcuacuaucacaaagaaccagggacauuuacauuagucgaagacuucuugggacuuucacuuggacucucucugacucugaagguaaugaaacaccggguggguauugucuaacaagauggaugcugauugaggccgaguugaagugcuuuggaaacacagcaguugcaaaaugcaaugaaaaacaugaugaagaguuuugugauauguugagauuguuugacuucaacaaacaagcuauaaggaggcuaaagacagaagcacagaugaguauccaacugauaaacaaagcggugaacgcacugaucaaugaccagcugaucaugaagaaucauuugagagauaucaugggaauuccuuacugcaauuacagcaaguauugguaucuaaaucacacuguaacagggaagacaucguugccaagaugcuggcuugugucgaaugguucuuaccugaaugagacacauuuuucugaugacauugaacaacaagcagacaacaugauaacagaaauguugcaaaaggaguacauggacaggcaagggaaaacacccuuaggguuaguagaucuuuuugucuucagcaccagcuuuuaucucauuagcaucuuccuccaccuaguuaaaauuccaacccacagacaugucauagggaaacccugcccuaaaccacacagacucaaccacaugggcauauguucauguggucuguauaagcauccuggcgugccagucaaguggaaaagauag

SEQ ID NO: 382 - RNA, 1473 nt, Artificial Sequence
  derived and/or modified protein sequence (wt) from LASV(LASV224-NIG-2010;Clade II)__AIT17626__GPC
augggacaaaucauaacauuuuuccaggaaguaccucaugucauagaggaagugaugaacauugucuugauugcucuuagccuucuggcaauacugaaaggagucuacaauguugcuaccuguggccucuuuggauugguguccuuucuccuccuauguggaagaucaugcucaacaacuuacaaggguguuuaugagcuacaaacucuagagcuagauauggcaagccuuaauaugacaaugcccuuaucuugcacgaagaacaacucccaccacuacaucaugguuggaaaugaaacuggcuuggagcugacuuuaacaaacacaaguauuauccagcacaaguuuuguaaccuuucugaugcacauaaaaagaaucuuuaugaccaugcuuuaaugagcaucaucucaaccuuccauuuauccauuccaaacuuuaaucaguaugaagcaaugagcugugacuucaauggagggaagauaacuguucaguacaaccuuagccacucuuaugcuauagaugcagcaaaccacugugggacuauugccaauggcguucuucagacuuuuaugaggauggcuugggguggcaguuacauagcacuugauucuggaaagggaagcugggauugcauaaugacuuccuaccaauauuugauaauccaaaacaccacuugggaagaucacugccaguuuucucgcccaucccccaucgguuaucuggggcuacugucacaaaggaccagggacauuuacaucagucgaagacuucuugggacuuuuacuuggacucucucugauucugaagguaaugaaacaccggguggguauugucuaacaagguggaugcugauugaggcagaguuaaagugcuuugggaacacagcaguugcgaaaugcaaugagaaacaugaugaagaguuuugugacauguugagauuguuugacuuuaacaaacaagcuauaaggaggcugaagacagaagcacaaaugaguauccaacugauaaacaaagcagugaacgcacugaucaaugaccagcugauuaugaagaaucauuugagggauauuaugggaauuccuuacugcaauuacagcaaguauugguaucuaaaucacacuguaacagggaggacaucguugccaagaugcuggcuugugucaaaugguuccuaccuaaaugagacacauuuuucugaugacauugaacaacaagcagauaacaugauaacagaacuguugcaaaaggaguacauggacaggcaagggaaaacacccuuaggguuaguagaucuuuuugucuucagcaccagcuuuuaucucauuagcaucuuccuccaccugguuaaaaucccaacccacagacacaucauagggaaacccugcccuaaaccacacaggcucaaccacaugggcguaugcucauguggucuguacaaacacccuggugugccagucaaguggaaaagauag

SEQ ID NO: 383 - RNA, 1473 nt, Artificial Sequence
  derived and/or modified protein sequence (wt) from LASV(LASV225-NIG-2010;Clade II)__AIT17630__GPC
auggggcaaaucauaacauuuuuccaagaagugccucaugucaucgaggaagugaugaacauuguccuaauugcucucagccuucuagcaauacuaaaagggauuuacaauguugcuaccuguggccucuuuggguugcuguccuuucuucucuuauguggaaggucaugcucaacaacuuacaaggguguuuaugagcuucaaacucuggagcuggauauggcaagccucaauaugacaaugcccuuauccugcacgaagaacaacagccaccacuacaucaugguuggaaaugagacuggcuuggagcuaacuuuaacaaacacaaguaucaucaaccacaaguucugcaaccuuucugaugcacauaaaaagaaucucuaugaccaugcuuuaaugagcaucaucucgaccuuccacuuauccaucccuaacuuuaaucaguaugaagcaaugaguugugacuucaaugggggaaagauaaguguucaguacaaccucagccaugcuuaugcuguggaugcagcugagcauugugggaccauugccaauggaguccuucaaacuuuuaugaggauggcuugggguggcagcuacauagcacuugauucuggaaaggggaguugggauuguguaaugacguccuaccaauauuugauaauccaaaacaccaguugggaagaucacugccaguuuucucgcccguccccuaucgguuaucuggggcuacugucacaaagaaccagggacauuuacaucagucgaagacuccuuggaacuuuuaccuggacucucucugauucugagggcaaugaaacaccggguggguauuguuuaacaagauggaugcugauugaggccgaauuaaagugcuuugggaacacagcaguugcgaaaugcaaugagaaacaugaugaagaguuuugugacauguuaagguuguuugacuuuaacaaacaggcuauaaggagguuaaagacagaagcacagaugaguauccaacuaauaaacaaagcagugaacgcacugaucaaugaccagcucauuaugaagaaucauuuaagagauaucaugggaauuccuuacugcaauuacagcaaguauugguauuuaaaccauacuguaacagggaagacaucguugccaagaugcuggcuuguaucaaaugguuccuaccugaaugaaacacauuuuucugaugacauugagcaacaagcagacaacaugauaacagaauuguugcagaaagaguacauugacaggcaagggaaaacacccuuaggguugguggaucuuuuugucuucagcacuagcuuuuaccuuauuagcaucuuccuccaccuggucaaaaucccaacccacagacaugucauagggaaacccugccccaagccacacagacucaaccacaugggcauaugcucauguggucuguacaaacauccugguguaccagucaaguggaaaagauag

SEQ ID NO: 384 - RNA, 1473 nt, Artificial Sequence
  derived and/or modified protein sequence (wt) from LASV(LASV229-NIG-2010;Clade II)__AIT17634__GPC
augggacaaaucauaacauuuuuccaggaaguaccucaugucauagaggaagugaugaacauuguucugauugcucucagccuucuggcgauacugaaggggaucuacaauguugcuaccuguggccucuuugggcugguguccuuucuccucuuaugugggagaucauguucaacaauuuacaaggauguuuaugagcuacaaacccuagagcuggauauggcaagccucaacaugacaaugcccuuaucuugcacgaagaacaacagccaccauuacaucaugguuggaaaugagacuggcuuggaacugacuuuaacaaauacaaguauuaucaaccacaaguuuuguaaccuuucugaugcgcauaaaaagaaucuuuaugaccaugcuuuaaugaguaucaucucaaccuuccacuuauccauuccuaacuucaaucaguaugaagcaaugaguugugacuuuaaugggggaaagauaaguguucaguacaaccuuagccacacuuaugcuauagaugcagcuaaccacugugggacuaucgcuaauggcguucuucagacuuucaugaggauggcuugggguggcaguuacauagcacuugauuccggaaaggggaguugggauuguauaaugacuuccuaccaauacuugauaauccaaaacaccacuugggaagaucacugccaguuuucucgcccauccccuauugguuaucugggcuuacugucgcaaaggaccagggacauuuacaucagucgaagacuucuugggacuuuuacuuggacccucucugauucugaagguaaugaaacaccggguggguauugucuaacaagauggaugcugauugaggccgaguugaagugcuuugggaacacagcagucgcgaaaugcaaugaaaaacaugaugaagaguuuugugacauguuaagauuguuugacuuuaacaaacaagcuauaaggaggcugaagacggaagcacagaugaguauccaacugauaaacaaagcagugaacgcauugaucaaugaucagcugauuaugaaaaaucauuugagagauaucaugggaauuccuuacugcaauuacagcagguauugguaucuaaaucacacugugacagggaggacaucguugccaaggugcuggcuugugucaaacgguuccuaccugaaugagacacauuuuucugaugacauugaacagcaagcagacaacaugauaacagaacuguugcaaaaggaguacauggacagacaagggaaaacacccuuaggguuaguggaucuuuuugucuucagcaccagcuuuuaucucauuagcaucuuccuccaccugguuaaaaucccaacccacagacaugucauagggaaacccugcccuaaaccacauagacucaaccacaugggcauaugcucauguggucuauacaaccauccuggugugccagucaaauggaaaagauag

SEQ ID NO: 385 - RNA, 1473 nt, Artificial Sequence
  derived and/or modified protein sequence (wt) from LASV(LASV237-NIG-2010;Clade II)__AIT17638__GPC
augggacaaaucauaacauuuuuccaggaaguaccucaugucauagaggaagugaugaacauuguccugauugcucucagccuucuggcaauacugaaggggaucuacaauguugccaccuguggccuauuuggacugguguccuuucuccucuuauguggaagaucaugcucaacaacuuauaaggguguuuaugagcuacaaacucuagagcuggauauggcaagccuuaauaugacaaugccccuaucuugcacaaagaacaacagucaccauuacaucauggucggaaaugagacuggcuuggagcugacuuuaacaaauacaaguauuaucaaccacaaguuuuguaaccuuucugaugcacauaaaaaggaucucuaugaccaugcuuuaaugaguaucaucucaaccuuccacuuaucuauuccuaauuuuaaucaguaugaagcaaugaguugugacuucaauggggggaagauaaguguucaguacaaccuuagccacacuuaugcuguagaugcagccaaucacugugggacuaucgccaauggcguucuucagacuuuuaugaggauggcuugggguggcaguuacauagcacuugauuccggaaaggggaguugggauuguauaaugacuuccuaccaauauuugauaauccagaacaccacuugggaagaucacugccaguuuucucgcccauccccuaucgguuaucuggggcuacugucacaaaggaccagagacauuuacaucagucgaagacuucuugggacuuuuacuuggacucucucugauucugaagguaaugaaacaccggguggguacugucuaacaagauggaugcugauugaggccgaguugaagugcuuugggaacacagcaguugcgaaaugcaaugagaaacaugaugaagaguuuugugacauguuaagacuguuugauuucaacaaacaagcuauaaggaggcuaaagacagaagcacagaugaguauccaacugauaaacaaagcagugaaugcauugaucaaugaccagcuuauuaugaagaaucacuugagagauaucaugggaauuccuuacugcaauuacagcaaguacugguaucugaaucacacuguaacagggaagacaucguugccgaggugcuggcuugugucaaaugguuccuaccugaaugagacacauuuuucugaugacauugaacaacaggcagacaacaugauaacagaacuguugcaaaaggaguacauggacaggcaagggaaaacacccuuaggguuaguagaccuuuuugucuucagcaccagcuuuuaucucauuagcaucuuccuccaccugaucaaaaucccaacccacagacauaucacagggaaacccugcccuaaaccacacagacuuaaccacaugggcauaugcucauguggucuauacaaacauccugguguaccagucaaguggaaaagauag

SEQ ID NO: 386 - RNA, 1473 nt, Artificial Sequence
  derived and/or modified protein sequence (wt) from LASV(LASV239-NIG-2010;Clade II)__AIT17642__GPC
augggacaaaucauaacauuuuuccaagaaguaccucaugucauagaggaagugaugaacauuguccugauugcccucagccuccuggcaauacugaaaggggucuacaauguugccaccuguggccucuuuggacugguguccuuucuccucuuauguggaagaucaugcucaacaacuuacaaggguguuuaugagcuacagacucuagagcuagacauggcaagccuuaauaugacaaugcccuuaucuugcacgaagaacaacagccaucauuacaucauggucggaaaugauacuggcuuggagcugacuuuaacaaauacaaguauuaucaaccacaaguucugcaaccuuucugaugcacacaaaaagaaucuuuaugaccaugcuuuaaugaguaucauuucaaccuuccacuuaucuauuccuaacuuuaaucaguaugaagcaaugaguugugacuucaaugggggaaagauaaguguucaauacaaccuuagccacgcuuaugcuguagaugcagcuagccacugugggaccauugccaauggcguucuucagacuuuuaugaggauggcuugggguggcaguuacauagcacuugauuccgguaaggggaguugggauuguauaaugacuuccuaccaauauuugauaauccaaaacacuacuugggaagaucacugccaguuuucccgcccauccccuaucgguuaccuggggcuacugucacaaaggaccagggacauuuacaucagucgaagacuucuugggacuuuuacuuggacucucucugauucugaggguaaugaaacaccggguggguauugucugacaagauggaugcuaauugaggccgagcugaagugcuuugggaacacagcaguugcaaaaugcaaugagaaacaugaugaagaguuuugugacauguuaagguuguuugacuuuaacaagcaagcuauaaggagacugaagacagaagcgcagaugaguauccaauugauaaacaaagcagugaacgcacugauaaaugaccaacugaucaugaagaaucauuugagagauaucaugggaauuccuuacugcaauuacagcaaguacugguaccuaaaucacacuguaacagggaaaacaucguugccaagaugcuggcuugugucaaaugguuccuaccugaaugagacacauuuuucugaugacauugaacaacaagcagacaacaugauaacagaacuguugcaaaaggaguacauggacaggcaagggaaaacacccuuaggguuaguagaucuuuuugucuucagcaccaguuuuuaucucauuagcaucuuccuccaccuaguuaaaaucccaacccauagacauauuauagggaaacccugcccuaaaccacacagacucaaccacaugggcauaugcucauguggucuguacaaacauccugguguaccaguuaaguggaaaagauag

SEQ ID NO: 387 - RNA, 1473 nt, Artificial Sequence
  derived and/or modified protein sequence (wt) from LASV(LASV241-NIG-2011;Clade II)__AIT17646__GPC
auggggcaaaucauaacauucuuccaggaaguaccucaugucauagaggaagugaugaacauuguccugauugcccucagccuucuggcaauauugaaaggaaucuacaauguugcuaccuguggccucuuuggauugguguccuuucuccucuuauguggaagaucaugcucaacaacuuacaaagguguuuaugagcugcaaacucuagaacuagacauggcaagccuuaauaugacaaugcccuuaucuugcacaaagaauaacagccaucauuacaucauggucgggaaugagacuggcuuagagcugaccuuaacaaauacaaguaucauuaaccacaaguuuuguaaccucucugaugcacauaaaaagaaucuuuaugaccaugcuuuaaugaguaucaucucaacuuuccacuuauccauuccuaauuuuaaucaguaugaagcaaugaguugugacuucaauggggggaagauaaguguucaguacaaccuuagccacgcuuaugcuguagaugcagccagccacugugggaccguugccaauggcguucuucagacuuucaugaggauggcuugggguggcaguuacauagcacuugauuccgggaaagggaguugggauuguauaaugacuuccuaccaauauuugauaauccagaacaccaccugggaagaccacugccaguuuucucguccaucccccaucgguuaucuggggcuacugucacaaaggaccagggacauuuacaucagucgaagacuccuugggacuuuuacuuggacccucucugauucugaaggcaaugagacaccggguggauauugucuaacaagauggaugcugauugaggccgaauugaagugcuuugggaacacagcaguugcgaagugcaaugagaaacaugaugaagaguuuugugacauguuaagauuguuugacuuuaacaaacaagcuauaaggaggcugaagacagaagcacagaugaguauccaacugauaaacaaagcagugaacgcacugaucaacgaccagcugauuaugaagaaucauuuaagagauaucaugggaauuccuuacugcaauuacagcaaauauugguauuuaaaucacacuguaacagggaagacaucguugcccagaugcuggcuugugucaaaugguuccuaccugaaugagacacauuuuucugaugacauugaacaacaagcagacaacaugauaacagaacuguugcagaaggaguacauggacaggcaagggaaaacacccuuaggguuaguagaucuuuuugucuuuagcaccagcuuuuaucucauuagcaucuuccuccaccugguuaaaaucccaacucacagacaugucauagggaaacccugcccuaaaccacacagacucaaccacaugggcauaugcucauguggucuguacaaacauccugguguaccagucaaauggaaaagauag

SEQ ID NO: 388 - RNA, 1473 nt, Artificial Sequence
  derived and/or modified protein sequence (wt) from LASV(LASV242-NIG-2010;Clade II)__AIT17650__GPC
auggggcaaaucauaacauuuuuucaggaagugccucaugucauagaagaagugaugaacauuguccugauugcccucagccuucuggcaauauugaaagggaucuacaauguugcuacuuguggccucuuuggacugguguccuuucuucucuuauguggaagaucaugcucaacaacuuacaaagguguuuaugagcuacaaacucuagagcuagacauggcaagccuuaauaugacaaugcccuuaucuugcacaaagaauaauagccaccauuacaucauggucggaaaugaaacuggcuuagagcugacuuuaacaaauauaaguaucaucaaccacaaguuuuguaaccuuucugaugcacauaaaaagaaucuuuaugaccaugcuuuaaugagcaucaucucaaccuuccacuuauccauuccuaacuucaaucaauaugaagcaaugaguugugacuucaauggggggaagauaaguguucaguacaaccuuagccacacuuaugcuguagaugcagcuaaccacugugggaccauugccaauggcguucuucagacuuucaugaggauggcuugggguggcagcuacauagcacuugauuccggaaaagggaguugggauuguauaaugacuuccuaccaauauuugauaauccagaacaccacuugggaagaucacugccaguuuucucgcccaucccccaucgguuaucuggggcuacugucacaaaggaccagggacauuuacaucagucgaagacuccuugggacuuuuacuuggacccucucugauucugaaggcaaugaaacuccagguggguauugucuaacaagguggauguugauugaggccgaguugaagugcuucgggaacacagcaguugcgaaaugcaaugagaaacaugaugaagaguuuugugacaugcuaagauuguuugacuucaauaaacaagcuauaaggagacugaaagcagaagcacagaugaguauccaacuaauaaacaaagcagugaaugcacugaucaaugaccagcugauaaugaagaaucauuuaagagauaucaugggaauuccuuacugcaauuacagcaaguauugguauuugaaucacacuguaacaggaaggacaucguuaccaagaugcuggcuugugucaaaugguuccuaccugaaugagacacauuuuucugacgacauugaacaacaagcagacaacaugauaacagaacuguugcagaaggaguacauagacaggcaagggaaaacaccuuuaggguuaguagaucuuuuugucuucagcaccagcuuuuaucucaucagcaucuuccuccaccugguuaaaaucccaacccacagacauaucauagggaaacccugcccuaaaccacacagacucaaccacaugggcauaugcucauguggucuguacaagcauccuggugugccagucaaguggaaaagauag

SEQ ID NO: 389 - RNA, 1473 nt, Artificial Sequence
  derived and/or modified protein sequence (wt) from LASV(LASV246-NIG-2010;Clade II)__AIT17658__GPC
augggacaaaucauaacauucuuucaggaaguaccucaugucauugaggaagugaugaacauuguccugauugcccucagccuucuagcaauacugaaagggguuuacaauguugcuaccuguggccucuuuggauugguguccuuucuccucuuauguggaaggucaugcucaauaacuuacaaggguguuuaugagcuacaaacucuagagcuagacauggcaaaccuuaauaugacaaugcccuuaucuugcacgaagaacaacagccaucauuacaucauggucggaaaugagacuggcuuagagcugacuuuaacaaauacaaguaucaucaaccacaaguuuuguaaccuuucugaugcacauaaaaagaaucuuuaugaccaugcuuuaaugaguaucaucucaaccuuccacuuauccauuccuaacuuuaaucaguaugaggcaaugaguugugacuucaaugggggaaagauaaguguucaguacaaccucagccacacuuaugcuggagaugcagcugaccacugugggaccauugccaauggcguucuucagacuuuuaugagaauggcuugggguggcaguuacauagcacuugauucuggaaaggggaguugggauuguauaaugacuuccuaccaauauuugauaauccaaaacaccacuugggaagaucacugccaguuuucccgcccauccccuauggguuaucugggguugcugucacaaaggaccagggauauuuacaucagucgaagacuccuuggaacuuuuacuuggacucucucugauucugaagguaaugaaacaccggguggguauugucuaacaagauggaugcugauugaggcagaguugaagugcuuugggaacacagcaguugcgaaaugcaaugagaaacaugaugaagaguuuugugacauguuaagguuguuugauuucaacaaacaagcuauaaggaggcugaagacagaggcacaaaugagcauucaacugauaaacaaagcagugaacgcacugaucaaugaccagcuaaucaugaagaaucauuugagagauaucaugggaauuccuuacugcaauuacagcaaguauugguaucuaaaucacacuauaacagggaaaacaucguugccaagaugcuggcuugugucaaaugguuccuaccugaaugaaacacauuuuucugaugacauugaacaacaagcagacaacaugauaacagaacuguugcagaaggaguacauagacagacaagggaaaacacccuuaggguugguggaucucuucgucuucagcaccagcuuuuaucucauuagcaucuuccuccacuugguuaaaaucccaacucacaggcauaucacagggaaacccugcccuaaaccacacagacucaaccacaugggcauaugcucaugugguuuguacaaacaucccgguguaccaguuagauggaaaagauag

SEQ ID NO: 390 - RNA, 1473 nt, Artificial Sequence
  derived and/or modified protein sequence (wt) from LASV(LASV251-NIG-2010;Clade II)__AIT17666__GPC
auggggcagaucguaacauuuuuccaggaaguaccucaugucauagaagaggugaugaacauuguccugauugcccucagccuucuggcaauauuaaaagggaucuacaauguugcuaccuguggucucuuuggauugguguccuuucuucucuuauguggaagaucaugcucaacaacuuacaaagguguuuaugagcuacaaacucuagagcuagacauggcaagccuuaauaugacaaugcccuuauccugcacgaagaacaacagccaucauuacaucauggucggaaaugagacuggcuuagagcugaccuuaacgaauacaaguaucaucaaccacaaguuuuguaaccuuucugaugcacauaaaaagaaucuuuaugaccaugcuuuaaugaguaucaucucaaccuuccacuuauccauuccuaacuuuaaucaguaugaagcaaugagcugugacuucaauggggggaagauaaguguucaguacaaccuuagccacacuuaugcuguagaugcagcuaaccacugugggaccauugccaauggcguucuucagacuuucaugaggauggcuugggguggcaguuacauagcacuugauuccggaaaagggaguugggauuguauaaugacuuccuaccaauauuuaauaauccagaacaccacuugggaagaucacugccaguuuucucguccaucccccaucgguuaucuggggcuacugucacaaagaaccagggacauuuacaucagucgaaggcuccuugggacuuuuacuuggacccucucugauucugaaggcaaugaaacaccggguggguauugucuaacaagauggaugcugauugaggccgaguuaaagugcuuugggaacacagcaguugcaaaaugcaaugagaaacaugaugaagaguuuugugacauguuaagacuguuugauuucaacaaacaagcuauaaggaggcugaagacagaagcacagaugaguauccagcuaauaaacaaagcagugaacgcacugaucaaugaccagcugauuaugaagaaucaucuaagagauaucaugggaauuccuuacugcaauuacagcaaguauugguauuuaaaucacacuguaacagggaagacaucguugccaagaugcuggcuugugucaaaugguuccuaccugaaugagacacauuuuucugaugacauugaacaacaagcagacaacaugauaacagaacuguugcagaaggaguacauggacaggcaagggaaaacacccuuaggguuaguagaucuuuuugucuucagcaccagcuuuuaucucauuagcaucuuccuccaccugguuaaaaucccaacccacagacauaucacaggaaaacccugccccaagccacacagacucaaccacaugggcauaugcucauguggucuguacaaacauccugguguaccagucaaguggaaaagauag

SEQ ID NO: 391 - RNA, 1473 nt, Artificial Sequence
  derived and/or modified protein sequence (wt) from LASV(LASV253-NIG-2011;Clade II)__AIT17670__GPC
auggggcaaaucauaacauuuuuucaggaagugccucaugucauagaagaagugaugaacauuguccugauugcccucagccuucuggcaauauugaaagggaucuacaauguugcuacuuguggccucuuuggacugguguccuuucuucucuuauguggaagaucaugcucaacaacuuacaaagguguuuaugagcuacaaacucuagagcuagacauggcaagccuuaauaugacaaugcccuuaucuugcacaaagaauaauagccaccauuacaucauggucggaaaugaaacuggcuuagagcugacuuuaacaaauacaaguaucaucaaccacaaguuuuguaaccuuucugaugcacauaaaaagaaucuuuaugaccaugcuuuaaugagcaucaucucaaccuuccacuuauccauuccuaacuucaaucaauaugaagcaaugaguugugacuucaauggggggaagauaaguguucaguacaaccuuagccacacuuaugcuguagaugcagcuaaccacugugggacuauugccaauggcguucuucagacuuuuaugaggauggcuugggguggcagcuacauagcacuugauuccggaaaagggagcugggauuguauaaugacuuccuaccaauauuugauaauccagaacaccacuugggaggaucacugccaguuuucucgcccaucccccaucgguuaucuggggcuacugucacaaaggaccagggacauuuacaucagucgaagacuccuuggaacuuuuacuuggacccucucugauucugaaggcaaugaaacuccagguggguauugucuaacaagguggauguugauugaggccgaguugaagugcuuugggaacacagcaguugcgaaaugcaaugagaaacaugaugaagaguuuugugacaugcuaagauuguuugacuuuaauaaacaagcuauaaggagacugaaagcagaagcacagaugaguauucaacuaauaaacaaagcagugaaugcacugaucaaugaccagcugauaaugaagaaucauuuaagagauaucauggggauuccuuacugcaauuacagcaaguauugguaucugaaucacacuguaacaggaaggacaucguuaccaagaugcuggcuugugucaaaugguuccuaccugaaugagacacauuuuucugacgacauugaacaacaagcagacaacaugauaacagaacuguugcagaaggaguacauagacaggcaagggaaaacaccuuuaggguuaguggaucuuuuugucuucagcaccagcuuuuaucucaucagcaucuuccuccaccugguuaaaaucccaacccacagacauaucauagggaaacccugcccuaaaccacacagacucaaccacaugggcauaugcucauguggucuguacaaacauccuggugugccaguuaaguggaaaagauag

SEQ ID NO: 392 - RNA, 1473 nt, Artificial Sequence
  derived and/or modified protein sequence (wt) from LASV(LASV254-NIG-2011;Clade II)__AIT17674__GPC
augggacaaaucauaacauuuuuccaggaaguaccucaugucauagaggaagugaugaacauuguucugauugcucucagccuucuggcaauauugaaagggaucuacaauguugcuaccuguggccucuuuggauugguguccuuucuucucuuauguggaagaucaugcucaacaacuuacaaggguguuuaugagcuacaaacucuagagcuagacaugacaaaccucaauaugacaaugccuuuauccugcacgaaaaacaacagccaccauuacaucauggucggaaaugagacuggucuggagcugacuuuaacaaauacaagcaucaucaaccacaaguuuuguaaccuuucugaugcacauaaaaagaaucuuuauaaccaugcuuuaaugaguauuauuucaacuuuccacuuauccauuccuaacuuuaaucaguaugaagcaaugaguugugacuucaaugggggcaagauaaguguccaguacaaccuuagccauaguuaugcuguggaugcagcuaaccacugugggaccauugccaauggcgugcuucagacuuuuaugaggauggcuugggguggcaguuacauagcacuugauuccggaaaggggaauugggauuguauaaugaccuccuaccaauauuugauaauccaaaacaccacuugggaagaucacugucaguuuucucgcccauccccuauugguuaucugggguuacugucacaaaggaccagggacauuuacaucagucgaagacuucuugggacuuuuacuuggacucucucugauucugaagguaaugaaacaccagguggguauugucuaacaagauggaugcugauugaggccgaguugaagugcuuugggaacacagcaguugcgaaauguaaugagaaacaugaugaggaguuuugugacauguuaagauuguuugacuuuaacaaacaagcuauaaggaggcugaagacagaggcacaggcgaauauccaacugauaaauaaagcagugaacgcacugaucaaugaccagcugaucaugaagaaucauuugagagauaucaugggaauuccuuacugcaauuacagcaaguauugguacuuaaaucacacuguaacagggaagacaucguugccaagaugcuggcuugugucaaauggcuccuacuugaaugagacacauuuuucugaugacauugaacaacaagcagacaauaugauaacagaacuguugcagaaggaguacauggacaggcaagggaaaacacccuuaggguugguagaucuuuuugucuucagcaccagcuuuuaucucauuagcaucuuccuccaccugguuaaaaucccaacccacagacaugucauagggaaacccugcccuaaaccacacagacucaaccacaugggcauaugcucauguggucuguacaaacauccugguguaccagucaaguggaaaagauag

SEQ ID NO: 393 - RNA, 1473 nt, Artificial Sequence
  derived and/or modified protein sequence (wt) from LASV(LASV256-NIG-2010;Clade II)__AIT17678__GPC
augggacaaaucauaacauuuuuccaggaaguaccucaugucauagaggaaguuaugaacauuguccugaucacucucagccuucuggcaauacugaaagggaucuacaauauugcuaccuguggccucuuuggauugguguccuuucuccucuuauguggaagaucauguucaacaacuuacaagggugucuaugagcuacaaacuuuagagcuagauaugacaagccuuaauaugacaaugcccuugucuugcacgaagaacaauucccaccauuacaucauggucgggaaugagacuggccuggagcugacuuuaacaaauacaagcauuaucaaccacaaguuuugcaaccuuucugaugcacacaaaaagaaucuuuaugaucaugcuuuaaugaguaucauuucaaccuuccacuuauccauuccuaacuuuaaucaguaugaagcaaugaguugugauuucaauggggggaagauaaguguucaguacaaccuuagccacacuuaugcuguagaugcagcuaaccacugugggaccauugccaauggcguucuucagacuuuuaugaggauggcuugggguggcaguuauauagcacuugauuccggaaaggggagcugggauugcauaaugacuuccuaccaauauuugauaauccaaaacaccacuugggaagaucacugccaguuuucucgcccaucccccaucgguuaucuggggcugcugucacaaagaaccagggacauuuacaucagucgaagacuucuuggaacuuuuaccuggacucucucugacucugaaggcaaugaaacaccggguggguauugucuaacaagauggaugcugauugaggcugaguugaagugcuuugggaacacagcagucgcaaaaugcaaugagaaacaugaugaagaauuuugugacauguuaagauuguuugacuucaacaaacaagcuauaaggaggcugaagacagaagcacagaugaguauccagcugauaaacaaagcagugaacgcacugauuaaugaccagcugauuaugaagaaucacuugagagauauuaugggaauuccuuacugcaauuacagcaaguauugguaucuaaaucacacuguaacagggaagacaucgcuaccaagaugcuggcuugugucaaaugguuccuaccugaaugagacacauuucucugaugacauugaacaacaagcagacaacaugauaacagaacuguugcaaaaggaguacauagacaggcaagggaaaacacccuuaggguuaguagaccuuuuugucuucagcaccagcuuuuaucucauuagcaucuuccuccaccugguuaagaucccaacccacagacauaucauagggaaacccugccccaaaccacacagacucaaccauaugggcauauguucauguggucuguacaaacauccugguauaccagucaaguggaaaagauag

SEQ ID NO: 394 - RNA, 1473 nt, Artificial Sequence
  derived and/or modified protein sequence (wt) from LASV(LASV267-NIG-2010;Clade II)__AIT17686__GPC
augggacaaaucauaacauuuuuccaagaaguaccucaugucauagaggaagugaugaacauugucuuaauugcucucagccuucuggcaauacugaaagggauauacaauguugcuaccuguggccucuuuggauugguguccuuucuccucuuauguggaagaucaugcucaacaacuuacaaggguguuuaugagcuacaaacucuggagcuggacauggcgagccuuaauaugacaaugcccuuaucuugcacgaagaacaacagccaccauuacaucauggucggaaaugagaccggcuuggaguuaacuuuaacaaauacaaguauuaucaaccacaaguuuugcaaccuuucugaugcacauaaaaagaaucuuuaugaccaugcuuuaaugaguaucaucucaacuuuucacuuauccauuccuaacuuuaaucaguaugaagcaaugaguugugacuucaaugggggaaagauaaguguucaauacaaccuuagccacacuuaugcuguagaugcagcuaaccacugugggaccauugcuaauggcguucuucagacuuuuaugaggauggcuugggguggcaguuacauagcacuugauuccagaaaggggaguugggauugcauaaugacuuccuaccaauauuugauaauccaaaacaccacuugggaagaucacugccaguuuucucgcccaucccccaucgguuaucuggggcuacugucacaaaggaccagggacauuuauaucagucgaagacuucuugggacuuuuacuuggacucucucugauucugaagguaaugaaacaccggguggguauugucuaacaagauggaugcugauugaggccgaguugaagugcuuuggaaacacagcaguugcgaaaugcaaugagaaacaugaugaagaguuuugugacauguuaagauuguuugacuuuaacaaacaagcuauaaggaggcugaagacagaagcacagaugaguauccaacugauaaacaaagcagugaacgcacugaucaaugaccagcugauuaugaagaaucauuugagagauaucaugggaauuccuuacugcaauuacagcaaguauugguaucuaaaucacacugugacagggaagacaucguugccaagaugcuggcuugugucaaaugguuccuaccugaaugagacacacuuuucugaugauauugagcaacaagcagacaacaugauaacagagcuguuacaaaaggaguacauggacaggcaagggaaaacacccuuaggguuaguagaucuuuuuguuuuuagcaccagcuuuuaucucauuagcaucuuccuccaccugauuaaaaucccaacccacagacaugucauagggaaaccuugcccuaaaccacacagacucaaccacaugggcauaugcucauguggucuguacaaacauccugguguaccagucaaguggaaaagauaa

SEQ ID NO: 395 - RNA, 1473 nt, Artificial Sequence
  derived and/or modified protein sequence (wt) from LASV(LASV271-NIG-2010;Clade II)__AIT17690__GPC
auggggcaaaucauaacauucuuccaggaaguaccucaugucauagaagaagugaugaacauuguccugauugcccucagccuucuggcaauauugaaaggaaucuacaauguugcuaccuguggccucuuuggauugguguccuuucuucucuuauguggaagaucaugcucaacaacuuacaaagguguuuaugagcugcaaacucuagagcuagacauggcaagccuuaauaugacaaugcccuuaucuugcacaaagaauaacagccaccauuacaucauggucgggaaugagacuggccuagagcugaccuuaacaaauacaaguaucauuaaccacaaguuuuguaaccuuucugaugcacauaaaaagaaucuuuaugaccaugcuuuaaugaguaucaucucaacuuuccacuuauccaucccuaauuuuaaucaguaugaagcaaugaguugugacuucaauggagggaagauaaguguucaguacaaccuuagccacgcuuaugcuguagaugcagccagccacugugggaccguugccaauggcguucuucagacuuucaugaggauggcuugggguggcaguuacauagcacuugauuccgggaaagggaguugggauuguauaaugacuuccuaccaauauuugauaauccagaacaccaccugggaagaccacugccaguuuucucgcccaucccccaucgguuaucuggggcuacugucacaaaggaccagggacauuuacaucagucgaagacuccuugggacuuuuacuuggacccucucugauucugaaggcaaugaaacaccggguggauauugucuaacaagauggaugcugauugaggccgaauugaagugcuuugggaacacagcaguugcgaagugcaaugagaaacaugaugaagaguuuugugacauguuaagauuguuugacuuuaacaaacaagcuauaaggaggcugaagacagaagcacagaugaguauccaacugauaaacaaagcagugaacgcacugaucaacgaccagcugauuaugaagaaucauuuaagagauaucaugggaauuccuuacugcaauuacagcaaauauugguauuuaaaucacacuguaacagggaggacaucguugcccagaugcuggcuugugucaaaugguuccuaccugaaugagacacauuuuucugaugauauugaacaacaagcagacaacaugauaacagaacuguugcagaaggaguacauggacaggcaagggaaaacacccuuaggguuaguagaucuuuuugucuuuagcaccagcuuuuaucucauuagcaucuuccuccaccugguuaaaaucccaacucacagacaugucauagggaaacccugcccuaaaccacacagacucaaccacaugggcauaugcucauguggucuguacaaacauccugguguaccagucaaauggaaaagauag

SEQ ID NO: 396 - RNA, 1473 nt, Artificial Sequence
  derived and/or modified protein sequence (wt) from LASV(LASV274-NIG-2010;Clade II)__AIT17694__GPC
augggacaaaucauaacauuuuuccaggaaguaccucaugucauagaggaagugaugaacauuguccugauugcucucagccuucuggcaauacugaaggggaucuacaauguugcuaccuguggccucuuuggacugguguccuuccuccucuuauguggaagaucauguucaacaauuuacaaggguguuuaugagcuacaaacucuggagcuagacauggcaagccuuaauaugacaaugcccuuaucuugcacgaagaacaacagccaccauuacaucauggucggaaaugagacuggcuuggagcugacuuuaacaaauacaaguaucaucaaccacaaauuuuguaaccucucugaugcacauaaaaagaaucuuuaugaucaugcuuuaaugaguaucauuucaaccuuccacuuauccauuccuaacuuuaaucaguaugaagcaaugagcugugacuucaauggggggaagauaaguguucaguacaaccucagccacacuuaugcuguggaugcagccaaccacugugggacuaucgccaaugguguucuucagacuuuuaugaggauggcuugggguggcaguuauauagcacuugauuccggaaaggggagcugggacuguauaaugacuuccuaucaauauuugauaauccaaaacaccacuugggaagaucacugccaguuuucucguccauccccuaucgguuaccuagggcuacugucacaaaggaccagggacauuuacaucagucgaagacuucuugggacuuuuacuuggacucucucugauucugaagguaaugaaacaccggguggguauuguuuaacaagauggaugcugauugaggccgaguugaaaugcuuugggaacacagcaguugcgaaaugcaaugagaaacaugaugaagaguuuugugacauguuaagauuauuugacuuuaacaaacaagcuauaagaaggcuaaagacagaagcacagaugaguauccagcugauaaacaaagcagugaacgcacugaucaaugaccagcugauuaugaagaaucauuugagagacaucauggggaucccuuacugcaauuacagcaaguacugguaucuaaaucauacuguaacagggaagacaucguugccaaggugcuggcuugugucaaaugguuccuaccugaaugagacacauuuuucugaugacauugaacaacaagcagacaacaugauaacagaacuacugcaaaaggaguacauagacaggcaagggaaaacaccuuuaggguuaguagaucuuuuugucuucaguaccagcuuuuaucucauuagcaucuuccuccaccugguuaaaaucccaacccacagacaugucguaggaaaacccugcccuaaaccacacagacucaaccacaugggcauauguucauguggucuauauaaacauccuggugugccagucaaguggaaaagauag

SEQ ID NO: 397 - RNA, 1473 nt, Artificial Sequence
  derived and/or modified protein sequence (wt) from LASV(LASV719-NIG-2009;Clade II)__AIT17704__GPC
augggacaaaucauaacauuuuuccaggaaguaccucaugucauagaggaagugaugaacauuguccugauugcucucagccuucuggcaauacugaaggggaucuacaauguugcuaccuguggccucuuuggauugguguccuuccuccucuuauguggaagaucauguucaacaacuuacaaggguguuuaugagcuacaaacucuggagcuagacauggcaagccuuaauaugacaaugcccuuaucuugcacgaagaacaacagccaccauuacaucauggucggaaaugagacuggcuuggagcugacuuuaacaaauacaaguaucaucaaccacaaauuuuguaaccucucugaugcacauaaaaagaaucuuuaugaucaugcuuuaaugaguaucauuucaaccuuccacuuauccauuccuaacuuuaaucaguaugaagcaaugaguugugacuucaauggggggaagauaaguguucaguacaaccuuagccacacuuaugcuguagaugcagccaaccacugugggacuaucgccaaugguguucuucagacuuuuaugaggauggcuugggguggcaguuauauagcacuugauuccggaaagggaaguugggacuguauaaugacuuccuaccaauauuugauaauccaaaacaccacuugggaagaucacugccaguuuucucgcccauccccuaucgguuaccuagggcuacugucacaaaggaccagggacauuuacaucagucgaagacuucuugggacuuuuacuuggacucucucugauucugaagguaaugaaacaccggguggauauugucuaacaagauggaugcugauugaggccgaguugaaaugcuuugggaacacagcaguugcgaaaugcaaugagaaacaugaugaagaguuuugugacauguuaagauuguuugacuuuaacaaacaagcuauaaggaggcuaaagacagaagcacagaugaguauccagcugauaaacaaagcagugaacgcacugaucaaugaccaacugauuaugaagaaucauuugagagauaucaugggaauuccuuacugcaauuacagcaaguacugguaucuaaaucauacuguaacagggaagacaucguugccaaggugcuggcuugugucaaaugguuccuaccugaaugagacacauuuuucugaugacauugaacaacaagcagacaauaugauaacagaacugcugcaaaaggaguacauagacaggcaagggaaaacaccuuuaggguuaguagaucuuuuugucuucagcaccagcuuuuaucucauuagcaucuuccuccaccugguuaaaaucccaacccacagacaugucauaggaaaacccugcccuaaaccacacagacuuaaccauaugggcauauguucuuguggucuauacaaacauccuggugugccagucaaguggaaaagauag

SEQ ID NO: 398 - RNA, 1473 nt, Artificial Sequence
  derived and/or modified protein sequence (wt) from LASV(LASV738-NIG-2009;Clade II)__AIT17712__GPC
augggacaaaucauaacauuuuuccaggaaguaccucaugucauagaggaagugaugaacauuguccugauugcucucagccuucuggcaauacugaaagggaucuacaauguugcuaccuguggucucuuuggauugguguccuuucuccuuuuauguggaagaucauguucaacaaccuacaaggguguuuaugaacuacaaacucuagagcuggacauggcaagccuuaauaugacaaugccccuaucuugcacgaagaacaacagccaccauuacaucauggucgggaaugagacuggcuuagagcugacuuuaacaaauacaaguauuaucaaccacaaguuuuguaaucuuucugaugcacauaaaaagaaucuuuaugaccaugcuuuaaugaguaucauuucaaccuuccacuuguccaucccuaacuuuaaucaguaugaagcgaugaguugugacuucaaugggggaaagauaaguguucaguacaaccuuagccacacuuaugcuguagaugcagccaaccacugcgggaccaucgccaauggcguucuucagacuuuuaugaggauggcuugggguggcagcuacauagcacuugauuccggaaaaggggcuugggauuguauaaugacuuccuaccaauauuugauaauccagaacaccacuugggaagaucauugccaguuuucucgcccauccccuaucgguuaucuggggcuacugucacaaaggaccagggacauuuacaucagucgaagacuucuugggacuuuuacuuggacucucuccgauucugaagguaaugaaacaccggguggguacugucuaacaagauggaugcugauugaggccgaguugaagugcuuugggaacacagcaguugcgaaguguaaugagaaacaugaugaagaguuuugugacauguuaagauuguuugacuuuaacaaacaagcuauaaugaggcugaagacagaagcacagaugaguauccaacugauaaacaaagcagugaacgcacuaaucaaugaccagcugauuaugaaaaaucacuugagagacaucaugggaauuccuuacugcaauuacagcaaguacugguaucuaaaucacacuguuacagggaagacaucguugccaaggugcuggcuugugucaaaugguucuuaccuaaaugaaacacauuuuucugaugacauugaacaacaagcagauaacaugauaacagaaauguugcaaaaggaguacauagacaggcaagggaaaacacccuuaggguuaguagaucuuuuugucuuuagcaccagcuuuuaucucauuagcaucuuccuccaccuggucaaaaucccaacccacagacaugucauagggaaacccugccccaaaccgcacagacucaaccacaugggcauaugcucauguggucuauacaaacauccugguguaccagucagguggaaaagauag

SEQ ID NO: 399 - RNA, 1473 nt, Artificial Sequence
  derived and/or modified protein sequence (wt) from LASV(LASV966-NIG-2009;Clade II)__AIT17718__GPC
augggacaaauuauaacauuuuuccaggaaguaccucaugucauagaggaagugaugaacauugucuugauugcucucagccuucuggcaauacugaaagggaucuacaauguugccaccugcggccucuuuggauugguguccuuucuacucuuauguggaagaucaugcucaacaacuuacaaggguguuuaugaacuacaaacucuagagcuagacauggcaagccucaacaugacaaugcccuuaucuugcacgaagaacaacagccaccauuacaucagggucggaaaugagacuggcuuggagcugacuuuaacaaaugcaaguaucaucaaccacaaguuuuguaaucuuucugaugcacauaaaaagaaccuuuaugaccaugcuuuaaugagcaucaucucgacuuuccacuuguccauucccaacuuuaaucaguaugaagcaaugaguugugacuucaauggagggaagauaaguguucaauacaaccuuagccacgcuuaugcuauagaugcagcuaaccacugugggacuguugccaauggcguucuucagacuuucaugaggauggcuugggguggcaguuauauagcacuugauuccggaagagggaauugggauuguauaaugacuucuuaccaauauuuaauaauccaaaacaccacuugggaagaucacugccaguuuucucguccauccccuauuggcuaucuagggcuacugucacaaagaaccagggacauuuauaucagucgaagacuucuugggacuuuuaccuggacucucucugacuccgaggguaaugaaacaccaggugguuauugucuaacaagauggaugcugauugaagccgaguugaagugcuuuggaaacacggcaguugcgaaauguaaugagaaacaugaugaggaguuuugugacauguuaagauuguuugacuucaacaaacaagcuauaaggaggcugaagacagaagcacagaugaguauccaacugauaaacaaagcagugaacgcacugaucaaugaccagcuaauuaugaagaaucacuuaagagauaucauggggauuccuuacugcaauuacagcaaguauugguauuuaaaucacacuguaacagggaagacaucguugccuagaugcuggcuugugucaaaugguuccuacuugaaugagacacauuuuucugacgacauugaacaacaagcagacaacaugauaacagaacuguugcagaaggaguacauggauaggcaagggaaaacacccuuaggguuaguggaucucuuugucuucagcacuaguuucuaccucauaagcaucuuccuccaccuggucaaaaucccaacccacagacaugucauagggaaaccuugccccaagccucacagacucaaccacaugggcauaugcuccugugguuuuuacaaacauccugguguaccagucaaguggaagagauag

SEQ ID NO: 400 - RNA, 1473 nt, Artificial Sequence
  derived and/or modified protein sequence (wt) from LASV(LASV969-NIG-2009;Clade II)__AIT17724__GPC
augggacaaaucauaacauuuuuccaggaaguaccucauguaauagaggaagugaugaacauuguccugauugcucucagccuucuggcaauacugaaagggaucuacaauguugcuaccuguggccucuuuggacugguguccuuccuccucuuauguggaagaucaugcucaacaacuuacaaggguguuuaugagcuacaaacucuagaguuagacauggcaaaccuuaauaugacaaugcccuuaucuugcacgaagaacaacagccaccauuacaucaugguuggaaaugagacuggcuuggagcugacuuuaacaaauacaagcauuaucaaccauaaguuuugcaaccuuucugaugcacacaaaaagaaucuuuaugaccaugcuuugaugaguaucaucucaaccuuccacuuauccauuccuaacuuuaaucaauaugaagcgaugagcugugacuucaauggggggaagauaaguguucaguacaaccuuagccacacuuaugcuguagaugcagccaaccacugugggaccgucgccaauggcguucuucagacuuucaugaggauggcuugggguggcaguuacauagcacuugauuccggaaaagggaguugggauuguauaaugacuuccuaccaauauuugauaauccaaaacaccacuugggaagaucacugccaguuuucucgcccaucccccaucgguuaucuggggcuacugucacaaaggaccagggacauuuacaucagccgacgacuccuugggacuuuuacuuggacucucucugauucugaagguaaugaaacaccggguggguauugucugacaagauggaugcugauugaggccgaguuaaagugcuuugggaacacagcaguugcgaaaugcaaugagaaacaugaugaagaauuuugugacauguuaagauuauuugacuuuaacaaacaagcuauaaggaggcugaagacagaagcacagaugaguauccaacugauaaacaaagcagugaacgcacugaucaaugaccagcugauuaugaagaaucauuugagagauaucaugggaauuccuuacugcaauuacagcaaguacugguaucuaaaucauacuguaacagggaagacaucguugccaaggugcuggcuugugucaaaugguuccuaucuaaaugagacacauuuuucugaugacaucgaacaacaagcagacaacaugauaacagaacuguugcaaaaggaguacauggacaggcaagggaaaacacccuuaggguugguggaucuuuuuguuuuuagcaccagcuuuuaucucauuagcaucuuccuccaccugguuaaaaucccaacccacagacauaucauggggaaacccugcccuaaaccacacagacucaaccacaugggcauaugcucauguggucuauauaaacaccccgguguaccagucaaguggaaaagauag

SEQ ID NO: 401 - RNA, 1473 nt, Artificial Sequence
  derived and/or modified protein sequence (wt) from LASV(LASV971-NIG-2009;Clade II)__AIT17728__GPC
augggacaaaucauaacauuuuuccaagaaguaccucaugucauagaggaagugaugaacauuguccugauugcucucagucuuuuggcaauauugaaagggaucuacaauguugcuaccuguggccucuuuggauugguguccuuucuccucuuauguggaagaucaugcucaacaacuuacaaggguguuuaugagcuacaaacucuagagcuagacauggggagccuuaauaugacaaugcccuuaucuugcacgaagaacaacucccaccauuacaucauggucggaaaugagacuggcuuggagcugacuuuaacaaauacaaguauuaucaaccacaaguuuugcaaccuuucugaugcacauaaaaagaaucuuuaugaccaugcuuuaaugaguaucaucucaaccuuccacuuguccauuccaaacuuuaaucaguaugaagcaaugaguugugauuucaauggggggaagauaaguguucaguacaaccuuagccacacuuaugcuguagaugcagcuaaccacugugggaccauugcuaauggcguucuucaaacuuuuaugaggauggcuugggguggcaguuacauagcacuugacuccggaaaggggagcugggacugcauaaugacuuccuaccaauauuuaauaauccaaaacaccacuugggaagaucacugccaguuuucucguccaucccccaucgguuaccuggggcuacugucacaaaggaccagggacauuuacaucagucgaagacuucuugggacuuuuacuuggacccucucugauucugaagguaaugaaacaccagguggguauugucuaacaagauggaugcugauugaggccgaguugaagugcuuugggaacacagcgguugcgaagugcaaugaaaaacaugaugaagaguuuugugacauguuaagauuguuugauuuuaacaaacaagcuauaaggaggcugaagacagaagcacagaugaguauucaacugauaaacaaagcagugaacgcacugaucaaugaccagcugauuaugaagaaucauuuaagagauaucaugggaauuccuuacugcaauuacagcaaguauugguaucuaaaucacacuguaacagggaagacaucguugccaagaugcuggcuugugucaaaugguuccuaccuaaaugagacacauuuuucugaugacauugaacaacaggcagacaacaugauaacagaacuguugcaaaaagaguacauggacaggcaagggaagacacccuugggguuaguagaucucuuugucuucagcaccagcuuuuaucucauuagcaucuuccuccaccugguuaaaaucccaacucacagacaugucauagggaaacccugucccaaaccacauagacucaaccacaugggcauaugcucauguggucuguacaaacauccuggugugccagucaaguggaaaagauag

SEQ ID NO: 402 - RNA, 1473 nt, Artificial Sequence
  derived and/or modified protein sequence (wt) from LASV(LASV975-NIG-2009;Clade II)__AIT17732__GPC
augggacaaauuauaacauucuuucaagaaguaccucaugucauagaggaagugaugaacauuguccugauugcucucagccuucuggcaauacugaaagggaucuacaauguugccaccuguggccucuuuggauugguguccuuucuccucuuauguggaagaucaugcucaacaacuuacaagggugucuaugagcuacaaacucuagagcuagauauggcaagccuuaauaugacaaugccccuaucuugcacaaagaacaacagccaccauuacaucauggucggaaaugagacugguuuggagcugacuuuaacaaauacaagcauuaucaaccacaaguuuuguaaccuuucugaugcacacaaaaagaaucucuaugaccaugcuuuaaugaguaucaucucaaccuuccacuuauccauuccuaauuucaaucaguaugaagcaaugaguugugacuucaauggggggaagauaaguguacaguauaaccuuagucacacuuaugcuguugaugcagccaaucacugugggacuauugccaacgguguccuucagacuuuuaugagaauggcuugggguggcaguuacauagcacuugauuccggaaaggggaguugggauuguauaaugacuuccuaccaauauuugauaauccaaaauacuacuugggaagaucauugccaguuuucucgcccauccccuaucgguuaucuggggcuacugucacaaaggaccagggacauuuacaucagucgaagacuucuugggacuuuuacuuggacucucucugauucugaagguaaugaaacaccggguggguauugucuaacaagauggaugcugauugaggcugaauugaagugcuuuggaaacacagcaguugcgaaaugcaaugagaaacaugaugaagaguuuugugacauguuaagacuguuugacuuuaacaaacaagcuauaaggagguugaagacagaagcacagaugaguauccaacugauaaacaaagcagugaacgcacugaucaaugaccagcuuauuaugaagaaucacuugagagauaucaugggaauuccuuacugcaauuacagcaaguacugguaucuaaaucacacuguaacagggaagacaucguugccaaggugcuggcuugugucaaaugguuccuaccugaaugagacacauuuuucugaugauauugaacaacaagcagacaacaugauaacagaacuauugcaaaaggaguauauagacaggcaagggaaaacacccuugggguuaguagaucuuuuugucuuuagcaccagcuuuuaucucauuagcaucuuccuccaccuagucaaaaucccaacccacagacauaucguugggaagcccugcccuaaaccacacagacucaaccacaugggcauaugcucauguggucuauacaagcauccugguguaccaguuaaguggaagagauag

SEQ ID NO: 403 - RNA, 1473 nt, Artificial Sequence
  derived and/or modified protein sequence (wt) from LASV(LASV976-NIG-2009;Clade II)__AIT17736__GPC
augggacaaaucgugacauuuuuccaggaaguaccucaugucauagaggaagugaugaacauuguccugauugcucucagccuucuggcaauacugaaagggaucuacaauguugcuaccuguggccucuuuggauugguguccuuucuccuuuuauguggaagaucauguucaacaaccuacaaagguguuuaugagcuacaaacucuagagcuggacauggcaagccuuaauaugacaaugcccuugucuugcacgaagaacaacagccaccauuacaucauggucggaaaugagacuggcuuagagcugaccuuaacaaauacaaguauuaucaaccacaaguuuugcaaccuuucugaugcacacaaaaaggaucuuuaugaccaugcuuuaaugaguaucauuucaaccuuccauuuauccauuccuaacuuuaaucaguaugaagcgaugaguugugacuucaauggggggaagauaaguguucaguacaaccuuagccacacuuaugcuguagaugcagccaaccacugugggacuaucgccaauggcguucuucagacuuuuaugaggauggcuugggguggcagcuacauagcacuugauuccggaaaagggaguugggauuguauaaugacuuccuaccaauauuugauaauccaaaacaccacuugggaagaucauugccaguuuucucgcccauccccuaucgguuaucuggggcuacuaucacaaagaaccagggacauuuacaucagucgaagacuucuugggacuuucacuuggacucucucugauucugaagguaaugaaacaccggguggguauugucuaacaagauggaugcugauugaggccgaguugaagugcuuugggaacacagcaguugcgaagugcaaugagaaacaugaugaagaguuuugugacauguuaagauuguuugacuuuaacaaacaagcuauaaugaggcugaagacagaagcacagaugaguauccaauugauaaacaaagcagugaacgcacugaucaaugaccagcugauuaugaagaaucauuugagagacaucaugggaauuccuuacugcaauuacagcaaguacugguaucuaaaucacacuguuacagggaagacaucguugccgaggugcuggcuuguaucaaaugguucuuaccugaaugagacacguuuuucugaugacauugaacaacaagcagacaacaugauaacagaaauguugcaaaaggaguacuuagacaggcaagggaaaacacccuuaggguuaguagaucuuuuugucuuuagcaccagcuuuuaucucauuagcaucuuccuccaccuggucaaaaucccaacccacagacacaucauagggaaacccugccccaaaccgcacagacucaaccacaugggcauaugcucauguggucuauacaaacauccugguguaccagucaaguggaaaagauaa

SEQ ID NO: 404 - RNA, 1473 nt, Artificial Sequence
  derived and/or modified protein sequence (wt) from LASV(LASV978-NIG-2009;Clade II)__AIT17744__GPC
auggggcaaaucauaacauuuuuccaggaagugccucaugucauugaggaggugaugaacauugucuugauugcucucagccuucuagcaauacuaaaagggauuuacaauguugcuaccuguggccucuuuggguugauguccuuucuucucuuauguggaaggucaugcucaacaacuuacaaggguguuuaugagcuucaaacucuggagcuggauauggcaaaccuuaauaugacaaugcccuuauccugcacgaagaacaacagccaccacuacaucaugguuggaaaugagacuggcuuggagcugacuuuaacaaacacaaguaucaucaaccacaaguucugcaaccuuucugaugcacauaaaaagaaucucuaugaccaugcuuuaaugagcaucaucucaaccuuccaucuauccaucccuaacuuuaaucaguaugaagcaaugaguugugacuucaaugggggaaagauaaguguucaguacaaccucagccaugcuuaugcuguggaugcagcuaaccauugugggaccauugccaauggaguccuucaaacuuuuaugaggauggccugggguggcaguuacauagcacuugauucuggaaaagggaguugggauuguauuaugacguccuaccaauauuugauaauccaaaacaccaguugggaagaucacugccaguuuucucgcccguccccuaucgguuaucuggggcuacugucacaaagaaccagggacauuuacaucagccgaagacuccuuggaacuuuuaccuggacucucucugauucugagggcaaugaaacaccggguggguauuguuuaacaagauggaugcugauugaggccgaauuaaagugcuuugggaacacagcaguugcgaaaugcaaugagaaacaugaugaagaguuuugugacauguuaagguuguuugacuuuaacaaacaggcuauaaggaggcuaaagacagaagcacagaugaguauccaacuaauaaacaaagcagugaacgcacugaucaaugaccagcucauuaugaagaaucauuuaagagauaucaugggaauuccuuacugcaauuacagcaaguauugguauuuaaaccacacuguaacagggaagacaucguugccaagaugcuggcuuguaucaaaugguuccuaccugaaugaaacacauuuuucugaugacauugagcaacaagcagacaacaugauaacagaauuguuacagaaagaguacauugacaggcaagggaaaacacccuuaggguugguggaucuuuuugucuucagcacuaguuucuaccuuauuagcaucuuccuccaccuggucaaaaucccaacccacagacaugucauagggaaacccugccccaagccacacagacucaaccacaugggcauaugcucauguggucuguacaaacauccugguguaccagucaaguggaaaagauag

SEQ ID NO: 405 - RNA, 1473 nt, Artificial Sequence
  derived and/or modified protein sequence (wt) from LASV(LASV981-NIG-2009;Clade II)__AIT17752__GPC
augggacaaaucauaacauuuuuccaugaaguaccucaugucauagaggaaguaaugaacauuguucugauugcucucagccuucuggcaauacugaaagggaucuacaauguugcuaccuguggccucuuuggauugguauccuuucuccucuuauguggaagaucaugcucaacaacuuacaaggguguuuaugagcugcagacucuagagcuagacauggcaagccuuaauaugacaaugcccuuaucuugcacgaagaauaacucccaccauuacaucaugguuggaaaugagacuggcuuggagcugaccuuaacaaauacaagcauuaucaaccacaaguuuuguaaccuuucugaugcacauaaaaagaaucuuuaugaccaugcuuuaaugaguaucaucucaaccuuccacuuaucaauuccuaacuuuaaucaguaugaagcaaugaguugugacuucaaugggggaaagauaaguguucaguacaaucuuagccacacuuaugcuauagaugcagccaaccauugugggaccauugcuaauggcguucuucagacuuuuaugaggauggcuugggguggcaguuacauagcacuugauucuggaaggggaagcugggauugcauaaugacuuccuaccaauauuugauaauccaaaacaccacuugggaagaucacugccaguuuucucgcccauccccuaucgguuaucuggggcugcugucacaaaggaccagggacauuuacaucagucgaagacuucuugggaccuucacuuggacucucucugacuccgaagguaaugaaacaccggguggguauugucuaacaagauggaugcuaauugaggccgaguugaagugcuuugggaacacagcaguugcaaaaugcaaugagaaacaugaugaagaguuuugugacauguuaagauuguuugacuuuaacaaacaagcuauaaggaggcugaagacagaagcacagaugaguauccaacugauaaacaaagcaguaaacgcacugaucaaugaccagcugauuaugaagaaucauuugagagauaucaugggaauuccuuacugcaauuacagcaaauauugguaucuaaaucacacuguaacagggaagacaucguugccaagaugcuggcuugugucaaaugguuccuaucugaaugagacgcauuuuucugaugacauugaacaacaagcagacaacaugauaacagagcuauugcaaaaggaguacauagacaggcaaggaaaaacacccuuaggcuuaguagaucuuuuugucuucagcaccagcuuuuaucucauuagcaucuuucuccaccuggucaaaaucccaacccacagacaugucauagggaagcccugccccaaaccacacagacucaaccacaugggcauaugcucauguggucuguacaagcacccuggcgugccagucaaguggaaaagauag

SEQ ID NO: 406 - RNA, 1473 nt, Artificial Sequence
  derived and/or modified protein sequence (wt) from LASV(LASV982-NIG-2009;Clade II)__AIT17756__GPC
auggggcaaaucauaacauuuuuucaggaagugccucaugucauagaagaagugaugaacauuguccugauugcccuuagccuucuggcaauauugaaagggaucuacaauguugcuacuuguggccucuuuggacugguguccuuucuucucuuauguggaagaucaugcuccauaacuuacaaagguguuuaugagcuacaaacucuagagcuagacauggcaagccuuaauaugacaaugcccuuaucuuguacaaagaauaauagccaccauuacaucauggucggaaaugaaacuggcuuagagcugacuuuaacaaauacaaguaucaucaaccacaaguuuuguaaccuuucugaugcacauaaaaagaaucuuuaugaccaugcuuuaaugagcaucaucucaaccuuccacuuauccauuccuaacuuuaaucaauaugaggcaaugagcugugacuucaauggggggaagauaaguguucaguacaaccuuagccacacuuaugcuguagaugcagcuaaccacugugggacuauugccaauggcguucuucagacuuucaugaggauggcuugggguggcagcuacauagcacuugauuccggaagagggaguugggauuguauaaugacuuccuaccaauauuugauaauccagaacaccacuugggaagaucacugccaguuuucucgcccaucccccaucgguuaucugggacuacugucacaaaggaccagggacauuuacaucagucgaagacuccuugggacuuuuacuuggacccucucugauucugaaggcaaugaaacuccagguggguauugucugacaagguggauguugauugaggccgaguugaagugcuuugggaacacagcaguugcgaaaugcaaugaaaaacaugaugaagaguuuugugacaugcuaagauuguuugacuuuaacaaacaagcuauaaggaggcugaaagcagaagcacagaugaguauccaacuaauaaacaaagcagugaaugcacugauuaaugaccagcugauaaugaagaaucauuuaagagauaucaugggaauuccuuacugcaauuacagcaaguauugguaucugaaucacacuguaacagggaggacaucguuaccaagaugcuggcuugugucaaaugguuccuaccugaaugagacacauuuuucugaugacauugaacaacaagcagacaacaugauaacagaacuguugcagaaggaauacauagauaggcaagggaaaacaccuuuaggguuaguagaucuuuuugucuucagcaccagcuuuuaucucaucagcaucuuccuccaccugguuaaaaucccaacccacagacauaucauagggaaacccugcccuaaaccacauagacucaaccacaugggcauaugcucauguggucuguacaagcauccuggugugccagucaaguggaaaagauag

SEQ ID NO: 407 - RNA, 1473 nt, Artificial Sequence
  derived and/or modified protein sequence (wt) from LASV(LASV988-NIG-2009;Clade II)__AIT17758__GPC
augggacaaaucauaacauuuuuccaggaaguaccucaugucauagaggaagugaugaacauuguccugauugcucucagccuucuggcaauacugaaagggaucuacaauguugcuaccuguggccucuuuggauugguguccuuucuccucuuauguggaagaucaugcucaacaacuuacaaggguguuuaugagcuacaaacucuagagcuaaacauggcaagccuuaauaugacgaugcccuuaucuugcacaaagaacaacagccaccauuacaucauggucggaaaugagacuggcuuggagcuaacuuuaacaaauacaaguauuauaaaccacaaguuuuguaaccuuucugaugcacauaaaaggaaucuuuaugaccaugcuuuaaugaguaucaucucaaccuuccacuuaucuauucccaauuuuaaucaguaugaagcaaugagcugugacuucaaugggggaaagauaaguguucaguacaaccuuagccacacuuaugcuguagaugcagccaagcacugugggacuaucgccaauggcguucuucagacuuuuaugaggauggcuugggguggcaguuacauagcacuugauuccggaaaggggaguugggauuguauaaugacuuccuaucaauauuugauaauccagaacaccaccugggaagaucacugcgaguuuucucgcccauccccuaucgguuaucuggggcuacugucacaaaggaccagggacauuuacaucagucgaagacuucuugggacuuuuacuuggacucucucugacucugaagguaaugaaacgccggguggguauugucuaacaagauggaugcugauugaggcugaauugaagugcuuugggaacacagcaguugcgaaaugcaaugagaaacaugaugaagaguuuugugacauguugagacuguuugacuuuaacaaacaagcuauaaggaggcugaaggcagaagcacagaugaguauccaacugauaaacaaagcagugaacgcacugaucaaugaccagcuuauuaugaagaaucacuugagagauaucaugggaauuccuuacugcaauuacagcaaguacugguaucuaaaucacacuguaacagggaagacaucguugccaaggugcuggcuugugucaaaugguuccuaccugaaugagacacauuuuucugaugacauugaacaacaagcagacaacaugauaacagaacuguugcaaaaggaauacauagacaggcaagggaaaacacccuuaggguuaguagaucuuuuugucuucagcaccagcuuuuaucucauuagcaucuuccuccaccuggucaaaaucccaacccacagacaugucauagggaaacccugcccuaaaccacacagacucaaccauaugggcauaugcucaugcggucuauacaagcauccuggugugccaguuaaguggaaaagauag

SEQ ID NO: 408 - RNA, 1473 nt, Artificial Sequence
  derived and/or modified protein sequence (wt) from LASV(LASV989-NIG-2009;Clade II)__AIT17762__GPC
auggggcagaucauaacauucuuccaggaaguaccucaugucauagaggaagugaugaacauuguccugauugcccucagccuucuggcaauauugaaagggaucuacaauguugcuaccuguggccucuuuggacuaguguccuuucuucucuugugugggagaucaugcucaacaaccuacaaggguguuuaugagcuacaaacucuagagcuagacauggcaagccuuaauaugacaaugcccuuaucuugcacgaagaauaacagccaccauuacaucauggucggaaaugagacugguuuagagcugacuuuaacaaauacaaguaucaucagccacaaguuuuguaaccuuucugaugcacauaaaaagaaucuuuaugaccaugcuuuaaugaguaucaucucgacuuuccacuuauccauaccuaacuuuaaucaguaugaggcaaugaguugcgacuucaauggggggaagauaaguguucaauacaaccuuagccacacuuaugcuguagaugcagcuaaccauugugggacuauugccaaugguguucuucagacuuucaugaggauggccugggguggcaguuauauagcacuugacuccggaaaggggaguugggauuguauaaugacuuccuaccaguauuugauaauccagaacaccacuugggaagaccacugccaguuuucucgcccaucccccaucgguuaucuggggcuacugucacaaaggaccagggauauuuacaucagucggagacuccuugggacuuuuacuuggacucucucugauucugaaggcaaugaagcaccggguggguauugucugacaagauggaugcugauugaggccgaguugaagugcuucggaaacacagcaguugcgaaaugcaaugagaaacaugaugaagaauuuugugacauguuaagauuguuugacuuuaacaaacaagcuauaaggaggcugaagacagaagcacaaaugaguauccagcuaauaaacaaagcagugaacgcacugaucaaugaccaacugauuaugaagaaucacuugagagauaucaugggaauuccuuacugcaauuacagcagguauugguauuuaaaucauacuguaacagggaagacaucgcugccaagaugcuggcuugugucaaaugguuccuaccugaaugagacacauuuuucugacgacauugaacaacaggcagacaacaugauaacagaacuguugcagaaggaguacauggacaggcaaggaaaaacacccuugggguugguggaucuuuuugucuucagcaccagcuuuuaucucauuagcaucuuccuccaccugguuaaaaucccaacccacagacaugucauagggaaacccugcccuaaaccacacagacucaaccacaugggcauaugcucauguggucuguacaaacauccugguguaccagucaaguggaaaagauag

SEQ ID NO: 409 - RNA, 1473 nt, Artificial Sequence
  derived and/or modified protein sequence (wt) from LASV(LASV991-NIG-2009;Clade II)__AIT17770__GPC
augggacaaauuguaacauuuuuccaggaaguaccucaugucauagaggaagugaugaacauuguccugauugcucucagccuucuagcaauacugaaagggaucuacaauguugcuaccuguggccucuuuggauugguguccuuucuccuuuuauguggaagaucaugcucaacaacuuacaaggguguuuaugagcuacaagcuuuggagcuagacaugucaagccuuaauaugacaaugcccuugucuugcacgaagaacaacagccaccauuacaucauggucggaaaugagaccggcuuggagcugacuuuaacaaacacaaguauuauccaccacaaguuuuguaaccuuucugaugcacauaaaaaggaucuuuaugaccaugcuuuaaugaguaucaucucaaccuuccacuuauccauuccuaacuuuaaucaguaugaagcaaugaguugugacuucaauggggggaagauaaguguucaguacaaccuuagccacacuuaugcuguagaugcagccaaccacugugggaccauugccaauggcguucuucagacuuuuaugaggauggcuugggguggcaguuacauagcacuugauuccgggaagggagguugggauugcauaaugacuuccuaccaauuuuugauaauccaaaacaccaccugggaagaucacugccaguuuucucgcccaucccccauugguuaucuggggcugcugucacaaaggaccagggacauuuauaucagucgaagacuucuuggaacuuuuacuuggacucucuccgauucugaagguaaugaaacaccggguggguauugucugacaagauggaugcugauugaggccgaguugaagugcuuugggaacacagcaguugcgaaaugcaacgagaaacaugaugaagaguuuugugacauguuaagauuguuugacuuuaacaagcaagcuauaaagaggcugaaaacagaagcacagaugaguauccaucugauaaacaaagcagugaacgcacugaucaaugaccagcugauuaugaagaaucauuugagagauauuaugggaaucccuuacugcaauuacagcaaguauugguaucuaaaucacacuguuacagggaagacaucguugccaagaugcuggcuugugucaaaugguuccuaccugaaugagacacauuuuucugaugacauugaacaacaagcagacaacaugauaacagaacuguugcaaaaggaguacauagauaggcaagggaaaacacccuuaggguuaguagaucuuuuugucuucagcaccagcuuuuaucuuauuagcaucuuccuccaccuaguuaaaauuccaacccacagacauguuauagggaaacccugcccuaaaccacauagacucaaccacaugggcauaugcucauguggucuguacaaacauccugguguaccagucagguggaaaagauag

SEQ ID NO: 410 - RNA, 1473 nt, Artificial Sequence
  derived and/or modified protein sequence (wt) from LASV(LASV993-NIG-2009;Clade II)__AIT17778__GPC
augggacaaaucauaacauuuuuccaggaagugccucaugucauagaagaagugaugaacauuguccugauugcccucagccuucuggcaauauugaaagggaucuacaauguugcuaccuguggccucuuuggauugguguccuuccuucucuuauguggaagaucaugcucaacaacuuacaaagguguuuaugagcuacaaacucuagagcuagacauggcaaaccuuaauaugacaaugcccuuaucuugcacaaagaauaacagccaccauuacaucauggucggaaaugagacuggcuuagagcugacuuuaacaaauacaaguaucaucaaccacaaguucuguaaccuuucugaugcacauaaaaagaaucuuuaugaccaugcuuuaaugaguaucauuucaaccuuccacuuauccauuccuaacuuuaaucaguaugaagcaaugaguugugacuucaauggggggaagauaaguguucaguacaaccuuagccacacuuaugcuagagaugcagcuaaccacugugguacuauugcuaauggcguucuccagacuuucaugaggauggcuugggguggcaguuacauagcacuugauuccggaaaagggagcugggauugcauaaugacuuccuaccaauauuugauaauccagaacaccacuugggaagaucacugccaguuuucucgcccaucccccaucgguuaucuggggcugcugucacaaaggaccagggacauuuacaucagucgaagacuccuugggacuuuuacuuggacccucucugauucugaaggcaaugaaacaccggguggguauugucuaacaagauggaugcugauugaggccgaauugaagugcuuugggaacacagcaguugcgaaaugcaaugagaaacaugaugaggaguucugugacauguugagauuguuugacuuuaacaaacaagcuauaaggagacugaagacagaagcacagaugaauauccaacugauaaacaaagcagugaacgcacugaucaaugaccagcugauuaugaagaaucauuuaagagauaucaugggaauuccuuacugcaauuacagcaaguauugguauuuaaaucacacugugacagggaagacaucguugccaagaugcuggcuugugucaaaugguuccuaccugaaugaaacacauuuuucugaugacauugaacaacaagcagacaacaugauaacagaacuguugcagaaggaguacauggacaggcaagggaaaacacccuuaggguuaguagaucuuuuugucuucagcaccaguuucuaucucauuagcaucuuucuccaccuaguuaagaucccaacucacagacaugucauaggaaaacccugcccuaaaccacacagacuuaaccacaugggcauaugcucauguggucuguacaaacauccugguguaccagucaaauggaaaagauag

SEQ ID NO: 411 - RNA, 1473 nt, Artificial Sequence
  derived and/or modified protein sequence (wt) from LASV(Nig08-04;Clade II)__ADU56610__GPC
augggacaaauaguaacauucuuucaggaaguuccucaugucauagaagagguaaugaauauuguccuaauugcucuuagucuccuggcgauacugaaggggauuuacaauguugccacuuguggccuuuuugggcugaucuccuuucuucuucuguguggaagaucaugcucaacaaccuacaaaggugucuaugagcuacaaacucuggaguuggacauggcaaaccucaacaugacuaugccucuaucuuguacaaaaaacagcagccaucacuauaucaugguugggaaugaaacaggccuagaacugaccuugacaaacacaaguauaaucaaucacaaguucugcaaccuuucugaugcacacaagaagaaucuuuaugaucaugccuugaugagcaucauuucaacuuuccacuuauccauuccaaauuucaaucaguaugaagcaaugaguugugacuuuaauggagggaaaauaagugugcaauacaaucucagucaugcuuaugcuguagaugcagccaaccacugugggaccauugccaacgguguccuacagacuuucaugagaauggcuuggggcggcaguuacauagcacuugauucuggaaaagggaacugggauugcauaaugacuuccuaucaguacuugauuauccaaaacaccaccugggaagaucacugucaguuuucccgcccguccccuauuggauaccuaggacuguuaucacaaaggacuagagauauuuacauuagucggagacuucuuggaacuuucaccuggacccucucugacucugagggcaaugaggcacccgguggauacugccuuacuagauggaugcuaauugaagcugaauugaagugcuuugggaacacagccauugcgaaguguaaugagaagcacgaugaggaauucugugacauguugagacuuuucgacuucaacaaacaagccauaaaaaggcuaaaagcagaagcacagaugagcauccaauugauaaauaaagcaguaaaugcacuaaucaaugaccaauugaucaugaagaaccacuugagggauaucauggggauucccuauugcaauuacagcaaguacugguaucugaaccauacugugacagggaaaacaucauugccaagguguuggcuuauuucaaaugguucuuaccuaaaugagacacauuucuccgaugauauugaacagcaagcagauaacaugauaacagaacugcugcaaaaggaguauauggacaggcaggggaaaacacccuuaggguuaguggaucuuuuuguuuucagcacuagcuuuuaucucauaaguaucuuccuccacuuagucaaaaucccgacccauaggcacauuguagggagaccuugccccaagccacacagacucaaccacaugggcauaugcucaugugguuuguacaaacauccugguguaccagucaaguggaagagauag

SEQ ID NO: 412 - RNA, 1473 nt, Artificial Sequence
  derived and/or modified protein sequence (wt) from LASV(Nig08-A41;Clade II)__ADU56626__GPC
augggacaaaucauaacauuuuuccaggaagugccucaugucauagaggaagugaugaacauuguccugauugcucucagccuucuggcaauacugaaagggaucuacaauguugcuaccugcggccucuuuggauugguguccuuucuccucuuauguggaagaucaugcucaacaaccuacaagggugucuaugagcuacaaacucuagagcuaaacauggcaagccuuaauaugacaaugcccuuaucuugcacaaagaacaacagccaccauuacaucauggucggaaaugagacuggcuuggagcuaacuuuaacaaauacaaguauuaucaaucacaaguuuuguaaccuuucugaugcacauaaaaggaaucucuaugaccaugcuuuaaugaguaucauuucaaccuuccacuuaucuauucccaauuuuaaucaguaugaagcaaugagcugugacuucaauggggggaagauaaguguucaauacaaccuuagccacacuuaugcuguagaugcagccaagcacugugggacuaucgccaauggcguucuucagacuuuuaugaggauggcuugggguggcaguuacauagcacuugauuccggaaaggggaguugggauuguauaaugacuuccuaucaauauuugauaauccaaaacaccaccugggaagaucacugccaguuuucucgcccauccccuaucgguuaucuggggcuacugucacaaaggaccagggacauuuacaucagucgaagacuucuugggacuuucacuuggacucucucugacucugaagguaaugaaacgccggguggguauugucuaacaagauggaugcugauugaggcugaauugaagugcuuugggaacacagcaguugcgaaaugcaaugagaaacaugaugaagaguuuugugacauguugagacuguuugacuuuaauaaacaagcuauaaggaggcugaaggcagaagcacagaugaguauccaacugauaaacaaagcagugaacgcacugaucaaugaccagcuuauuaugaagaaucacuugagagauaucaugggaauuccuuacugcaauuacagcaaguacugguaucuaaaucacacuguaacagggaagacaucguugccaaggugcuggcuugugucaaaugguuccuaccugaaugagacacauuuuucugaugacauugaacaacaagcagacaacaugauaacagaacuguugcaaaaggaauacauagacaggcaagggaaaacacccuuaggguugguagaucuuuuugucuucagcaccagcuuuuaucucauuagcaucuuccuccaccuggucaaaaucccaacccacagacaugucauagggaaacccugcccuaaaccacacagacucaaccauaugggcauaugcucauguggucuauacaagcauccuggugugccagucaaguggaaaagauag

SEQ ID NO: 413 - RNA, 1473 nt, Artificial Sequence
  derived and/or modified protein sequence (wt) from LASV(Nig08-A47;Clade II)__ADU56630__GPC
auggggcaaaucauaacauuuuuccaggaaguaccucaugucauagaagaagugaugaacauuguccugauugcccucagccuucuggcaauauugaaagggaucuacaauguugcuaccuguggccucuuuggauugguguccuuucuucucuuguguggaagaucgugcucaacaacuuacaaagguguuuaugagcuacaaacucuagagcuagacauggcaagccuuaauaugacaaugcccuuaucuugcacaaagaauaacagccaccauuacaucauggucggaaaugagacuggcuuagagcugaccuuaacaaauacaaguaucaucaaucacaaauuuuguaaccuuucugaugcacauaaaaagaaucuuuaugaccaugcuuuaaugaguaucaucucaaccuuucauuuauccauuccuaacuuuaaucaguaugaagcaaugaguugugacuucaauggggggaagauaaguguucaguacaaccuuagccacgcuuaugcuguagaugcagcuaaccauugugggacuauugccaauggcguucuucagacuuucaugaggauggcuugggguggcaguuacauagcacuugauuccggaaaagggaguugggauuguauaaugacuuccuaccaauauuugauaauccagaacaccacuugggaagaucacugccaguuuucacgcccaucccccaucgguuaucuggggcuacugucacaaaggaccagggacauuuacaucagucgaagacuccuugggacuuuuacuuggacccucucugauucugaaggcaaugaaacaccggguggguauugucuaacaagauggaugcugauugaggccgaguugaagugcuuuggaaacacagcaguugcgaaaugcaaugagaaacaugaugaagaguucugugacauguuaagauuguuugacuucaacaaacaagcuauaaggaggcugaagacagaagcacagaugaguauccaauugauaaacaaagcagugaacgcacugaucaaugaccagcugauuaugaagaaucauuuaagagauaucaugggaauuccuuacugcaauuacagcaaguauugguauuuaaaucacacugugacagggaagacaucguugccaagaugcuggcuugugucaaaugguuccuaccugaaugagacacauuuuucugaugacauugaacaacaagcagacaacaugauaacagaacugcugcagaaggaguacauggacaggcaagggaaaacacccuuaggguugguagaucuuuuugucuucagcaccaguuuuuaucucauuagcaucuuccuucaccuggucagaaucccaacucacagacaugucauagggaaacccugcccuaaaccacacagacucaaccacaugggcauauguucauguggucuguacaaacauccugguguaccagucaaauggaaaagauag

SEQ ID NO: 414 - RNA, 1473 nt, Artificial Sequence
  derived and/or modified protein sequence (wt) from LASV(CSF;Clade III)__AAL13212__GPC
augggucagauagugacauucuuucaggaaguuccucaugucauugaggaaauuaugaacauuguccucaucaccuuaucucugcuugcaaucuugaaggguguguacaauuuggccacguguggccuuauuggucugauaacauuccuuuuccucuguggaaggucauguucgaugaccuacaaagggaguuaucaacuugaaacccuugagcugaacauggagacgcuuaacaugacuaugccucuguccugcacaaaaaauacuagucaccacuacauaaggguggguaaugaaacagggcuugagcugaccuuaaccaauacaagcaucauaaaccacaaguucugcaaucucucugaugcacacaaaaagaaucucuacgaccacucucucaugagcauuaucucuaccuuucaucuguccaucccuaacuuuaaucaguaugaagccaugaguugugacuucaauggagguaagauuagcauccaauacaauuugagccacaccuaugcaggagaugcagccaaacauuguggcacuuuggcaaaugguauacugcaaaccuucaugaggauggcuuggggugggaguuacauugcacuugacucaggucgaggaaacugggauuguauaaugacuagcuaccaauacuuaaucauucagaauacaaccugggaggaccauugucaauuuucaagaccaucacccauuggcuaucuugggcuccucucucaaaggaccagagaaauuuacaucaguagaagacugcuaggaacauuuacauggacauugucagauucugaaggcaaugaaaauccaggggguuacugcuuaaccagauggauguuaauugaagcugaacugaaauguuuugggaauacugcaguagcuaaaugcaaugagaaacaugaugaggaauuuugugacaugcugaggcuuuuugauuucaacaaacaagccauucagagauugaaggcugaggcucaaaugaguauucagcuuauuaacaaagcagucaaugcccucauaaaugaccagcuuauaaugaaaaaucaucucagagacauuaugggcauaccauauugcaacuauagcaaauauugguaucuuaaucauacgaccacggguagaacuucacuaccaagaugcuggcuuguaucaaacggguccuaucucaaugaaacucguuucucagacgacauagaacaacaagcugacaacaugauaacagaaauguugcagaaagaguacaucgauagacaaggaaagaccccacuaggcuugguugacuuguuuguguucagcacaagcuucuauuugaucaguauuuuucuacacuuaaucaagauaccaacucauagacacauuguaggugggccaugccccaaaccucacaggcuaaaccacaagggcauuugcucuugugggcuauauaaacggccaggagugucugugagguggaagagauaa

SEQ ID NO: 415 - RNA, 1473 nt, Artificial Sequence
  derived and/or modified protein sequence (wt) from LASV(ISTH2121-NIG-2012;Clade III)__AIT17540__GPC
augggacaaauagugacauucuuucaagaaguuccucaugucauugaggaaauuaugaacauuguccucaucacuuugucucuacuugcaauucuuaaggggauauacaacuuugccacauguggucuuauuggucugaucacauuccucuuucuuuguggaaggucauguucaacaaucuacaaaggaagcuaucaacuccagacacuugagcuaaacauggaaacacucaauaugaccaugccuuuauccuguacaaaaaacaacagucaccacuauauaagagugggcaaugagacaggacuggaauuaaccuuaacuaacacaagcaucauaaaccauaaguucugcaaucuuucugaagcacacaaaaagaaucucuaugaccaugcccucaugagcaucaucuccaccuuccauuugucuauucccaauuucaaucaguaugaagcaaugaguugugacuucaauggaggcaagaucagcguucaguacaaucuaagucauaguuaugcaguggaugcagccaaucauugcggcacuguagcaaauggugugcugcagacuuuuaugaggauggccugggguggaagcuacaucgcacuugauucaggccgaggaaauugggacugcauaaugacaagcuaccaauacuuaaucauucagaauacgacaugggaagaccacugucaguucucaagaccaucucccauugguuaucuuggacuucuaucacaaagaaccagagauauuuacaucagcagaagacuguugggaacguuuacauggacacuaucagauucugaagguaaagaaaccccaggaggcuacugcuuaacuagauggauguuaauugaagcugaguuaaaguguuucgggaacacugcgguggcuaaaugcaaugagaaacaugaugaggaauuuugugauaugcugaggcuuuuugacuucaacaagcaagccauucagagguugaagacugaggcacagaugagcauucagcuuaucaacaaagcagucaacgcucuuauuaaugaccagcuuauaaugaaaaaccaccucagagacaucauggguauaccauauuguaauuacaguaaauacugguaucuuaaucauacauccacaggcaggaccucacuaccaaaauguuggcuugugucaaauggauccuaccucaaugagacucauuuuucagaugauauagaacaacaagccgacaauaugauaacggagauguuacagaaggaguacauagauaggcaagggaagaccccacuuggauugguugacuuauuuguauucagcacuaguuucuaccucaucaguauuuuccuucauuugguuaagaucccaacucauaggcacauugugggcaaaucaugucccaaaccucacaggcuaaaccauaugggcaucuguuccuguggacuguacaaacagccagggguaccugugaaguggaagagauaa

SEQ ID NO: 416 - RNA, 1473 nt, Artificial Sequence
  derived and/or modified protein sequence (wt) from LASV(Nig08-A19;Clade III)__ADU56618__GPC
augggacaaauugugacauucuuccaggaagucccucauguuaucgaggaagugaugaauaucguccucauagcauugucaauuuuggcaauccuaaaaggacucuacaacauugcuacauguggcuugauaggccuugucacauuccucuuacuuucuggaaggucauguucaaugaccuacaaaggaguuuaugaacuacagacccuugaacugaacaugaacacucugaauaugacuaugccgcuaucuuguacaaagaacaauagucaccacuacaucauggugggaaacgagacagggcuugagcucaccuuaaccaacacaagcuugcuccaucacaaauucugcaaccuaucagaugcucauaagaaaaaucuuuaugaucacacucucaugagcauuaucuccacauuccauuuguccauuccuaacuuuaaucaguaugaggcaaugaguugugauuuuaaugguggcaagaucacugugcaauacaaucugagucauagcuaugcaauugaugcagcaaaccauuguggcacaguggcaaacgguguguugcaaacauuuaugaggauggcuuggggagguaguuacauugcccuugauuccggacgugggaaaugggauuguauaaugaccaguuaucaauacuuaaucauccagaacacaaccugggaagaucauugucaauuuuccagaccauccccaauuggauaucuugggcuccucucacagagaacuagagacauauacauuaguagaagacuacuaggaacauuuacuuggacacuuucugacucagaaggaaaugagacaccaggagguuacugucucacuagauggauguugauugaggcugaacuaaaguguuucgggaauacagcuguagcuaagugcaaugaaaaacacgaugaagaguuuugugacaugcuaaggcuauuugacuucaauaagcaagcuauaaggagguuaaaggcagaggcccaaaugagcauacagcugaucaacaaagcaguuaaugcucuaauaaacgaucagcugaucaugaagaaucaucuaagggacaucaugggaauaccauacugcaauuacagcaaguacugguaucucaaucacaccucaacagggaggaccucauuaccgagauguuggcuuguuucaaaugggucauaucucaaugaaacucacuuuucagaugacauugagcagcaagcugauaacaugauaacugaaauguugcaaaaagaauaccuggacagacaaggaaagaccccauugggauugguagaucuuuuugucuucaguacaaguuuuuacuuaaucaguauuuuccuccaucuggucaaaauaccaacccauagacacauuguagggaagccuugccccaaaccucauagguugaaccacaugggcaucugcucuuguggucuauauaaacagccaggaguacccguuagauggaagagauaa

SEQ ID NO: 417 - RNA, 1473 nt, Artificial Sequence
  derived and/or modified protein sequence (wt) from LASV(ONM-299;Clade III)__ANH09734__GPC
auggggcagauagugacauucuuccaagaaguuccucaugucauugaggaaaucaugaacaucguucuaaucacuuugucccuacuugcaaucuugaagggacuguacaacuuugcuacauguggccucauuggauugauaacauuccuuuuccucugugggagaucaugcucgaugauuuacaaaggaagcuaucaacuugaaacccuugaguugaacauggagacacuuaacaugaccaugcccuuauccugcacaaaaaacaacagucaccacuauauaagaguggguaaugaaacagggcucgaauugacucuaaccaacacaagcauuauaggccacaaguuuugcaaucuuucugaugcacacaaaaagaaccuuuaugaucauucucucaugagcaucaucuccacuuuucaccugucuauccccaacuucaaucaauaugaggccaugagcugugacuucaauggggguaaaaucagcauucaguacaaccuaagucacacauaugcaggggaugcagcuaagcauuguggcacuguagcaaaugguguguugcaaaccuucaugagaauggcuuggggcgggaguuauauugcacuugacucaggccgagggaauugggacugcauaaugaccagcuaccaauacuuaaucauucagaacacgaccugggaggaccacugucaguucucuagaccaucaccuauugguuaucuugggcuucucucccaaaggacuagagacauuuacauuagcaggagacuguuagggacauucacauggacgcuaucagacucugaaggcaaagaaaccccaggagguuacugcuuaaccagauggaugcuaauugaagcugaacugaaauguuuuggaaacaccgcaguagccaaaugcaaugaaaaacaugaugaagaguuuugugacaugcugaggcucuuugacuuuaacaagcaagccauucagagauugaaaacugaggcucagaugagcauucagcucauuaauaaagcagugaaugcucucauaaaugaccagcuuauaaugaaaaaccaucuucgagacauuauggguauaccauacugcaauuacaguaaauacugguaucucaaccacacgucuacaggcagaacuucacuaccaaagugcuggcuuguuucaaauggauccuaucucaaugaaacucacuuuucagaugauauagagcaacaagcugacaauaugauaacggaaauguuacagaaggaauacauugauagacaggggaagacuccacucggacuaguugacguguuuguguucaguacaagcuucuauuugaucagcauuuuccuucaucuaguuaaaauaccaacucauaggcacauugugggcaaaucaugucccaaaccccauagacuaaaucacauggguauuuguucuugugggcuguacaaacaaccaggaguaccugugagauggaagagauga

SEQ ID NO: 418 - RNA, 1473 nt, Artificial Sequence
  derived and/or modified protein sequence (wt) from LASV(ONM-700;Clade III)__ANH09738__GPC
auggggcagauagugacauucuuccaagaaguuccucaugucauugaggaaaucaugaacaucguucuaaucacuuugucccuacuugcaaucuugaagggacuguacaacuuugcuacguguggucucauuggauugauaacauuccuuuuccucugugggagaucaugcucgaugauuuacaaaggaagcuaucaacuugaaacccuugaguugaacauggagacacuuaacaugaccaugcccuuauccugcacaaaaaacaacagucaccacuauauaagaguggguaaugaaacagggcucgaauugacucuaaccaacacaagcauuauaaaccacaaguuuugcaaucuuucugaugcacacaaaaggaaccuuuaugaucauucucucaugagcaucaucuccacuuuucaccugucuauccccaacuucaaucaauaugaggccaugagcugugacuucaauggggguaaaaucagcauucaguacaaccuaagucacacauaugcaggggaugcagcuaagcauuguggcacuguagcaaaugguguguugcaaaccuucaugagaauggcuuggggcgggaguuauauugcacuugacucaggccgagggaauugggacugcauaaugaccagcuaccaauacuuaaucauucaaaacacgaccugggaggaccacugucaguucucuagaccaucaccuauugguuaucuugggcuucucucccaaaggacuagagacauuuacauuagcaggagacuguuagggacauucacauggacgcuaucagacucugaaggcaaagaaaccccaggagguuacugcuuaaccagauggaugcuaauugaagcugaacugaaauguuuuggaaacaccgcaguagccaaaugcaaugaaaaacaugaugaagaguuuugugacaugcugaggcucuuugacuuuaacaagcaagccauucagagauugaaaacugaggcucagaugagcauucagcucauuaauaaagcagugaaugcucucauaaaugaccagcuuauaaugaaaaaccaucuucgagacauuauggguauaccauacugcaauuacaguaaauacugguaucucaaccacacgucuacaggcagaacuucacuaccaaagugcuggcuuguuucaaauggauccuaucucaaugaaacucacuuuucagaugauauagagcaacaagcugacaauaugauaacggaaauguuacagaaggaauacauugauagacaggggaagacuccacucggacuaguugacguguuuauguucaguacaagcuucuauuugaucagcauuuuccuucaucuaguuaaaauaccaacucauaggcacauugugggcaaaucaugucccaaaccccauagacuaaaucacauggguauuuguucuugugggcuguacaaacaaccaggaguaccugugagauggaagagauaa

SEQ ID NO: 419 - RNA, 1473 nt, Artificial Sequence
  derived and/or modified protein sequence (wt) from LASV(Weller;Clade III)__AAT49010__GPC
augggacagauugugacauucuuccaagaagucccucaugucauugaggagguaaugaacaucguccucauagcauuguccguuuuggcaauuuuaaaggggcucuacaacuuugccacaugcggcuugauaggccuuguaacauuccuccuacuuucugggaggucaugcucaaugaucuacaaaggaguuuaugaacuacagacccuugaauugaacauggagacauugaacaugacuaugccauuguccugcacaaagaacaccagucaucauuacauccgugugggaaaugauacaggacuugaacucacccugaccaacgaaacuuuacuccaccauaaguucugcaaccucucagaugcucauaagagaaaucuuuaugaucaugcccucaugagcaucauuucuacuuuccaucuauccauccccaacuuuaaccaauaugaagcaaugaguugugacuuuaauggugggaagaucacagugcaauacaaccuaagucacaguuaugcaguugaugcagcaaaacacugcggcacaguagcaaaugguguguugcagacauuuaugagaauggcuuggggaggcagcuauauugcccuugauucuagacaugggaacugggacuguauaaugaccaguuaucaauacuuaauuauccagaauacaacuugggaagaccacugccaguucuccagaccaucuccuauugguuaucucgggcuccucucacaaagaaccagggacauuuacauuaguaggagauuauuaggaacguuuacuuggacacucucugacucugaaggaaaugagacgccaggaggauacugucucaccagguggauguuaauugaggcugagcugaaguguuuuggaaacacagcaguugccaagugcaaugaaaaacaugaugaagaguuuugugacaugcuaagacuauuugacuuuaacaaacaagccauuaggagguuaaagacagaagcccaaaugaguauacaauugaucaacaaagcagucaaugccuuaauaaaugaucaguugauuaugaagaaucaucugagagauauuauggguauaccauacugcaauuacaguaaauauugguaccucaaucacacaucaacagggaagacuucauugccuagauguuggcuuguuucaaacgggucauaccuuaaugaaacucacuucucugaugauauugaacaacaagcugauaacaugauaacugagaugcugcaaaaggaauaccuagauagacaagggaagaccccuuuaggguuaguugaucuuuuugucuuuagcacaaguuuuuauuugaucaguaucuuccuccaucugaucaaaauaccaacccauaggcacauuguggggaaaccuugccccaaaccccacaggcugaaucacaugggcaucugcucuugugguuuauacaaacagccaggggugcccgucagauggaagagauaa

SEQ ID NO: 420 - RNA, 1476 nt, Artificial Sequence
  derived and/or modified protein sequence (wt) from LASV(BA366;Clade IV)__ADI39451__GPC
augggacagauugugacauucuuccaagaggugccucaugugauagaggaggugaugaacauugugcucauugcauugucugugcuugcaguacugaaaggccuguacaauguagcaacauguggccucauuggccucauugccuuucuucuacuuuguggcagauccuguacaacaacccuuuauaaggggguguaugaacuucaagcucuggaauugaacauggaaacacucaacaugaccaugccucucuccugcacaaaaaacaacagucaccauuauauaauggugggcaaugagacaggauuggaauugacuuugaccaacacaagcauuaucaaccacaaguucuguaaccucucugaugcucacaaaaagaaucuuuacgaucacgcucucaugagcauaaucucaacuuuccacuuguccauucccaacuucaaucaguaugaggcaaugaguugugacuucaaugggggaaagaucagugugcaguacaaucugagucacacuuaugcuguggacgcagccaaucauuguggcacagucgcuaaugguguuuugcagaccuuuaugaggauggccuggggugggagcuauauugcucuugacucaggccgugguaguugggacugcauuaugaccaguuaucaguauuugauaauucaaaacacaaccugggaagaccacugucaauucucaagaccaucccccauugguuaucuugggcuccuaucacagagaacaagagauaucuacauuaguaggagacuguuaggcacauucaccuggacauugucagauucugaaggcaaagauacaccaggaggauacugcuugaccagguggauguugauugaggcugaguugaaaugcuuugguaacacagcuguggcaaaaugcaaugaaaaacacgaugaagaauucugugacaugcuuagguuguuugauuucaacaagcaagccauucaaagauugaaagcugaggcacaaaugagcauacaauuaauuaacaaagcagugaaugcucuaauaaaugaccagcuaauuaugaagaaucauuugcgugacaucaugggaauaccauacuguaauuauaguaaguauugguaucucaaucacacaaucacugggaggacuucccuaccaaaaugcuggcuuguguccaaugguucauaccugaaugaaacucacuucucugaugauauagagcagcaagcugacaauaugaucacugaaaugcugcaaaaggaauauauagagagacaggggaagacaccauuaggucuaguugaccucuuuguguuuagcacgaguuuuuaucucauaaguauuuuccuacacuuaaucaagauaccaacucauagacacauugugaacaaaccguguccuaaaccccacaggcugaaucacauggguguguguucaugcggucucuacaagcagccuggcguuccugugagauggaagagauga

SEQ ID NO: 421 - RNA, 1476 nt, Artificial Sequence
  derived and/or modified protein sequence (wt) from LASV(G1180-SLE-2010;Clade IV)__AIT17168__GPC
augggacagauagugacauucuuccaggaagugccucauguaauagaagaggugaugaacauuguucucauugcacugucuauacuagcagugcugaaaggucuguacaauuuugcaacauguggccucguuggucuacucacuuuccuccuguuguguggcagaucuugcacagcuagucguuacaaagggguuuaugagcuucagacucuggaacuaaacauggagacacucaauaugaccaugccucucuccugcacaaagaacaacagucaucauuauauaaugguggguaaugagacaggacuagaacugacuuugacuaacacgagcaucauuaaucauaaauuuugcaaucugucugaugcccacaaaaagaaccuuuaugaccacgcucuuaugagcauaauuucaacuuuccacuuauccauccccaacuucaaucaguaugaggcaaugagcugcgauuuuaaugggggaaagauuagugugcaguacaaccugagucacagcuaugcuggggaugcagccaaucauugugguacuguugcaaauggugucuugcagaccuucaugaggauggcuuggggugggagcuacauugcucuugacucaggccauggcaguugggacuguauuaugacuaguuaucaauaucugauaauccaaaauacaaccugggaagaucacugccaguucucaagaccaucucccauugguuaucucgggcuccuuucacaaagaaccagagauauuuacauuaguagaagacuacuaggcacauucacauggacacugucagauucugaaggcaaggacacaccagggggauauugucugaccagauggaugcuaauugaagcugaacuaaaaugcuucgggaacacagcuguggcaaaauguaaugagaagcaugaugaggaauuuugugacaugcugaggcuguuugacuucaacaaacaagccauucaaagguugaaagcugaagcacaaaugagcauucaauugaucaacaaggcaguaaaugcuuugauaaaugaccaacuuauaaugaagaaccauuuacgagacaucaugggaaucccauacuguaauuacagcaaguauugguaccucaaccacacaaccacugggaaaacaucacugccuaaguguuggcuuguaucaaaugguucauacuuaaaugagacccacuuuucugaugauauugagcaacaagcugacaacaugaucacugagauguuacagaaggaguauauggaaaggcagggcaagacaccauugggccuaguugaccucuuuguguuuagcacaaguuucuaucucauuagcaucuuccuucaccuggucaaaauaccaacucauaggcauauuguaggcaagucgugucccaaaccucauagauugaaucacaugggcauauguuccuguggacucuacaaacagcccggugugccugugaaauggaagagauga

SEQ ID NO: 422 - RNA, 1476 nt, Artificial Sequence
  derived and/or modified protein sequence (wt) from LASV(G1190-SLE-2010;Clade IV)__AIT17172__GPC
augggacaaauagugacauucuuccaggaagugccccaugucauagaagaggugaugaacaucguucucauugcacugucuauacuagcaguguugaaagguuuguacaauuuugcaacauguggccucguuggcuuggucacuuuccuccuguuguguggcaggucuugcacaacuagccuuuacaaggggguuuaugagcuucagacucuggaacuaaacauggaaacacucaauaugaccaugccucucuccugcacaaagaacaauagucaucauuauauaauggugggcaaugagacaggacuagaacugaccuugaccaacacgagcauuauuaaccauaaauuuugcaaucugucugaugcccacaaaaagaaccucuaugaccacgcucuuaugagcauuaucucaacuuuccacuuguccaucccuaacuucaaucaguaugaggcaaugagcugcgauuucaaugggggaaagauuaguguacaguacaaccugagccacagcuaugccggggacgcagccaaccauuguggcacuguugcaaaugguguauuacagacuuucaugaggauggcuuggggugggagcuacaucgcucuugacucaggccguggcaggugggacuguauuaugacuaguuaucaauaucugauaauccaaaauacaaccugggaagaucacugccaauucucgagaccaucucccaucgguuaucucgggcuccuuucacaaaggaccagagauauuuauauuaguagaaggcuacuaggcacauucacauggacacugucagauucugaaggcaaggacacaccagggggauauugucuaaccagauggaugcuaauugaggcugaguuaaagugcuucgggaacacagcuguggcaaaauguaaugagaagcaugaugaggaauuuugugacaugcugagguuauuugacuuuaacaaacaagccauucaaagguugaaagcugaggcacaaaugagcauucaguugaucaacaaagcaguaaaugcuuugauaaaugaccaacuuauaaugaagaaccaucuacgggacaucauggggauuccauauuguaauuacagcaaguauugguaccucaaccacacaacuacuggaaaaacaucacugcccaaguguuggcuuguaucaaaugguucauaccugaacgagacccacuuuucugaugacauugaacaacaagcugacaacaugaucacugagauguuacagaaggaguauauggagaggcaggggaagacaccauugggucugguugaccucuuuguguucagcacaagcuucuaucucauuagcaucuuccuucaccuaguuaaaauaccaacucauaggcauauuguaggcaagccgugucccagaccucacagguugaaucauaugggcauuuguuccuguggacucuauaaacagccuggugugccuguaaaauggaagagauga

SEQ ID NO: 423 - RNA, 1476 nt, Artificial Sequence
  derived and/or modified protein sequence (wt) from LASV(G1200-LIB-2010;Clade IV)__AIT17176__GPC
auggggcagauagucacguuuuuccaagaagugccucauguuauagaggaagugaugaacauugugcucauugcacugucuuugcuagcagugcugaaaggcuuguacaauguugcaacauguggucucauugguuugaucaccuuccuuuuguugugugguaggucuuguacaaccaaucuuuacaagggagucuaugagcuucaagcccuggaauuaaacauggagacgcucaacaugaccaugccucucuccugcacaaagaacaauagucaccacuauauaaugguaggcaaugaaacaggauuggagcugaccuuaaccaacacaagcauuaucaaucacaaguuuugcaaccugucugaugcccacaaaaagaaccucuaugaucacgccuuaaugagcauaaucucaacuuuccacuuauccauuccuaacuuuaaucaguaugaagcaaugagcugcgauuucaaugggggaaggaucagugugcaguauaaccuaagucacagcuaugcuggggaugcagccagccauugugguacaauugcgaaugguguuuugcagacuuuuaugaggauggcuuggggugggaguuauauugcucuugauucaggccaugguggaugggacugcaucaugacuaguuaccaauaucugauaauucagaacacaaccugggaagaucacugccaguucucaagaccgucuccuaucggcuaccucgggcuccuuucacaaagaaccagagacauuuauaucaguagaagacuacugggcacauucacauggacauugucagauucugaaggcaaggauacaccagggggguacugucuaacuagguggaugcugauugaagcugaauugaaaugcuuuggcaacacagcuguggccaaauguaaugaaaagcaugaugaggaauuuugugauauguugagacuguuugacuucaacaaacaagccauucaaaggcugaaagcagaagcacagaugagcauccagcugaucaauaaagcgguaaaugccuugauaaaugaccaacuaauaaugaaaaaccaucugcgagacauuauggggauuccauacuguaacuacagcaaguauugguaucucaaccacacagucacugggaaaacaucguugccuaagugcuggcuugugucaaauggcucauaucugaacgaaacccacuucucugaugauauugagcaacaggccgacaacaugauaacugagaugcugcagaaggaauacauggagaggcaggggaagacaccauuaggccugguugaccucuuuguguucagcacaaguuuuuaucucaucaguaucuuccuucaccuagucaaaauaccgacucauaggcauguuguaggaaaaccguguccuaaaccucacagacugaaucacaugggcauaugcucuugugggcucuacaagcaaccugguguaccuguaagauggaagagauga

SEQ ID NO: 424 - RNA, 1476 nt, Artificial Sequence
  derived and/or modified protein sequence (wt) from LASV(G1442-SLE-2011;Clade IV)__AIT17180__GPC
augggacaaauagugacauucuuucaggaagugccucaugugauagaggagguaaugaacauugugcucauugcacuauccauacuggcagugcugaagggucuauacaauguugcaacaugcggccugauugguuuagucaccuuccuauuguuaugugguaggucuugcacaacaacucuuuacaaaggaguuuacgaacuucagacucuggaauuaaacauggagacacucaauaugacuaugccucucucuuguacaaagaacaacagucaccacuauauaaggguggguaaugagacaggacuagaguugacccugaccaacacaagcaucaucaaucacaaguuuugcaaucuaucugaugcucacaaaaagaaccucuaugaucaugcuuugaugagcauaaucucgacuuuucacuuguccauucccaacuucaaccaauaugaggcaaugagcugugacuucaauggagggaagauuagugugcaguauaaccugagucacagcuaugcuggagaugcagccaaccauugugguacaguugcaaaugguguuuuacaaaccuucaugaggauggcuuggggugggaguuacaucgcccuugacucaggucguggcaauugggacuguauuaugacuaguuaucaauaccuaauaauucagaauacgaccugggaugaucauugccaauucucaagaccaucccccaucgguuaucuugggcuccucucacaaaggaccagagauguuuauaucaguagaagacugcuaggcacauucacauggacacugucagauucugaaggcaaggacacaccaggaggguacugucugaccagguggaugcuaauugaagcugaacugaaaugcuuuggcaacacagcuguagcaaaauguaaugagaaacaugaugaagaauucugugacaugcuaaggcuguuugacuucaauaaacaagcuauucagagguugaaagccgaagcacaaaugaguauucaguugaucaacaaagcagugaaugcuuugauaaaugaccaacuaauaaugaaaaaccaucuacgggacaucauggggauuccauacugcaauuacagcaaguacugguaucucaacaacacagccacugggaaaacaucacugcccaaauguuggcuuauaucaaauggcucauauuugaacgaaacucacuucucugaugacauugaacaggaagcugacaauaugaucacugagauguuacaaaaagaauacauggagaggcaggggaagacaccauuaggucugguugaccucuuuguguucagcacaaguuucuaucucauuagcaucuuccuucaccuagucaaaauaccaacucacaggcauauugugggcaaaucauguccuaaaccccauagguugaaucacauggguauuugcucuuguggacuuuauaaacaacccggugugccuguaagauggaagagauga

SEQ ID NO: 425 - RNA, 1476 nt, Artificial Sequence
  derived and/or modified protein sequence (wt) from LASV(G1529-SLE-2011;Clade IV)__AIT17184__GPC
augggacaaauagugacauuuuuccaggaagugccucaugugauagaggaagugaugaacauuguacucaucgcacugucuauucuugcaguguugaaggguuuguacaauguugcaacauguggccuuauugguuugguuaccuuucuuuuacugugugguagaucuugcacaaccacucuguacaaaggagucuaugaacuucaggcccuggaauuaaacauggagacacucaauaugaccaugccucucucuugcacaaagaacaauagucaccacuauauaaggguggguaaugagacaggacuagaacuaacccugaccaacacaagcaucaucgaucauaaguuuugcaacuugucugaugcccacaaaaagaaccuuuaugaucaugcacuuaugagcauaaucucaacuuuccacuuguccauuccuaacuuuaaucaauaugaagcaaugaguugugacuuuaauggagggaaaauuagugugcaguacaaccuaagucacagcuaugcuggagaugcagccaaccauuguggcacaguugcaaauggcguuuugcagaccuucaugaggauggccuggggugggagcuacauugcucuugauucaggccgcaauggaugggauugcauuaugacuaguuaucaauaucugauaauucagaauacaaccugggacgaucacugccaauucucaagaccaucucccauugguuaccuugggcuccucucacaaagaaccagagacaucuacauuagcaggagacuguugggcacauucacauggacacugucagauucugaagguaaggacacaccagggggguacugucugaccagauggaugcuaauugaggcugaacuuaaauguuucggcaacacagcuguggccaaauguaaugagaagcaugaugaagaauucugugacaugcugaggcuauuugauuucaacaaacaagcuauccgaagguugaaggcugaagcacaaaugagcauucaguugaucaacaaggcugugaacgcuuuaauaaaugaucaacugauaaugaaaaaccaucugcgggauaucauggggauuccauacuguaauuacagcaaguacugguaucucaacaacacagccacugggaaaacaucacugccuagaugcuggcuugugucaaauggcucauaccuaaaugagacccacuucucugaugacauugaacaacaagcugacaacaugaucacugagauguuacaaagggaguacauggagagacagggaaagacaccauuaggucuggucgaccucuuuguguucagcacaaguuuuuaucuuauuaguaucuuccuucaccuagucaaaauaccaacucauagacacauugugggcaaaccgugucccaaaccucacagguugaaucauaugggcauaugcuccuguggacucuauaaacaaccugguguaccuguaaaauggaagagauaa

SEQ ID NO: 426 - RNA, 1476 nt, Artificial Sequence
  derived and/or modified protein sequence (wt) from LASV(G1618-SLE-2011;Clade IV)__AIT17188__GPC
augggacaaauagugacauuuuuccaggaagugccucauguuauagaagaagugaugaacauuguucucauugcacuguccauacuagcagugcugaagggucuguacaacuuugcaacauguggcuucguugguuuggucaguuuccucuuguuguguggcaggucuugcacaaccagucuuuacaaagggguuuaugagcuucagacucuggaguuaaacauggagacacucaacaugaccaugccucucucuugcacaaagaacaacagucaucauuacauaauggugggcaaugagacaggacuggaauugaccuugaccaacacgagcauuauuaaucauaaauuuugcaaucugucugaugcccauaagaagaaccucuaugaucacgcucuuaugagcauaaucucaaccuuccacuuguccauccccaacuucaaucaguaugaagcaaugagcugugauuuuaaugggggaaagauuaguguacaguacaaccugagucacagcuaugcuguagaugcagccaaccauuguggcacaguugcaaauggugucuuacagacuuucaugaggauggccuggggugggagcuauauugcucuugacucaggccauggcagcugggacugcauaaugaccagcuaucaauaucugauaauccaaaacacaaccugggaagaccacugccaauucucaagaccaucucccaucggcuaucuugggcuccucucacaaaggaccagagauaucuauauuaguaggagacuacuggguacauucacauggacacugucagauucugaaggcaaggacacaccagggggguauugucugacaagguggaugcuaauugaagcugaauugaaaugcuucgggaacacagcuguggcaaaauguaaugagaaacaugaugaggaauuuugugacaugcugaggcuguuugacuucaacaaacaagccauucaaagguuaagagcugaggcacaaaugagcauucaguugauuaacaaagcagugaaugcuuugauaaaugaccaacuaauaaugaagaaccaucuacgggacaucauggggauuccauacuguaauuacagcaaguacugguaccuuaaccacacaacuacugggagaacaucacuacccaaauguuggcuuguaucgaaugguucauacuuaaacgagacccacuuuucugaugauauugaacagcaagcugacaacaugaucacugagauguuacaaaaagaguacauggaaaggcaggggaagacaccauugggucuaguugaccucuuuguguucagcacaaguuucuaucucauuagcaucuuccuucauuuagucaagauaccaacucauaggcauauuguaggcaagucgugucccaaaccucacagauugaaucauaugggcauaugcuccugcggacucuauggacagcccggugugccugugaaauggaagagauga

SEQ ID NO: 427 - RNA, 1476 nt, Artificial Sequence
  derived and/or modified protein sequence (wt) from LASV(G1646-SLE-2011;Clade IV)__AIT17192__GPC
augggacaaauagugacauuuuuccaggaagugccucauguuauagaagaagugaugaacauuguucucauugcacuguccauacuagcagugcugaagggucuguacaacuuugcaacauguggcuucauugguuuggucaguuuccucuuguuguguggcaggucuugcacaaccagucuuuacaaagggguuuaugagcuucagacucuggaguuaaacauggagacacucaacaugaccaugccucucucuugcacaaagaacaacagucaucauuacauaauggugggcaaugagacaggacuggaacugaccuugaccaacacgagcauuauuaaucauaaauuuugcaaucugucugaugcccauaagaagaaccucuaugaucacgcucuuaugagcauaaucucaaccuuccaccuguccauccccaacuucaaucaguuugaagcaaugagcugugauuuuaaugggggaaagauuaguguacaguacaaccugagucacagcuaugcuguggaugcagccaaccauuguggcacaguugcaaauggugucuuacagacuuucaugaggauggccuggggugggagcuacauugcucuugacucaggccauggcagcugggacugcauaaugacuaguuaucaauaucugauaauccaaaacacaaccugggaagaccacugccaauucucaagaccaucuccuaucgguuaucuugggcuccucucacaaaggaccagagauaucuauauuaguaggagacuacuggguacauucacauggacacugucagauucugaaggcaaggacacaccagggggguauugucugacaagguggaugcuaauugaagcugaacugaaaugcuucgggaacacagcuguggcaaaauguaaugagaaacaugaugaggaauuuugugacaugcugaggcuguuugacuuuaacaaacaagccauucaaagguuaaaagcugaggcacaaaugagcauucaguugauuaacaaagcagugaaugcuuugauaaaugaccaacuaauaaugaagaaccaucuacgggacaucauggggauuccauacuguaauuacagcaaguacugguaccuuaaccacacaacuacugggagaacaucacugcccaaauguuggcuuguaucgaaugguucauacuuaaacgagacccacuuuucugaugauauugaacaacaagcugacaacaugaucacugagauguuacaaaaagaguauauggaaaggcaggggaagacaccauugggucuaguugaccucuuuguguucagcacaaguuucuaucucauuagcaucuuccuucauuuagucaagauaccaacucauaggcauauuguaggcaagucgugucccaaaccucacagauugaaucacaugggcauaugcuccugcggacucuauggacagcccggugugccugugaaauggaagagauga

SEQ ID NO: 428 - RNA, 1476 nt, Artificial Sequence
  derived and/or modified protein sequence (wt) from LASV(G1647-SLE-2011;Clade IV)__AIT17196__GPC
augggacaaauagugacauucuuccaggaagugccccaugugauagaagaggugaugaacauuguucucauugcacugucuauacuagcagugcugaagggucuguacaaucuugcaacauguggccucguuggcuuggucacuuuucuccuguuguguggcaggucuuguacaacuagccuuuacaaagggguuuaugagcuucagacucuggaacuaaacauggaaacacucaauaugaccaugccucucuccuguacaaagaacaauagccaucauuacauaauggugggcaaugagacaggacuagaacugaccuugaccaacacgagcauuauaaaccauaaauuuugcaaucugucugaugcccacaaaaagaaccucuaugaccacgcucuuaugagcauuaucucaaccuuccacuuguccaucccuaacuucaaucaauaugaggcaaugagcugcgauuuuaaugggggaaagaucagugugcaguacaaccugagucacagcuaugccggggaugcagccaaccauuguggcacuguugcaaaugguguauuacagacuuucaugaggauggcuuggggugggagcuacauugcucuugacucaggccguggcaggugggacuguauuaugacuaguuaucaauaucugauaauccaaaauacaaccugggaagaucacugccaauucucgagaccaucucccaucgguuaucucgggcuccucucacaaaggaccagagauauuuauauuaguagaaggcuacuaggcacauucacauggacacugucagauucugaaggcaaggacacaccagggggauauugucuaaccagauggaugcuaauugaggcugaacuaaagugcuucgggaacacagcuguggcaaaauguaaugagaagcaugaugaggaguuuugugacaugcugaggcuguuugacuucaacaagcaagccauucaaagguugaaagcugaagcacaaaugaacauucaguugauuaacaaagcaguaaaugcuuugauaaaugaccaacuuauaaugaagaaccaucuacgggauaucauggggauuccauacuguaauuacaguaaguauugguaccucaaccacacaacuacugggaaaacaucacugcccagauguuggcuuguaucaaaugguucauaccugaacgagacccacuuuucugaugauauugaacaacaagcugacaacaugaucacugagauguuacagaaggaguauauggagaggcaggggaagacaccauugggucugguugaccucuuuguguucagcacaagcuucuaucucaucagcaucuuccuucaccuaguuaaaauaccaacucauaggcauauuguaggcaagccgugucccaaaccucacagguugaaucauaugggcauuuguuccuguggauucuauaaacagccuggugugccugugaaauggaagagauga

SEQ ID NO: 429 - RNA, 1476 nt, Artificial Sequence
  derived and/or modified protein sequence (wt) from LASV(G1774-SLE-2011;Clade IV)__AIT17204__GPC
augggacaaauagugacauucuuccaggaagugccccauguaauagaagaggugaugaacauuguucucauugcacuguccauacuagcagugcugaaaggucuguacaaccuugcaacauguggccucguuggcuuggucacuuuccucuuguuguguggcaggucuugcacaagcagccuuuauaaagggguuuaugagcuucagacucuggaacugaacauggaaacacucaauaugaccaugccucucuccugcacaaaaaacagcagucaucauuacauaagggugggcaaugagacaggacuagaacugaccuugaccaacacgagcauuauuaaucauaaauuuugcaaucugucugaugcccacaaaaagaaccucuaugaccacgcucucaugagcauuaucucuacuuuccacuuguccaucccuaacuucaaucaguaugaggcaaugagcugcgauuucaaugggggaaagauuagugugcaguacaaccuaagucacagcuacgccggggaugcagccaaccauuguggcacuguugcaaaugguguacuacagacuuucaugaggauggcuuggggugggagcuacauugcucuugacucaggccaugacaggugggacuguauuaugacuaguuaucaauaccugauaauucaaaauacaaccugggaagaucacugccaguucucgagaccaucuccuaucgguuaucuugggcuccucucacaaaggaccagagauauuuacauuaguagaaggcuacuaggcacauucacauggacacugucagauucugaaggcaaggacacaccagggggauauugucugaccagauggaugcuaauugaggcugaacuaaagugcuucgggaacacagcuguggcaaaauguaaugagaagcaugaugaagaauuuugugacaugcugaggcuguuugacuucaacaagcaggccauucaaagguugaaggccgaagcacaaaugagcauucaguugaucaacaaagcaguaaaugcuuugauaaaugaccaacuuauaaugaagaaccaucugcgggacaucauggggauuccauacuguaauuacagcaaguauugguaccucaaccacacaauuacugggaaaacaucacugcccaaauguuggcuuguaucaaaugguucauacuugaacaagacccacuuuucugaugacauugaacaacaagcugacaacaugaucacugagauguuacagaaggaguauauggagaggcaggggaagacaccauugggucuaguugaccuuuuuguguucagcacaaguuuuuaucucauuagcaucuuccuucaccuaaucaagauaccaacucauaggcacauuguaggcaaaccgugucccaaaccucacagguugaaucauaugggcaucuguuccuguggacucuacaaacagccuggugugccugugaaauggaagagauga

SEQ ID NO: 430 - RNA, 1476 nt, Artificial Sequence
  derived and/or modified protein sequence (wt) from LASV(G1792-SLE-2011;Clade IV)__AIT17208__GPC
augggacagauagugacauucuuccaggaagugccucauguaauagaagaggugaugaacauuguucucauugcacuguccauacuggcagugcugaaaggucuguacaauuuugcaacauguggccucauugguuuggucacuuuccuccuguuguguggcaggucuugcacaacuagucuuuauaaagggguuuaugagcuucagacucuggaacuaaauauggagacacucaauaugaccaugccucucuccugcacaaagaacaacagucaucauuacauaaugguggguaaugagacaggacuggaacugaccuugaccaacacaagcaucauuaaucauaaauuuugcaaucugucugaugcccacaaaaagaaccucuaugaccaugcccuuaugagcauaauuucaacuuuccacuuguccauccccaacuucaaucaguaugaggcaaugagcugcgacuucaaugggggaaagauuagugugcaguacaaccugagucacagcuaugcuggggaugcggccaaccacuguggcacuguugcaaauggugucuuacagacuuucaugaggauggcuuggggugggaguuacauugcucuugacucaggccguggccagugggacuguauuaugacuaguuaucaauaucugauaauccaaaauacgaccugggaagaucacugccaauucucaagaccaucacccaucgguuaucucgggcuccucucacagaggaccagagauauuuauauuaguagaagacuacuaggcacauuuacauggacacugucagauucugaagguaaggacacaccagggggauauugucugaccagguggaugcuaauugaagcugaauuaaaaugcuucggaaacacagcuguagcaaaauguaaugagaagcaugaugaggaauuuugugacaugcuaaggcuguuugacuucaacaaacaggcuauucaaaggcugaaagcugaagcacaaaugaguauucaguugaucaacaaggcaguaaaugcuuugauaaaugaccaacuuauaaugaagaaucaucuccgggacaucauggggauuccauacuguaauuacagcaaguauugguaccucaaccacacaacuacugggaaaacaucacugcccaaauguuggcuuguaucaaaugguucauacuugaacgagacccacuuuucugaugauauugaacaacaagcugacaacaugaucacugagauguugcagaaggaguacauggagaggcaggggaagacaccauugggccugguugaccucuuuguguucagcacaaguuucuaucucauuagcaucuuccuucaccuaguuaaaauaccaacucauaggcauauuguaggcaagucaugucccaaaccucacagauugaaucauaugggcauauguucuuguggacucuauaaacaacccggugugccugugaaauggaagagauga

SEQ ID NO: 431 - RNA, 1476 nt, Artificial Sequence
  derived and/or modified protein sequence (wt) from LASV(G1897-SLE-2011;Clade IV)__AIT17210__GPC
augggacaaauagugacauucuuccaggaggugccccauguaauagaagaggugaugaacauuguucucauugcacugucuauacuagcagugcugaaagguuuauacaaucuugcaacauguggccucguuggccuggucacuuuccuccuguuguguggaaggucuugcacaaccagccuuuacaaagggguuuaugagcuucagacucuggaacuaaacauggaaacacucaauaugaccaugccucucuccugcacaaagaacaacagucaucauuacauaauggugggcaaugagacaggauuagagcugaccuugaccaacacgagcauuauuaaccauaaauuuugcaaucugucugaugcccacaaaaagaaccucuaugaccacgcucuuaugagcaucaucucaacuuuccacuuguccaucccuaacuucaaucaguaugaggcaaugagcugcgauuucaaugggggaaagaucagugugcaguacaaccugagccacagcuaugccggggaugcagccaaccauuguggcacuguugcaaaugguguguugcagaccuucaugaggauggcuuggggugggagcuacauugcucuugacucaggccgugacaggugggauuguaucaugacuaguuaucaauaucuaauaauccagaauacaaccugggaagaucacugucaauucucgagaccauccccuaucgguuaucucggacuccucucacaaaggaccagagauauuuauauuaguagaaggcugcugggcacauucacauggacacugucagauucugaaggcaaggacacaccagggggauauugucugaccagauggaugcuaauugaggcugaacuaaagugcuuugggaacacagcuguggcaaaauguaaugagaagcaugaugaggaauuuugugacaugcugaggcuguuugacuucaacaaacaagccauucaaagguugaaagcugaagcacaaaugagcauucaguugaucaacaaagcaguaaaugcuuuaauaaaugaccaacuuauaaugaagaaccaucuacgggacaucauggggauuccauacugcaauuacagcaaguauugguaccucaaccacacaacuacugggaaaacaucacugcccaaauguuggcuuguaucaaaugguucauaccugaaugagacccacuuuucugaugauauugaacaacaagcugacaacaugaucacugaaauguuacagaaggaguauauggagaggcaggggaagacaccauugggucuaguugaccucuuuguguuuagcacaaguuucuaucucaucagcaucuuccuucgccuagucaaaauaccaacucacaggcauauugugggcaagccgugucccaaaccucacagguugaaucauaugggcauuuguucuuguggacucuacaaacagccuggcgugccugugaaauggaagagauga

SEQ ID NO: 432 - RNA, 1476 nt, Artificial Sequence
  derived and/or modified protein sequence (wt) from LASV(G1932-SLE-2011;Clade IV)__AIT17212__GPC
augggacaaauagugacuuucuuccaggaaguaccccaugugauagaagaggugaugaacauuguucucauugcacugucuauacuagcagugcugaagggucuguacaaucuugcaacauguggccucguuggcuugguuacuuuucuccuguuguguggcaggucuuguacgacuagccuuuacaaagggguuuaugagcuucagacucuggaacuaaacauggaaacacucaauaugaccaugccucucuccuguacaaagaacaauagccaucauuacauaauggugggcaaugagacaggacuagaacugaccuugaccaauacgagcauuauaaaccauaaauuuugcaaucugucugaugcccacagaaagaaccucuaugaccacgcucuuaugagcauuaucucaaccuuccacuuguccaucccuaacuucaaucaguaugaggcaaugagcugcgauuuuaaugggggaaagaucagugugcaguacaaccugagucacagcuaugccggggaugcagccaaccauuguggcacuguugcaaaugguguauuacagacuuucaugaggauggcuuggggugggagcuacauugcucuugacucaggccgugguaagugggacuguauuaugacuaguuaucaauaucugauaauccaaaauacaaccugggaagaucacugccaauucucgagaccaucucccaucgguuaccucgggcuccucucacaaaggaccagagauauuuauauuaguagaaggcuacuaggcacauucacauggacacugucagauucugaaggcaaggacacaccagggggauauugucuaaccagauggaugcuaauugaggcugaacuaaagugcuucgggaacacagcuguggcaaaauguaaugagaagcaugaugaggaauuuugugacaugcugaggcuguuugacuucaacaagcaagccauucaaagguugaaagcugaagcacaaaugagcauucaguugaucaacaaagcaguaaaugcuuugauaaaugaccaacuuauaaugaagaaccaucuacgggauaucauggggauuccauacuguaauuacaguaaguauugguaccucaaccacacaacuacugggaaaacaucacugcccagaugcuggcuuguaucaaaugguucauaucugaacgagacccacuuuucugaugauauugaacaacaagcugacaacaugaucacugagauguuacagaaggaguacauggagaggcaggggaagacaccauugggucugguugaccucuuuguguucagcacaagcuucuaucucaucagcaucuuccuucaccuaguuaaaauaccaacucauaggcauauuguaggcaagccgugucccaaaccucacagguugaaucauaugggcauuuguuccuguggacucuauaaacagccuggugugccugugaaauggaagagauga

SEQ ID NO: 433 - RNA, 1476 nt, Artificial Sequence
  derived and/or modified protein sequence (wt) from LASV(G1959-SLE-2011;Clade IV)__AIT17216__GPC
augggacagauagugacauucuuccaggaaguaccucaugugauagaagaggugaugaacauuguccucauugcacugucuauacuagcagugcugaaaggucuguacaauuuugcaacauguggccucguugguuugguuaccuuccuccuguuguguggcaggucuugcacaaccagucuuuacaaaggggucuaugagcuucagacucuggaauuaaacauggagacacucaauaugaccaugccccucuccuguacaaagaacaacagucaucauuauauuaugguggguaaugagacaggucuagagcugaccuugaccaacacgagcaucauuaaucauaaauuuugcaaucugucugaugcccacaaaaagaaccucuaugaucacgcucuuaugagcauaauuucaacuuuccaucuguccauucccaacuucaaucaguaugaggcaaugagcugugauuucaaugggggaaagauuagugugcaguacaaccugagucacaguuaugcuggggaugcggccaaccauuguggcacuguugcaaaugguguccuacagaccuucaugaggauggcuugggguggaagcuacauugcucuugacucaggccauggcaggugggacugcauuaugacuaguuaucaguaccugauaauccaaaauacaaccugggaagaucacugccaguucucaagaccaucucccaucggcuaucucggacuccucucacaaaggaccagagauauuuauauuaguagaagacuacuaggcacauucacauggacacugucagauucugaagguaaggacacaccagggggauauuguuugaccagauggaugcuaauugaagcugaacuaaagugcuucgggaacacagcuguggcaaaauguaaugagaagcaugaugaggaauuuugugacaugcugaggcuguuugacuucaacaaacaagccauucaaagauugaaagcugaagcacaaaugagcauucaauugaucaacaaggcaguaaaugccuugauaaaugaccagcuuauaaugaagaaccaucuacgagacauaaugggaauuccauacuguaauuacagcaaguauugguaccucaaccacacaaccacugggaaaacaucacugccuaaauguuggcuuguauccaaugguucauacuugaaugagacccacuuuucugaugauauugaacaacaagcugacaacaugaucacugagauguuacagaaagaguacauggagaggcaggggaagacaccauugggccuagucgaccucuuuguguucagcacaaguuucuaucucauuagcaucuuucuucaccuagucaaaauaccaacucauagacauauuguaggcaagccgugucccaaaccucacagauugaacuacaugggcauauguuccuguggacucuacaaacagcccggugugccugugagauggaagagauga

SEQ ID NO: 434 - RNA, 1476 nt, Artificial Sequence
  derived and/or modified protein sequence (wt) from LASV(G2141-SLE-2011;Clade IV)__AIT17224__GPC
auggggcaaauaguaacauuuuuccaggaaguuccucaugugauagaggaagugaugaacauuguacucaucgcauugucuauacuagcagugcuaaaaggacuguacaauguugcaacauguggccuuauuggcuuggucaccuuccuccuguugugcgguagaucuugcacaaccacucucuacaaaggagucuaugagcuucaggcucuggaauuaaacauggagacacucaauaugaccaugccucucuccugcacaaagaacaacagucaccauuauauaaggguaggcaaugacacaggacuugaacugacccuaaccaacacaagcauuauccaacacaaauuuuguaaucugucugaugcucacaaaaagaaccucuaugaccacacucucaugagcauaauuucaacuuuccacuuguccauccccaauuucaaucaguaugaggcuaugagcugugacuucaauggggggaagauuagugugcaauacaacuuaagucacagcuaugcuggggaugcagccagccauugugggacaguugcaaaugguguucugcaaacuuucaugagaauggcuuggggugggagcuauauugcucuugacucuggucguggcaauugggacuguaucaugacuaguuaccaauaucugauaauucagaauacaaccugggaggaucauugccaauucucaagaccaucccccaucgguuaccuugggcuccucucacaaaggaccagagauauuuacauuaguagaaggcuacuggguacauucacauggacauugucagacuccgaaggcagagacacaccaggaggguacugucugaccagauggauguuaauugaggcugaacuaaaaugcuuugguaacacagcuguagcaaaaugcaaugaaaagcaugaugaggaauucugugauaugcugaggcuguuugacuucaacaaacaggccauccaaagauugaaaacugaagcacaaaugagcauccaguugaucaacaaagcagugaaugcuuugauaaaugaccaacuaaucaugaagaaccauuugcgggacaucauggggauuccauacugcaauuacaguaaguacugguaccuuaacaacacaaucacugggaagucaucauugccuaaaugcuggcuuguguccaacgguucauaucuaaaugagacccauuucucugaugacauugagcaagaagccgacaauaugaucacugagauguugcaaaaagaguacauggaaaggcagggaaagacaccacugggcuugguugaccucuuuguuuuuaguacaaguuucuaucuuauuagcaucuuccuccaccuagucaaaauaccaacccauaggcauauuguagguaaaccgugucccaaaccucacaggcuaaaccacaugggaguaugcucuuguggacucuacaaacaacccggugugccuguaagauggaagagauga

SEQ ID NO: 435 - RNA, 1476 nt, Artificial Sequence
  derived and/or modified protein sequence (wt) from LASV(G2147-SLE-2011;Clade IV)__AIT17228__GPC
augggacagauagugacauucuuccaggaagugccucauguaauagaagaggugaugaacauuguacucauugcacugucuauacuagcagugcugaagggucuguacaauuuugcaacauguggccuuguuggucugcuuacuuuccucuuguuauguggcaggucuugcacaaccagucuuuacaaagggguuuaugagcuucagacucuggaacuaaacauggagacacucaauaugaccaugccucucuccugcacaaagaacaacagccaucauuauauaaugguggguaaugagacaggacuagaauugacuuugaccaacacgagcauuauugaucauaaauuuugcaaucugucugaugcccacaaaaagaaccuuuaugaccacgcucuuaugagcauaaucucaacuuuccauuuguccauucccaacuucaaucaguaugaggcaaugagcugugauuuuaauggaggaaagauuagugugcaguacaaucugagucacagcuaugcuggggaugcggccaaccauuguggcacuguugcaaauggugucuuacagacuuucaugaggauggccuggggugggagcuauauugcucuugacucaggccguggcggaugggacugcauuaugacuaguuaucaguaucugauaauccaaaacacaaccugggaagaucacugccaguucucaagaccaucucccaucgguuaucuugggcuccucucacaaagaaccagagauauuuacauuaguagaagguuacuaggcacauucacauggacacuaucagauucugaaggcaaggacacaccagggggauauuguuugaccagauggaugcuaauugaagcugaacuaaaaugcuucgggaacacagcuguagcaaaauguaaugagaagcaugaugaggaauuuugugacaugcugaggcuguuugacuucaacaaacaagccauucaaagguugaaagcugaagcacaaaugagcauucaauugaucaacaaggcaguaaaugcucugauaaaugaccaacucauaaugaagaaccauuuacgggacaucaugggaauuccauacuguaauuacagcaaguauugguaccucaaccauacaaccacugggaaaacaucacugccaaaauguuggcuugugucaaaugguucauacuuaaacgagacccacuuuucugaugauauugagcaacaagcugacaacaugauuacugagaugcugcagaaggaguauauggaaaggcagggaaagacaccauugggucuaguugaccucuuuguguucagcacaaguuucuaucucauuagcaucuuccuucaccuggucaaaauaccaacucauagacauauuguaggcaagucgugucccaaaccucacagauugaaucacaugggcauauguuccuguggacucuacaaacagcccggugugccuguaaaguggaagagauga

SEQ ID NO: 436 - RNA, 1476 nt, Artificial Sequence
  derived and/or modified protein sequence (wt) from LASV(G2165-SLE-2011;Clade IV)__AIT17232__GPC
augggacagauagugacauucuuccaggaagugccucauguaauagaagaggugaugaacauuguccucauugcgcugucuauauuagcagugcugaaaggucuauacaacuuugcaacauguggccucguugguuugguuacuuuccuccuguuguguggcaggucuugcacaaccagucuuuauaaaggggucuaugagcuucagacucuggaguuaaacauggagacacucaauaugaccaugccucucuccugcacaaagaauaacagucaucauuauauaaggguggguaaugagacaggacuagaacugaccuugaccaacacaaguauuauuaaucauaaauuuugcaaucugucugaugcccacaaaaagaaccucuaugaccacgcucuuaugagcauaauuucaacuuuccacuuguccauccccaauuucaaucaguaugaggcaaugagcugcgauuuuaaugagggaaagaucagugugcaguacaaccugagucacagcuaugcuggggaugcugccaaccauuguggcacuguugcaaauggugucuuacagacuuucaugaggauggcuuggggugggagcuacauugcccuugacucaggccguggcaagugggacuguauuaugacuaguuaucaauaucugauaauucagaauacaaccugggaagaucacugccaauucucaagaccaucuccuaucgguuaccuugggcuccucucacagaggaccagagauauuuauaucaguagaagacugcugggcacauucacauggacacugucagauucugaaggcaaggacacaccagggggauauugucugaccagauggaugcugauugaagcugaauugaaaugcuucgggaacacagcuguagcaaaauguaaugagaagcaugaugaggaauuuugugacauguugagguuguuugacuucaacaaacaagccauugaaagguugaaagcugaagcacaaaugagcauucaguugaucaacaaggcaguaaaugccuugauaaaugaucaacuuauaaugaagaaccaucuacgggacaucaugggaauuccauacuguaauuacagcaaauauugguaccucaaccacacaacuacugggaaaacaucacugccuaaauguuggcuuguaucaaaugggucauacuugaacgagacccacuuuucugaugauauugaacaacaagcugacaacaugaucacugagauguuacagaaggaguauauggagaggcaagggaagacaccauugggccuaguugaccucuuuguguucagcacaaguuucuaucucaucaguauuuuccuucaccuagucaagauaccaacccauaggcauauuguaggcaagucguguccuaaaccucacagauugaaucacaugggcauauguuccuguggacucuauaaacaacccggugugccugugaaguggaaaagauga

SEQ ID NO: 437 - RNA, 1476 nt, Artificial Sequence
  derived and/or modified protein sequence (wt) from LASV(G2184-SLE-2011;Clade IV)__AIT17236__GPC
augggacagauagugacauucuuccaagaagugccucaugugauagaagaggugaugaacauuguucucauugcgcugucuauauuagcagugcugaaaggucuauacaacuuugcaacauguggccucguugguuugguuacuuuccuccuguuguguggcaggucuugcacaaccagucuuuauaaaggagucuaugagcuucagacucuggaguuaaacauggagacacucaauaugaccaugccucucuccugcacaaagaauaacagucaucauuauauaaugguagguaaugagacaggacuagaacugaccuugaccaacacaaguauuauuaaucauaaauuuugcaaucugucugaugcccacaaaaagaaccucuaugaccacgcucuuaugagcauaauuucaacuuuccacuuguccauccccaacuucaaucaauaugaagcaaugagcugugauuuuaaugggggaaggauuagugugcaguacaaccugagucacagcuaugcuggggaagcugccaaccauuguggcacuguugcaaauggugucuuacagacuuucaugaggauggcuuggggugggagcuacauugcucuugacucaggccguggcaagugggacuguauuaugacuaguuaucaauaucugauaauccaaaauacaaccugggaagaucacugccaauucucaagaccaucuccuaucgguuaucuugggcuucucucacaacggaccagagauauuuacaucaguagaagacuacuaggcacauucacauggacacugucagauucugaaggcaaggacacaccagggggauauugucugaccagauggaugcugauugaagcugaauuaaaaugcuucgggaacacagcuguagcaaaauguaaugagaagcaugaugaggaauuuugugacauguugaggcuguuugacuucaacaaacaagccauucaaagguugaaagcugaagcacaaaugagcauucaguugaucaacaaggcaguaaaugccuugauaaaugaucaacuuauaaugaagaaccaucuacgggacaucaugggaauuccauacuguaauuacagcagauauugguaccucaaccacacaacuacugggaaaacaucacugccuaaguguuggcuugucucaaaugggucauacuugaacgagacccacuuuucugaugauauugaacaacaagcugacaacaugaucacugagauguuacagaaggaguauauggagagacaggggaagacaccauugggccuaguugaccucuuuguguucagcacaaguuucuaucucaucagcaucuuccuucaccuagucaaaauaccaacucauaggcauauuguaggcaagucguguccuaaaccucacagauugaaucacaugggcauauguuccuguggacucuacaaacagcccggugugccugugaaauggaaaagauga

SEQ ID NO: 438 - RNA, 1476 nt, Artificial Sequence
  derived and/or modified protein sequence (wt) from LASV(G2197-SLE-2011;Clade IV)__AIT17240__GPC
augggacagauagugacauucuuccaggaagugccucauguaauagaagaggugaugaacauuguucucauugcacuguccauacuggcagugcugaagggucuguacaaucuugcaacguguggccuuguuggguuaguuacuuuccucuuguuguguggcaggucuugcacaaccagucuuuauaaaggguuuuaugagcuucagacucuggaacuaaauauggaaacacucaauaugaccaugccucuuuccugcacaaagaacaacagucaucauuacauaaggguggguaaugagacaggacuggaacugaccuuaaccaauacgagcauuauugaucauaaauuuuguaaucugucugaugcccacaaaaagaaccucuaugaccaugcccucaugaguauaauaucaacuuuccacuuguccauccccaacuucaaucaguaugaggcaaugagcugcgauuuuaaugggggaaagauuagugugcaguacaaccugagucacagcuaugcuggggaugcggccaaccacuguggcacuguugcaaauggugucuuacagacuuucaugaggauggcuuggggugggaguuacauugcucuugacucaggccguggacggugggacuguauuaugacuaguuaucaauaucugauaauccaaaauacaaccugggaagaucacugccaauucucaagaccaucacccaucgguuaucucgggcuccuuucacaaaagaccagagacauuuauauuaguagaagacugcugggcacauucacauggacacugucagauucagaaggcaaggacacaccagggggauauugucugaccagauggaugcugauugaagcugaauuaaaaugcuucggaaacacagcuguagcaaaauguaaugagaagcaugaugaggaauuuugugacaugcugaggcuguuugacuucaacaagcaagccauucagaggcugaaagcugaagcacaaaugagcauucaguugaucaacaaggcaguaaaugcuuugauaaaugaccaacuuauaaugaagaaccaucuacgggacaucauggggauuccauacuguaauuacagcaaguauugguaccucaaccacacaacuacugggaaaacaucacuacccaaauguuggcuuguaucaaaugguucauacuugaacgagacucacuuuucugaugauauugaacaacaagcugacaacaugaucacugaaauguugcagaaggaguauauggagagacaggggaagacaccauugggucuaguugaccucuuuguguucagcacaaguuucuaucucauuagcaucuuccuucaccuagucaaaauaccaacucauaggcauauuguaggcaagucauguccuaaaccucacagauugaaucauaugggcauauguuccuguggacucuauaaacagcccggugugccugugaaauggaagagauga

SEQ ID NO: 439 - RNA, 1476 nt, Artificial Sequence
  derived and/or modified protein sequence (wt) from LASV(G2222-SLE-2011;Clade IV)__AIT17244__GPC
augggacaaauaguuacauucuuccaggaagugccccauguaauagaagaggugaugaacauuguucucauugcacuguccauacuagcaguacugaaaggucuguacaaucuugcaacauguggccucguuggcuuggucacuuuccuccuguuguguggcaggucuugcacaaccaaccuuuauaaagggguuuaugagcuucagacucuggaacugaacauggaaacacucaauaugaccaugccucucuccugcacaaaaaacagcagucaucauuacauaagggugggcaaugagacaggacuagaacugaccuugaccaacacgagcauuaucgaucauaaauuuugcaaucugucugaugcccacaaaaagaaccucuaugaccacgcucuuaugagcauuaucuccacuuuccacuuguccaucccuaacuucaaucaguaugaggcaaugagcugcgauuucaauggggggaagauuagugugcaguacaaccugagucauagcuacgucggggaugcagccgaccauuguggcacuguugcaaaugguguacuacagacuuucaugaggauggcuuggggugggagcuacauugcucuugacucaggccguggcaagugggacuguauuauaacuaguuaucaauaccugauaauucaaaauacaaccugggaagaucacugccaguucucgagaccaucucccaucgguuaucuugggcuccucucacaaaggaccagagauauuuacauuaguagaaggcuacuaggcacauucacauggacacugucagauucugaaggcaaggacacaccagggggauauugucugaccagauggaugcuaauugaggcugaacuaaagugcuucgggaacacagcuguggcaaaauguaaugagaagcaugaugaagaauuuugugacaugcugaggcuguuugacuucaacaagcaggccauucaaagguugaaggcugaagcacaaaugagcauucaguugaucaacaaagcaguaaaugcuuugauaaaugaccaacuuauaaugaagaaccaucuacgggacaucauggggauuccauacuguaauuacagcaaguauugguaccucaaucacacaauuacugggaaaacaucacugcccagauguuggcuuguaucaaaugguucauacuugaacgagacccgcuuuucugaugacauugaacaacaagcugacaacaugaucacugagauguuacagaaggaguauauggagaggcaggggaagacaccauugggucuaguugaccucuuuguguucagcacaaguuucuaucucauuagcaucuuccuucaccuagucaagauaccaacucauaggcauauuguaggcaaaccgugucccaaaccucacagguugaaucauaugggcaucuguuccuguggacucuacaaacagccuggugugccugugaaauggaagagauga

SEQ ID NO: 440 - RNA, 1476 nt, Artificial Sequence
  derived and/or modified protein sequence (wt) from LASV(G2230-SLE-2012;Clade IV)__AIT17246__GPC
augggacaaauagugacuuucuuucaggaagugccucaugugauagaggaggugaugaacauugugcucaucgcauugucucuacuggcaguguugaaaggucuguacaaugucgcaacauguggccucauuggucugaucaccuuccuuuuacugugugguagauccugcacaaccaaucuuuacaaaggagucuaugagcuucagacucuggaacuaaacauggagacacucaauaugaccaugccucucucuugcacaaagaacaguagccaccacuauauaaugguggguaaugagacgggacuggaauugaccuugaccaacacaagcaucaucaaccacaaguuuuguaaucugucugaugcucacaaaaagaaucucuaugaucacacccuuaugagcauaauuucgacuuuucaccuguccauucccaacuucaaucaguaugaagcaaugagcugugacuucaacggagggaaaauuagugugcaguacaacuuaagccacagcuaugcuguggaugcagccaaccauuguggcacaguugcaaaugguauccuacagacuuucaugaggauggccuggggugggaguuauauugcccuugauucaggccguggcaauugggauuguauuaugacuaguuaccaauaucuaauaauucagaauacaaccugggaagaucacugccaguucucaagaccaucucccaucggcuaucuugggcuccucucacaaaggaccagagacauuuauauuaguagaagacuacugggcacauucacauggacacuaucagauucugaaggcaaugacacaccagggggauacugucugaccagguggauguuaauugaggcugagcugaaaugcuucgguaauacagcuguggccaaaugcaaugaaaaacaugaugaagaauucugugacaugcugagacuguuugacuuuaacaaacaagccauucaaagauuaaaggcugaggcacaaaugaguauccaguugaucaacaaggcagugaaugcucugauuaaugaccaauuaauaaugaaaaaccaucuacgggacaucauggggauuccauacuguaacuauaguaaguauugguaucucaaccacacaaccacuggaaaaacaucguugcccaaaugcuggcuuguaucuaaugguucauaucuaaacgagacccacuuuucugaugacauugaacagcaagccgacaacaugauaacugagaugcuacaaaaagaguacauggagagacaggggaagacaccauuaggucugguugaucucuuuguguucagcacaaguuucuaccucauuagcauuuuccuucaccuagucaaaauaccaacacauaggcacauuguuggcaaaccguguccgaaaccucacaggcugaaucacaugggcauauguucuuguggacucuacaaacaaccugguguaccugugagauggaagagauaa

SEQ ID NO: 441 - RNA, 1476 nt, Artificial Sequence
  derived and/or modified protein sequence (wt) from LASV(G2259-SLE-2012;Clade IV)__AIT17250__GPC
augggacaaauagugacuuucuuccaggaagugccucaugugauagaggaggugaugaacauugugcucaucgcauugucucuacuggcaguguugaaaggucuguacaauguugcaacauguggccucauuggucuggucaccuuccuuuuacugugugguagauccugcacaaccaaucuuuacaaaggagucuaugagcuucagacucuggaacuaaacauggagacacucaauaugaccaugccucucucuugcacaaagaacaacagccaccacuauauaaugguggguaaugagacgggacuggaauugaccuugaccaacacaagcaucaucaaccacaaguuuuguaaucugucugaugcucacaaaaagaaucucuaugaucacacccuuaugagcauaauuucgacuuuucaccuguccauucccaacuucaaucaguaugaagcaaugagcugugacuucaauggagggaaaauuagugugcaguacaacuuaagccacagcuaugcuguggaugcagccaaccauuguggcacaguugcaaaugguguccuacagacuuucaugaggauggccuggggugggagcuauauugcccuugauucaggccguggcaauugggauugcauuaugacuaguuaccaauaucuaauaauucagaauacaaccugggaagaucacugccaguucucaagaccaucucccaucggcuaucuugggcuccucucacaaaggaccagagacauuuauauuaguagaagacuacugggcacauucacauggacacuaucagauucugaaggcaaugacacaccagggggauacugucugaccagguggauguuaauugaggcugagcugaaaugcuucgguaauacagcuguagccaaaugcaaugaaaaacaugaugaagaauucugugacaugcugagacuguuugacuuuaacaaacaagccauucaaagauuaaaggcugaggcacaaaugaguauccaguugaucaacaaggcagugaaugcucugauuaaugaccaauuaauaaugaaaaaccaucuacgagacaucauggggauuccauacuguaacuauaguaaguauugguaucucaaccacacaaccacuggaaaaacaucguugcccaaaugcuggcuuguaucuaaugguucauaucuaaacgagacccacuuuucugaugacauugaacagcaagccgacaacaugauaacugagaugcuacaaaaagaguacauggagagacaggggaagacaccauuaggucugguugaucucuuuguguucagcacaaguuucuaccucauuagcauuuuccuucaccuagucaaaauaccaacacauaggcacauuguuggcaaaccguguccgaaaccucacaggcugaaucacaugggcauauguuccuguggacucuacaaacaaccugguguaccugugagauggaagagauaa

SEQ ID NO: 442 - RNA, 1476 nt, Artificial Sequence
  derived and/or modified protein sequence (wt) from LASV(G2263-SLE-2012;Clade IV)__AIT17254__GPC
auggggcaaauagugacauucuuccaggaaguaccucaugugauagaagaggugaugaacauuguucucauugcacugucuauacuagcagugcugaaagguuuguacaauuuugcaacaugugguaucguugguuuggucacuuuccucuuguuguguggcaggucuugcacaaccagccucuacaaagggguuuaugaacuucagacgcuggaacuaaacauggagacacucaauaugaccaugccucucuccugcacaaagaacaacagucaccauuacauaauggugggcaaugagacgggacuagaacugaccuugaccaacacgagcauuauaaaucauaaauuuugcaaucugucugaugcccacaaaaagaaccucuaugaccacgcucuuaugagcauaauuucaacuuuccacuuguccauccccaacuucaaucaguaugaggcaaugagcugugauuucaaugggggaaaaaucagugugcaguauaaccugagucauagcuaugcuggggaugcagccaaucauuguggcacagucgcaaauggugucuuacaaacuuucaugaggauggccuggggugggagcuacauugcucuugacucaggccgugacaggugggacuguauuaugacuaguuaucaauaucugauaauccaaaacacaaccugggaagaucacugccaguucucaagaccaucucccaucggcuaucucgggcuccucucacaaagaaccagagauauuuacauuagcagaagauugcugggcacauucacauggacacugucagacucugagggcaagaacacaccaggaggauauugucugaccagauggaugcuaauugaggcugaacugaaaugcuuugggaacacagcuguggcaaaaugcaaugagaagcaugaugaggaauuuugugacaugcugaggcuguuugacuucaacaaacaagccauucaaagguugaaagccgaagcacaaaugagcaucagcuugaucaacaaagccguaaaugcuuugauaaaugaccaauuaauaaugaagaaccaucuacgggacaucaugggaauuccauacuguaauuacagcaaguauugguaccucaaccacacaacuacugggaaaacaucacuacccagauguuggcuuguaucaaaugguucauacuugaacgagacccacuucucugaugauauugaacaacaagcugacaacaugaucacugagauguuacagaaggaguauauggauaggcaggggaagacaccauugggucuaguugaccucuuuguauuuaguacaaguuucuaucucauuagcaucuuccuucaccuggucaaaauaccaacucauagacauauuguaggcaagacaugccccaaaccucacagguugaaucacaugggcauauguuccugcggacucuauaaacagcccggugugccuguaaaauggaagagauga

SEQ ID NO: 443 - RNA, 1476 nt, Artificial Sequence
  derived and/or modified protein sequence (wt) from LASV(G2280-SLE-2012;Clade IV)__AIT17258__GPC
augggacaaauagugacauucuuccaggaaguaccccauguaauagaagaggugaugaacauuguucucauugcacugucuauacuagcaguguugaaaggucuguacaauauugcgacauguggccucguuggcuuggucacuuuccuccuguuguguggcaggucuuguacaacuagccuuuacaaagggguuuaugagcuucagacucuggaacuaaacauggaaacacucaauaugaccaugccucucuccugcacaaagaacaauagucaucauuacauaauggugggcaaugagacaggauuagaacugaccuugaccaacacgagcaucauuaaucauaaauuuugcaaucugucugaugcccacaaaaagaaccucuaugaccacgcucucaugagcauugucucaaccuuccacuuguccaucccuaacuucaaucaguaugaggcaaugagcugcgauuucaaugggggaaagauuagugugcaguacaaccugagucacagcuaugccguggaugcagccaaccauuguggcacuguugcaaaugguguauuacagacuuucaugaggauggcuuggggugggagcuacauugcucuugacucaggcagaggcgggugggacuguauaaugacuaguuaucaauaucugauaauccaaaauguaaccugggaagaucacugccaauucucgagaccaucucccaucgguuaccucgggcuccucucacaaagaaccagggauguuuauauuaguagaagguugcuaggcacauucacauggacacugucagauucugaaggcaaugacacaccagggggauauugucuaaccagauggaugcuaauugaagcugaacuaaagugcuuugggaacacagcuguggcaaaguguaaugagaagcaugaugaggaauuuugugacaugcugaggcuguuugacuucaacaaacaagccauucaaagguugaaagcugaagcacaaaugagcauucaguugaucaacaaagcaguaaaugcuuugauaaaugaccaacuuauaaugaagaaccauuuacgagacauuauggggauuccauacuguaauuacagcaaguauugguaccucaaccacacaacuacugggaaaacaucacugcccaaauguuggcuuguaucaaaugguucauaccugaacgagacccacuuuucugaugauauugaacaacaagcugacaacaugaucacugagauguuacagaaggaguauauggagaggcaggggaagacaccacugggucugguugaccucuuuguguucagcacaagcuucuaucucauuagcaucuuccuucaccuaguuaaaauaccaacucauaggcauauuguaggcaagccgugucccaaaccucacagguugaaucauaugggcauuuguuccuguggacucuauaaacagccuggugugccuguuaaauggaagagauga

SEQ ID NO: 444 - RNA, 1476 nt, Artificial Sequence
  derived and/or modified protein sequence (wt) from LASV(G2295-SLE-2012;Clade IV)__AIT17262__GPC
augggacaaauagugacauucuuccaggaggugccccaugugauagaagaggugaugaacauuguucucauugcacugucuauacuagcaguguugaagggucuguacaaucuugcaacauguggccuuguuggcuuggucacuuuccuccuguuguguggcaggucuuguacaacuagccuuuacaaagggguuuaugagcuucagacucuggaacuaaacauggaaacacucaauaugaccaugccucucuccugcacaaagaacaauagucaucauuacauaauggugggcaaugagacaggacuggaacugaccuugaccaacacgagcaucauuaaucauaaauuuugcaaucugucugaugcccacaaaaagaaucucuaugaccacgcucuuaugagcauuaucucaaccuuccacuuguccaucccuaacuucaaucaguaugaggcaaugagcugcgauuuuaaugggggaaagaucagugugcaguacaaccugagucacagcuaugccggggaugcagccacucacuguggcacugucgcaaaugguguauuacagacuuucaugaggauggcuuggggugggagcuacauugcucuugacucaggccguggcaagugggacuguaucaugacuaguuaucaauaucugauaauccaaaauacaaccugggaagaucacugccaauucucgagaccaucucccauugguuaucuugggcuccuuucacaaaggaccagagauauuuacauuaguagaaggcuacuaggcacauucacauggacacugucagauucugaaggcaaggacacaccagggggauauugucuaaccagauggaugcugauugaagcugaacuaaagugcuucgggaacacagcuguggcaaaauguaaugagaagcaugaugaggaauuuugugacaugcugagguuguuugacuuuaauaaacaagccauucaaagguugaaaacugaagcacaaaugagcauucaguugaucaacaaagcaguaaaugcuuugauaaaugaccaacuuauaaugaagaaccaucuacgggauaucauggggauuccauacuguaauuacagcaaguauugguaccucaaccacacaacuacugggaaaacaucacugcccagauguuggcuuguaucaaaugguucauaccugaacgagacccacuuuucugaugauaucgaacaacaagcugacaauaugaucacugagaugcuacagaaggaauauauggagaggcaggggaagacaccauugggucugguugaccucuuugucuucagcacaagcuucuaucucaucagcaucuuccuucaccuaguuaagauaccaacucauaggcauauuguaggcaagccgugucccaaaccucacaggcugaaucauaugggcauuuguuccuguggacucuacaaacagccuggugugccugugaaauggaagagauga

SEQ ID NO: 445 - RNA, 1476 nt, Artificial Sequence
  derived and/or modified protein sequence (wt) from LASV(G2315-SLE-2012;Clade IV)__AIT17266__GPC
augggacagauagugacauucuuccaggaagugccucauguaauagaagaggugaugaacauuguucucauugcacuguccauacuggcagugcugaaaggucuguacaaucuugcaacauguggccucguugguuuggucacuuuccuccuguugugugguaggucuugcacaaccagucuuuacaaagggguuuaugagcuucagacucuggaacuaaacauggagacacucaacaugaccaugccucucuccugcacaaagaacaacagucaucauuauauaaugguggguaaugagacaggacuagaacugaccuugaccaacacgagccuuauuaaucacaaauuuugcaaccugucugaugcccacaaaaagaaccucuaugaccacgcucuuaugagcauaaucucaacuuuccacuuguccauccccaacuucaaucaguaugaggcaaugagcugcgauuuuaaugggggaaagauuagugugcaguacaaccugagucacagcuaugccguggaugcagccaaccauuguggcacugucgcaaaugguguacuacagacuuucaugaggauggcuuggggugggagcuacauugcucuugacucaggccgugguggaugggacuguauuaugacuaguuaucaauaucugauaauccaaaauacaacuugggaagaucacugccaauucucgagaccaucuccuaucgguuaucucgggcuccucucacaaaggaccagagauauuuauaucaguagaagacuacuaggcacauucacauggacauugucagauucugaaggcaaggacacaccagggggauauuguuugaccagguggaugcugauugaggcugaacuaaaaugcuucgggaacacagcuguggcaaaauguaaugagaaacaugaugaggaauuuugugacaugcugaggcuguuugacuucaacaaacaagccauucaaaggcugaaagcugaagcacaaaugagcauucaguugaucaacaaagcaguaaaugcuuugauaaaugaucaacuuauaaugaagaaccaucuacgggauaucaugggaaucccauacuguaauuacagcaaguauugguaccucaaccacacaacuacugggagaacaucacugccuagauguuggcuuguaucaaaugguucauaccugaacgagacccacuuuucugaugauauugaacaacaagcugacaacaugaucacugagauguuacagaaggaguauauggaaaggcaggggaagacaccauugggccuaguugaucucuuuguguuuagcacaaguuucuaucucauuagcaucuuucuucaccuagucaaaauaccaacgcauaggcauauuguaggcaagucgugucccaaaccucacagacugaaucacaugggcauuuguuccugugggcuuuauaaacagccuggugugccuguaaaauggaagagauga

SEQ ID NO: 446 - RNA, 1476 nt, Artificial Sequence
  derived and/or modified protein sequence (wt) from LASV(G2318-SLE-2012;Clade IV)__AIT17270__GPC
augggacagauagugacauucuuccaggaagugccucauguaauagaagaggugaugaacauuguucucauugcgcugucuguacuagcagugcugaaaggucuguacaauuuugcaacauguggccucguugguuuggucacuuuccuccuguuguguggcaggucuugcucaacuaguguuuauaaagggguuuaugagcuucagacucuggaacuaaauauggagacacucaacaugaccaugccucucuccugcacaaagaacaacagucaucauuauauaaugguggguaaugagacaggacuagaacugaccuugaccaacacuagcaucaucaaucauaaauuuuguaaucugucugaugcccacaaaaagaaccucuacgaccaugcucuuaugagcauaaucucaacuuuucacuuguccauccccaauuucaaucaguaugaggcaaugagcugcgauuucaaugggggaaagauuagugugcaguacaaccugagucacagcuaugcuguggaugcggccaaccauuguggcacuguugcaaauggugucuuacagacuuucaugaggauggcuuggggugggagcuacauugcucuugacucaggccauggugggugggauugcauuaugacuaacuaucaauaucugauaauccagaauacaaccugggaggaucacugccaauucucaagaccaucucccaucgguuaucucgggcuccuuucacaaaggaccagagauauuuauauuaguagaagacuacuaggcacauucacauggacacugucagauucugagggcaaggacacaccagggggauauugucugaccagauggauguugauugaagcugaacuaaaauguuucgggaacacagcuguagcaaaauguaaugagaagcaugaugaggaauuuugugacaugcugaggcuguuugacuucaacaaacaagccauucaaagguugaaagcugaagcacaaaugagcauucaguugaucaacaaggcagugaaugcauugauaaaugaccaacuuauaaugaagaaccaucuacgggacaucaugggaauuccguacuguaauuauagcaaguauugguaccucaaccacaccacuacugggagaacaucacuacccaaauguuggcuugugucaaaugguucauacuugaacgagacucacuuuucugaugauauugaacaacaagcugacaacaugaucacugagauguuacaaagggaguauauggagaggcaggggaagacaccauugggucuaguugaccucuuuguguucagcacaaguuucuaucucauuagcaucuuccuucaccuggucaaaauaccaacucauaggcauauugugggcaagucgugccccaaaccucacagacugaaucacaugggcauauguuccuguggucucuauaaacagccaggugugccugugaaguggaagagauga

SEQ ID NO: 447 - RNA, 1476 nt, Artificial Sequence
  derived and/or modified protein sequence (wt) from LASV(G2363-SLE-2012;Clade IV)__AIT17274__GPC
augggacaaauagugacauuuuuccaggaagugccucaugugauagaggaggugaugaacauuguacucaucgcacugucuauacuugcagugcuaaaaggucuguacaauguugcaacauguggccuuacugguuugguugccuuucuuuuacugugugguagaucuuguacaaccacucuguacaaaggaguuuaugaacuucaggcccuggaauuaaacauggagacacucaauaugaccaugccucucuccugcacaaagaacaauagucaccacuacauaaggguaggcaaugagacaggacuagaacuaaccuugaccaauacaagcaucaucgagcauagguuuuguaacuuaucugaugcccacaaaaagaaccucuaugaucaugcucuuaugaguauaaucucaacuuuccacuuguccauucccaacuucaaucaguaugaagcaaugaguugugacuuuaauggggggaaaauuagugugcaauacaaccuaagucacagcuaugcuguagaugcagccaaccauuguggcacagucgcaaauggcguuuugcagacuuucaugaggauggccuggggugggaguuacauugcucuugauucaggccgcaaugggugggauuguaucaugaccaguuaucaauaccuaauuauucagaacacaacuugggaagaucacugccaauucucaagaccaucucccauugguuaccuugggcuccuuucacaaaggaccagagacauuuacaucaguaggagacugcuaggcacauucacauggacacugucggauucugaagguaaagauacaccagggggguacugucugaccagauggaugcuaauugaggcugagcugaaauguuucggcaacacagcuguagccaaauguaaugagaagcaugaugaagaauucugugacaugcugaggcuauuugacuucaacaaacaagcuauccaaagguuaaaggcugaagcacaaaugagcauucaguugaucaacaaggcugugaacgcuuuaauaaaugaucaacugauaaugaaaaaccaucugcgggauaucauggggauuccauacuguaacuacagcaaguacugguaucucaacaacacagccacugggaaaacaucacuaccuagaugcuggcuugugucaaaugguucauaccugaacgagacccacuucucugaugacauugaacaacaagcugacaacaugaucacugagauguugcagaaggaguacauggagaggcaggggaagacaccauugggccugguugaccucuuuguguuuagcacaaguuuuuaucuuaucaguaucuuccuucaccuagucaaaauaccaacucauagacacauuguaggcaaaccguguccuaaaccucacaggcugaaucauaugggcauaugcuccuguggacucuauaaacaacccggugcaccuguaagauggaagagauaa

SEQ ID NO: 448 - RNA, 1476 nt, Artificial Sequence
  derived and/or modified protein sequence (wt) from LASV(G2384-SLE-2012;Clade IV)__AIT17276__GPC
augggacagauagugacauucuuccaggaagugccucauguaauagaagaggugaugaacauuguccucauugcgcugucuauauuagcagugcugaaaggucuguacaacuuugcaacauguggccucguugguuugguuacuuuccuccuguuguguggcaggucuugcacaaccagucuuuauaaaggggucuaugagcuucagacucuggaguuaaacauggagacacucaauaugaccaugccucucuccugcacaaagaauaacagucaucauuauauaaugguagguaaugagacaggacuagaacugaccuugaccaacacaagcauuauuaaucauaaauuuugcaaucugucugaugcccacaaaaagaaccucuaugaccaugcccuuaugagcauaauuucaacuuuccacuuguccauccccaacuucaaucaguaugaagcaaugagcugugauuucaaugggggaaagauuagugugcaguacaaccugagucacagcuaugcuggggaugcugccaaccauuguggcacuguugcaaauggugucuuacagacuuucaugaggauggcuuggggugggagcuacauugcucuugacucaggccauggcaagugggacuguauuaugacuaguuaucaauaucugauaauccaaaauacaaccugggaagaucacugccaauucucaagaccaucuccuaucgguuaucuugggcuucucucacaaaggaccagagauauuuauaucaguagaagacuacuaggcacauucacauggacacugucagauucugaaggcaaggacacaccagggggauauugucugaccagauggaugcugauugaagcugaauuaaaaugcuucgggaacacagcuguagcaaaauguaaugagaagcaugaugaggaauuuugugacauguugaggcuguuugacuucaacaaacaagccauucaaagguugaaagcugaagcacaaaugagcauucaguugaucaacaaggcaguaaaugccuugauaaaugaucaacuuauaaugaagaaccaucuacgggacaucaugggaaucccauacuguaauuacagcaaauauugguaccucaaccacacaacuacugggaaaacaucacugccuaaauguuggcuugucucaaaugggucauacuugaacgagacccacuuuucugaugauauugaacaacaagcugacaacaugaucacugagauguuacagaaggaguauauggagaggcaggggaagacaccauugggccuaguugaccucuuuguguucagcacaaguuucuaucucaucagcaucuuccuucaccuagucaaaauaccaacucauaggcauauuguaggcaagucguguccuaaaccucacagauugaaucacaugggcauauguuccuguggacucuacaaacagcccggugugccugugagauggaaaagauga

SEQ ID NO: 449 - RNA, 1473 nt, Artificial Sequence
  derived and/or modified protein sequence (wt) from LASV(G2392-SLE-2012;Clade IV)__AIT17280__GPC
augggacaaauagugacauucuuccaggaagugccucauguaauagaagaggugaugaacauuguucucauugcacugucaauauuggcagugcuaaaaggucuguauaauuuugcuacauguggccucguugguuugguuacuuuccucuuacuguguggcaggucuugcacaaccagccuuuacaaaggaguuuaugagcuucagacucuagaacuaaacauggagacucucaauaugaccaugccccucucuugcacaaagaacaauagucaucauuacauaagggugggcaaugagacagggcuagaacugacuuuaaccaacacgagcauuauugaucauaaauuuugcaaucugucugaugcccacaaaaagaaccuuuaugaccacgcucuuaugagcauaaucucaacuuuccacuuguccaucccuaacuucaaucaguaugaggcaaugagcugugauuuuaaugggggaaagauuagugugcaguacaaccuaagucacagcuaugcuggggaugcagccaaccauuguggcacaguugcaaaugguguccugcagacuuucaugaggauggccugggguggaagcuacauugcucuugacucaggccaugaaugggacugcauuaugaccagcuaucaauaccugauaauccaaaauacaaccugggacaaucauugccaguucucaagaccaucucccaucgguuaucucggucuccuuucgcaaaggaccagagacauuuauauuaguagaagacugcuaggcacauucacauggacacugucagauucugaaggcaaggacacaccagggggguauugucugacuagauggaugcuaauugaggcugaacuaaaaugcuucgggaacacagcuguggcaaaaugcaaugagaaacaugacgaagaauucugugauaugcugaggcuguuugacuucaacaagcaggccauucaaagguuaaaagucgaagcacaaaugagcauucaguuaaucaacaaagcaguaaaugcucugauaaaugaucaacuaauaaugaagaaccauuuacgggauauuaugggaauuccauacuguaauuacagcaaguacugguaccucaaccacacaacuacugggaaaacaucacugcccaaauguuggcuuguaucaaauggaucauauuugaacgagacccacuuuuccgaugacauugagcaacaagcugacaauaugaucacugagauguugcagaaagaguauauggagagacaggggaaaacaccauugggccuaguugaccucuuuguguucagcacaaguuucuaucucauuagcaucuuccuucaccuagucaaaauaccaacucauaggcacauugugggcaagucauguccaaaaccucacagguugaaucacaugggcauauguuccugcggauucuauaaacagcccggugugccuguaaaauggaagagauga

SEQ ID NO: 450 - RNA, 1476 nt, Artificial Sequence
  derived and/or modified protein sequence (wt) from LASV(G2405-SLE-2012;Clade IV)__AIT17284__GPC
augggacaaauagugacauucuuccaagaagugccccauguaauagaagaggugaugaacauuguucucauugcacuaucuguacuagcaguguugaaaggucuguacaauuuugcaacauguggcauuguuggcuuggucacuuuccuccuguuguguggcaggucuugcacaacuagccuuuacaaagggguuuaugagcuucagacccuggaacuaaacauggaaacacucaauaugaccaugccucucuccugcacaaagaacaauagucaucauuauauaauggugggcaaugauacaggacuagaacuaaccuugaccaacacgagcauuauuaaucauaaauuuugcaaucugucugaugcccacaaaaagaaccucuaugaccacgcucuuaugagcaucaucucaacuuuccacuuguccaucccuaacuucaaucaguaugaggcaaugagcugcgauuuuaaugggggaaagauuaguguucaguacaaccugagucacaguuaugccggagaugcagccgaccauuguggcacuguugcaaaugguguauuacagacuuucaugaggauggcuuggggugggagcuacauugcucuugacucaggccguggcaggugggacuguauuaugacuaguuaucaauaucugauaauccaaaauacaaccugggaagaucacugccaauucucgagaccaucuccuaucgguuaucucgggcuccucucacaaaggaccagggauauuuauauuaguagaaggcuacuagguacauucacauggacacugucagacucugaaggcaaggacacaccagggggauauugucuaaccagauggaugcuaauugaggcugaacuaaagugcuucgggaacacagcuguggcaaaauguaaugagaaacaugaugaggaauuuugugacaugcugaggcuguuugacuucaacaaacaagccauucaaagauugaaagcugaagcacaaaugagcauucagcugaucaacaaagcagugaaugcuuugauaaaugaccaacuuauaaugaagaaccaucuacgggacaucauggggauuccguacuguaauuacagcaaguauugguaccucaaccacacaacuacugggaaaacaucacugcccaaauguuggcuuguaucaaaugguucauaccugaacgagacccacuuuucugaugauauugaacaacaagcugacaacaugaucacugagauguuacagaaggaguauauggagaggcaggggaagacaccguugggucuaguugaccucuuuguguucagcacaagcuucuaucucauuagcaucuuucuucaccuaguuaaaauaccaacucauaggcauauuguaggcaagccgugucccaaaccucacagguugaaucauaugggcauuuguuccuguggacucuacaaacagccuggugugccugugaaguggaaaagauga

SEQ ID NO: 451 - RNA, 1476 nt, Artificial Sequence
  derived and/or modified protein sequence (wt) from LASV(G2427-SLE-2012;Clade IV)__AIT17288__GPC
augggacaaauagugacauucuuccaggaagugccucauguaauugaagaggugaugaacauuguucucauugcacuguccauauuggcagugcugaaaggccuguacaauuuugcuacauguggccucguugguuugguuacuuuccucuuauuguguggcaggucuugcacaacuagucuuuacaaagggguuuaugaacuucagacucuggaacuaaacauggagacacucaauaugaccaugccucucucuugcacaaagaacaauagucaucauuacauaauggugggcaaugagacagggcuggaacuaaccuugaccaacacgagcauuauuaaucacaaguuuuguaaucugucugaugcccacaaaaagaaccucuaugaccacgcucuuaugaguauaaucucaacuuuccacuuguccauccccaacuuuaaucaguaugaggcaaugagcugugauuuuaauggaggaaagauuagugugcaguacaaccugagucacagcuaugcuguggaugcagccaaccauuguggcacaguugcaaauggugucuuacagacuuucaugaggauggccugggguggaggauacauugcucuugacucaggccguggcaauugggauugcauuaugaccagcuaucaauaucugauaauccaaaacacaaccugggaggaccacugccaauucucaagacccucucccaucgguuaucucggucuccuuucacaaaggaccagagauauuuauaucagcagaagacuacuaggcacauuuacauggacacugucagacucugaaggcaaggacacaccaggaggguauuguuugacuagauggaugcuaauugaggcugaacugaaauguuucgggaacacagcuguggcaaaaugcaaugagaaacaugaugaggaauuuugugauaugcugaggcuguuugacuucaacaaacaagccauucaaagguuaaaagcugaagcacaaaugagcauucaguugaucaacaaagcaguaaaugcuuugauaaaugaucaacugauaaugaagaaccaucuacgggacauuaugggaauuccauacuguaauuacagcaaauacugguaccucaaucacacaguuacugggaaaacaucacugccuaaauguuggcuuguaucaaaugguucauauuugaaugagacucacuuuucugaugacauugagcaacaagcugacaauaugaucacugagauguugcagaaagaguacauggagaggcaagggaaaacaccauugggucuaguugaccucuuuguguucagcacaaguuuuuaucucauuagcaucuuccuucauuuggucaaaauaccuacucauaggcauauugugggcaagucgugcccaaaaccucauagguugaaucacauggguauauguuccugcggacucuacaaacagcccggugugccuguaagauggaagagauga

SEQ ID NO: 452 - RNA, 1476 nt, Artificial Sequence
  derived and/or modified protein sequence (wt) from LASV(G2431-SLE-2012;Clade IV)__AIT17292__GPC
auggggcaaauaguaacauucuuccaagaagugccucaugugauagaggagguaaugaauauuguacucaucgcacugucgauaauggcaguacugaaagguuuguacaauauugcaacauguggccucgucgguuuaguuaccuuucucuugcugugugguagguccugcacaaccacccucuacaagggggucuaugagcugcagacccuggaacugaacauggaaacacucaacaugaccaugccucucucuugcacaaagaauaauagucaccacuauauuaugguggguaaugagacaggacuagaacugaccuuaaccaauacaagcauuaucaaccacaaauuuugcaaucugucugaugcucacaaaaagaaccucuaugaucaugcucuuaugagcauaaucucaacuuuccauuuauccauuccuaacuucaaucaguaugaggcaaugagcugugacuucaaugggggaaagaucagugugcaguacaaccugagucacagcuaugcuggagaugcagcuaaccauuguggcacaguugcaaaugguguccuucagacuuucaugaggauggcuugggguggaaguuauauugcucuugauucaggccacgguggaugggacuguauuaugaccaguuaucaguaucuaauaauucaaaauacaaccugggaagaucacugccaauucacaagaccaucucccaucgguuaucuugggcuccucucacaaagaaccagagauauuuauauuaguagaagacuacugggaacauucacauggacacugucagauucugaagggaaugacacaccagggggguauuguuugacuagauggaugcuaauugaagcugaguugaagugcuuuggcaauacagcuguugcaaaauguaaugaaaagcaugaugaagaguuuugugacaugcuaaggcuguuugauuuuaacaaacaggcuauccaaagacugagagcugaagcacaaaugaguauucaauuaaucaacaaagcagugaaugcccugauaaaugaucaacuaauaaugaaaaaccauuuacgggacauuaugggaauuccauacuguaacuacagcaaguauugguaucuuaaccacacaaccaccggaagaacaucauugccuagaugcuggcuuguaucuaaugguucauaccucaaugaaacucacuucucagaugacauugaacagcaggcugacaacaugauuacugagauguuacaaaaggaguacauggagagacaggggaaaacaccauuggguuugguugaucuuuuuguuuucagcacaaguuucuaucucauuagcaucuuucuucaccugaucaaaauaccaacucacaggcauauugugggcaaaccaugucccaaaccucacagguuaaaccacauggguguuugcuccuguggacucuauaagcaaccuggugugcccguaagguggaagagauga

SEQ ID NO: 453 - RNA, 1476 nt, Artificial Sequence
  derived and/or modified protein sequence (wt) from LASV(G2511-SLE-2012;Clade IV)__AIT17294__GPC
augggacaaauagugacauucuuccaggaagugccccaugugauagaagaggugaugaacauuguucucauugcacugucuauacuagcaguguugaagggucuguacaaucuugcaacauguggccucguuggcuuggucacuuuccuccuguuguguggcaggucuuguacaacuagccuuuacaaagggguuuaugagcuucagacucuggaacuaaacauggaaacacucaacaugaccaugccucucuccugcacaaagaacaauagucaucauuacauaauggugggcaaugagacaggacuagaacugaccuugaccaacacaagcauuauugaucauaaauuuugcaaucuaucugaugcccacaaaaagaaccucuaugaccacgcucuuaugagcauuaucucaaccuuccacuuguccaucccuaacuucaaucaguaugaggcaaugagcugcgauuuuaaugggggaaagaucagugugcaguacaaccugagucacagcuaugccggggaugcagccaaccauuguggcacugucgcaaaugguguauuacagacuuucaugaggauggcuuggggugggagcuacauugcucuugacucaggccguggcgggugggacuguauuaugacuaguuaucaauaucugauaauccaaaauacaacuugggaagaucacugccaauucucgagaccaucucccgucgguuaucucggacuccucucacaaaggaccagagauauuuacauuaguagaaggcuacuaggcacauucacauggacacugucagauucugaaggcaaggacacaccagggggauauugucuaaccagauggaugcuaauugaagcugaacuaaagugcuucgggaacacagcuguggcaaaauguaaugagaaacaugaugaggaauuuugugacaugcugaggcuguuugacuucaauaaacaagccauucaaagguugaaaacugaagcacaaaugagcauucaguugaucaacaaagcaguaaaugcuuugauaaaugaccaacuuauaaugaagaaccaucuacgggauaucauggggauuccauacuguaauuacagcaaguauugguaccucaaccacacaacuacugggaaaacaucacugcccagauguuggcuuguaucaaaugguucauaccugaaugagacccacuuuucugaugauaucgaacaacaagcugacaauaugaucacugagaugcuacagaaggaguauauggagaggcaggggaagacaccauugggucugguugaccucuuuguguucagcacaagcuucuaucucaucagcaucuuccuucaccuaguuaagauaccaacucauaggcauauugugggcaagccgugucccaaaccucacagauugaaucauaugggcauuuguuccuguggacucuacaaacagccuggugugccugugaaauggaagagauga

SEQ ID NO: 454 - RNA, 1476 nt, Artificial Sequence
  derived and/or modified protein sequence (wt) from LASV(G2554-SLE-2012;Clade IV)__AIT17298__GPC
augggacaaauagugacauucuuccaagaagugccucauguaauagaagaggugaugaacauuguucucaucgcacugucuauacuagcagugcugaagggucuguacaacauugcaacauguggccuccuuggcuuggucugcuuccucuuguuguguggcaggucuugcacaaccagucuuuacaaagggguuuaugagcuucagacucuggagcuaaacauggagacacucaacaugaccaugccucucucuugcacaaagaacaacagucaucauuacauaauggugggcaaugagacaggacuggaacugacuuugaccaacacaagcauuauuaaucauaaauuuugcaaucugucugacgcccauaagaagaaccucuaugaccacgcucuuaugagcauaaucucaacuuuccacuuguccauccccaacuucaaucaguaugaagcaaugagcugugauuuuaaugggggaaagaucaguguacaguacaaucuuagucacagcuaugcuguggaugcagccagccauuguggcacaaucgcaaauggugucuuacagacuuucaugaggauggccuggggugggaguuacauugcucuugauucuggccauggagggugggacugcauaaugaccaguuaucaauauuugauaauccaaaacacaaccugggaagaucacugccaauucucaagaccaucuccuauugguuaucuugggcuccucucgcagagaaccagagauauuuauauuaguaggagacuacugggcacauucacauggacauugucagauucugaaggcaaggacacaccagggggguauugucugaccagauggaugcugauugaggcugaacugaaaugcuucgggaauacagcuguggcaaaguguaaugagaaacacgaugaggaauuuugugauaugcugaggcuguuugacuucaacaaacaagccauucaaagguuaaaagcugaggcacaaaugagcauucaguugaucaacaaagcaguaaaugcucuaauaaaugaccaacuaauaaugaagaaccaucuacgggacaucaugggaauuccauacuguaauuacagcaaguacugguaccucaaccacacaacuacugggaaaacaucacugcccaaauguuggcuuguaucgaaugguucauacuuaaacgagacccacuuuucugaugauauugaacaacaggcugacaacaugaucacugagauguuacagaaagaguacauggaaaggcaggggaagacaccauugggucuaguugaccucuuuguguucagcacaaguuucuaucucauuagcaucuuccuucauuuagucaagauaccaacucacaggcauguuguaggcaagccgugucccaaaccucacagauugaaucacaugggcauaugcuccugcggacucuauggacagccugguguaccugugaaauggaagagauga

SEQ ID NO: 455 - RNA, 1476 nt, Artificial Sequence
  derived and/or modified protein sequence (wt) from LASV(G2557-SLE-2012;Clade IV)__AIT17302__GPC
augggacaaauagugacuuucuuccaggaggugccucaugugauagaggaggugaugaacauugugcucaucgcauugucucuacuggcaguguugaaaggucuguacaauguugcaacauguggccucauuggucuggucaccuuccuuuugcugugugguagauccuguacaaccaaucuuuacaaaggaguuuaugagcuucagacucuggaacuaaauauggagacacucaauaugaccaugccucucucuugcacaaagaacaauagucaccacuauauaaugguggguaaugagacgggacuggaacugaccuugaccaacacaaguaucaucagccacaaguuuuguaaucugucugaugcucacaaaaagaaucucuaugaucacacccuuaugagcauaauuucgacuuuucauuuguccauucccaacuucaaucaguaugaagcaaugagcugugacuucaauggagggaaaauuagugugcaauacaaccuaagccacagcuaugcuguggaugcagccaaccauuguggcacaguugcaaaugguguccuacagacuuucaugaggauggcuuggggugggagcuauauugcccuugauucaggccgugguaauugggauuguauuaugacuaguuaccaauaucuaauaauucaaaauacaaccugggaagaucacugccaguucucaagaccaucucccaucggcuaucuugggcuccucucacaaaggaccagagacauuuacauuaguagaagacuacugggcacauucacauggacacuaucggauucugaaggcaaugacacaccagggggauacugccugaccagguggauguuaauugaagcugaguugaaaugcuucgguaacacagcuguagccaaaugcaaugaaaaacaugaugaagaauucugugacaugcugagacuguuugacuuuaacaaacaagccauucaaagauuaaaggcugaggcacaaaugaguauccaguugaucaacaaggcagugaaugcucugauuaaugaccaauugauaaugaaaaaccaucuacgggacaucauggggauuccauacuguaacuauaguaaguacugguaucucaaccacacaaccacugggaaaacaucguugcccaaauguuggcuugugucuaaugguucauaucuaaacgagacccacuuuucugaugacauugaacagcaagccgacaacaugauaacugaaauguugcaaaaagaguacauggagagacaggggaagacaccauuaggucugguugaccucuuuguguucagcacaaguuucuaccucauuagcaucuuucuucaccuggucaaaauaccaacacauagacacauuguuggcaaaccguguccgaaaccucacaggcugaaucacaugggcauauguuccuguggacucuacaaacaaccugguguaccugucagauggaagagauga

SEQ ID NO: 456 - RNA, 1476 nt, Artificial Sequence
  derived and/or modified protein sequence (wt) from LASV(G2587-SLE-2012;Clade IV)__AIT17310__GPC
augggacaaauagugacauucuuccaggaggugccccaugugauagaagaggugaugaacauuguucucauugcacugucuauacuagcaguguugaagggucuguacaaucuugcaacauguggccuuguuggcuuggucacuuuccuccuguuguguggcaggucuuguacaacuagccuuuacaaagggguuuaugagcuucagacucuggaacuaaacauggaaacacucaauaugaccaugccucucuccugcacaaagaacaauagucaucauuacauaauggugggcaaugagacaggacuggaacugaccuugaccaacacgagcaucauuaaucauaaauuuugcaaucugucugaugcccacaaaaagaaucucuaugaccacgcucuuaugagcauuaucucaaccuuccacuuguccaucccuaacuucaaucaguaugaggcaaugagcugcgauuuuaaugggggaaagaucagugugcaguacaaccugagucacagcuaugccggggaugcagccacucacuguggcacugucgcaaaugguguauuacagacuuucaugaggauggcuuggggugggagcuacauugcucuugacucaggccguggcaagugggacuguaucaugacuaguuaucaauaucugauaauccaaaauacaaccugggaagaucacugccaauucucgagaccaucucccauugguuaucuugggcuccuuucacaaaggaccagagauauuuacauuaguagaaggcuacuaggcacauucacauggacacugucagauucugaaggcaaggacacaccagggggauauugucuaaccagauggaugcugauugaagcugaacuaaagugcuucgggaacacagcuguggcaaaauguaaugagaagcaugaugaggaauuuugugacaugcugagguuguuugacuuuaauaaacaagccauucaaagguuaaaaacugaagcacaaaugagcauucaguugaucaacaaagcaguaaaugcuuugauaaaugaccaacuuauaaugaagaaccaucuacgggauaucauggggauuccauacuguaauuacagcaaguauugguaccucaaccacacaacuacugggaaaacaucacugcccagauguuggcuuguaucaaaugguucauaccugaacgagacccacuuuucugaugauaucgaacaacaagcugacaauaugaucacugagaugcuacagaaggaauauauggagaggcaggggaagacaccauugggucugguugaccucuuugucuucagcacaagcuucuaucucaucagcaucuuccuucaccuaguuaagauaccaacucauaggcauauuguaggcaagccgugucccaaaccucacaggcugaauuauaugggcauuuguuccuguggacucuacaaacagccuggugugccugugaaauggaagagauga

SEQ ID NO: 457 - RNA, 1476 nt, Artificial Sequence
  derived and/or modified protein sequence (wt) from LASV(G2612-SLE-2012;Clade IV)__AIT17314__GPC
augggacaaauagugacauucuuccaagaaguaccccauguaauagaagaggugaugaacauuguucucauuacauugucuauacuagcaguguugaaaggucuguacaauguugcgacauguggccucguuggcuuggucacuuuccuccuguuguguggcaggucuugcacaaccagccuuuacaaagggguuuaugagcuucagacucuggaacuaaacauggaaacacucaauaugaccaugccucucuccugcacaaagaacaauagucaucauuacauaauggugggcaaugagacaggacuagaacugaccuugaccaacacgagcauuauuaaucauaaauuuugcaaucugucugaugcccacaaaaaagaccucuaugaccacgcucucaugagcaucaucucaaccuuccacuuguccaucccuaacuucaaucaguaugaggcaaugagcugcgauuuuaaugggggaaagauuagugugcaguacaaccugagucacagcuaugccguggaugcagccaaccauuguggcacuguugcaaaugguguauuacagacuuucaugaggauggcuuggggugggagcuacauugcucuugacucaggcagaggcgggugggacuguauuaugacuaguuaucaauaucugauaauccaaaauacaaccugggaagaucacugccaauucucgagaccaucucccaucgguuaucucgggcuccucucacaaaggaccagggauauuuauaucaguagaagguugcugggcacauucacauggacacugucagauucugaaggcaaugacacaccagggggauauugucuaaccagauggaugcuaauugaagcugaacuaaagugcuucgggaacacagcuguggcaaaguguaaugagaagcaugaugaggaauuuugugacaugcugaggcuguuugacuucaacaaacaagccauucaaagguugaaagcugaagcacaaaugagcauucaguugaucaacaaagcaguaaaugcuuugauaaaugaccaacuuauaaugaaaaaccaucuacgagacaucauggggauuccauacuguaauuacagcaaguauugguaccucaaccacacaacuacugggaaaacaucacugcccaaauguuggcuuguaucaaaugguucauaccugaacgagacccacuuuucugaugauauugaacaacaagcugacaacaugaucacugagauguuacagaaggaguauauggagaggcaggggaagacaccauugggucugguugaccucuuuguguucagcacaagcuucuaucucauuagcaucuuccuucaccuaguuaaaauaccaacucauaggcauauuguaggcaagccgugucccaaaccucacagacugaaucauauggguauuuguuccuguggacucuacaaacagccuggugugccuguuaaauggaagagauga

SEQ ID NO: 458 - RNA, 1476 nt, Artificial Sequence
  derived and/or modified protein sequence (wt) from LASV(G2615-SLE-2012;Clade IV)__AIT17318__GPC
augggacaaauagugacuuucuuccaggaagugccucaugugauagaggaggugaugaacauugugcucaucgcauugucuuuacuggcaguuuugaaaggucuguacaauguugcaacauguggccucauuggucuggucaccuuccuuuuacuguguggcagauccugcacaaccaaucuuuacaaaggagucuaugagcuucagacucuggaacuaaauauggagacacucaauaugaccaugccucucucuugcacaaagaacaauagucaccacuauauaaugguggguaaugagacgggacuggaauugaccuugaccaacacaagcaucaucaaccacaaguuuuguaaucugucugaugcucacaaaaagaaucucuaugaucacgcccuuaugagcauaaucucgacuuuucacuuguccauucccaacuucaaucaguaugaagcaaugagcugugacuucaauggagggaaaauuagugugcaguacaacuuaagccacagcuaugcuguggaugcagccaaccacuguggcacaguugcaaaugguguccugcagacuuucaugaggauggccuggggugggagcuauauugcccuugauucaggccgugguaauugggauuguaucaugacuaguuaccaauaucuaauaauucagaauauaaccugggaagaucacugccaguucucaagaccaucucccaucggcuaucuugggcuucucucacaaaggaccagagacauuuacauuaguagaagacuacugggcacauucacauggacacuaucagauucugaaggcaaugacacaccagggggauacugucugaccagguggauguuaauugaagcugaacugaaaugcuucgguaacacagcuguggccaaaugcaaugaaaaacaugaugaagaauucugugacaugcugagacuguuugacuuuaacaaacaagccauucaaagauuaaaggcugaggcacaaaugaguauccaguugaucaacaaggcagugaaugcucuaauuaaugaccaauugauaaugaaaaaccaucuacgggacaucauggggauuccauacugcaacuauaguaaguauugguaucucaaccacacaaccacuggaaaaacaucguuacccaaaugcuggcuugugucuaaugguucauaccuaaacgagacccacuuuucugaugacauugaacagcaagccgacaacaugauaacugaaauguuacaaaaagaguacauggagagacaggggaagacaccauuaggucugguugaccucuuuguguucagcacaaguuucuaccucauuagcauuuuucuucaccuagucaaaauaccaacacauaggcacauuguuggcaaaccguguccgaaaccucacaggcugaaucacaugggcauauguuccuguggacucuacaaacaaccugguguaccugucagauggaagagauga

SEQ ID NO: 459 - RNA, 1476 nt, Artificial Sequence
  derived and/or modified protein sequence (wt) from LASV(G2723-SLE-2012;Clade IV)__AIT17322__GPC
augggacaaauaguaacuuucuuccaggaggugccucaugugauagaggaggugaugaacauugugcucaucgcauugucucuacuggcaguguugaaaggucuguacaauguugcaacauguggccucauuggucuggucaccuuccuuuuacugugugguagauccugcacaaccaaucuuuacaaaggagccuaugagcuucagacucuggaacuaaauauggagacacucaauaugaccaugccucucucuugcacaaagaacaauagucaccacuauauaaugguggguaaugagacgggacuggaauugaccuugaccaacacaagcaucaucaaccacaaguuuugcaaucugucugaugcucacaaaaagaaucucuaugaucacacccuuaugagcauaaucucgacuuuucacuuguccauucccaacuucaaucaguaugaagcaaugagcugugacuucaauggagggaaaauuagugugcaguacaacuuaagccacagcuaugcuguggaugcagccaaccauugugguacaguugcaaaugguguccuacagacuuucaugaggauggccuggggugggagcuacauugcccuugauucaggccgugguaauugggauuguauuaugaccaguuaccaauaucuaauaauucagaauacaaccugggaagaucacugccaguucucaagaccaucucccaucggcuaucuugggcuccucucacaaaggaccagagacauuuacauuaguagaagacuacugggcacauucacauggacacuaucagauucugaaggcaaugacacaccagggggauacugucugaccagguggauguuaauugaggcugagcugaagugcuucgguaacacagcuguagccaaaugcaaugaaaaacaugaugaagaauucugugacaugcugagacuguuugacuuuaacaaacaagcuauucaaagauuaaaggcugaggcacaaaugaguauccaguugaucaacaaggcagugaaugcucuaauuaaugaccaauuaauaaugaaaaaccaucuacgggacaucauggggauuccauacuguaacuauaguaaguauugguaucucaaccacacaaccacuggaaaaacaucauugcccaagugcuggcuuguaucuaaugguucauaucuaaacgagacccacuuuucugaugacauugaacagcaagccgacaacaugauaacugaaauguugcaaaaggaguacauggagagacaggggaagacaccauuaggucugguugaccucuuuguguucagcacaaguuucuaccucauuaguauuuuucuucaccuagucaaaauaccaacacauaggcacauuguuggcaaaccguguccgaaaccucacaggcugaaucauaugggcauauguucuuguggacucuauaaacaaccugguguaccugucagauggaagagauga

SEQ ID NO: 460 - RNA, 1476 nt, Artificial Sequence
  derived and/or modified protein sequence (wt) from LASV(G2868-SLE-2012;Clade IV)__AIT17328__GPC
augggacaaauagugacauucuuccaagaagugccucauguaauagaagaggugaugaacauuguucucauuacacugucuauacuggcaguguugaaaggucuguacaacauugcaacauguggccuuguugguuuggucacuuuccuccuguugugugguaagucuugcacaaccagccucuauaaagggguuuaugagcuccagacucuggaacuaaacauggagacacucaauaugaccaugccucucuccugcacaaagaacaacagucaucauuauauaagggugggcaaugagacaggacuagaacugaccuugacuaacacgagcauuauuaaucauaaauuuuguaaucugucugaugcccacaaaaagaaccucuaugaccacgcucuuaugagcauaaucucaacuuuccacuuguccauccccaacuucaaucaguaugaggcgaugagcugcgauuuuaaugggggaaaaauuagugugcaguacaacuugagucauagcuaugcuguagaugcagccaaccauuguggcacuguugcaaaugguguauugcagacuuucaugaggauggcuuggggugggagcuacauugcucuugacucaggucaugguaauugggacuguaucaugacuaguuaucaauauuuaauaauccaaaauacaaccugggaagaucacugccaauucucgagaccaucuccuaucgguuaccuugggcuccucucacaaaggaccagagauauuuacauuagcagaagacuacuaggcacauucacauggacacuaucagauucugaaggcaaugacgcaccagggggauauugucugaccagauggaugcuaauugaggcugaacuaaaaugcuucgggaacacagcuguagcaaaauguaaugagaaacaugaugaggaguuuugugacaugcugaggcuguuugacuucaauaaacaagccauucaaagguugaaagcugaagcacaaaugagcauucaguugaucaacaaagcaguaaaugcuuuaauaaaugaccaacucauaaugaagaaccaccugcgggacaucaugggaauuccauacuguaauuacagcaaguauugguaccucaaccacacaacuacugggaaaacaucacugcccaaauguuggcuuguaucaaaugguucguacuugaacgagacucacuuuucugaugauauugaacaacaagcugacaacaugaucacugagauguuacagaaggaguacauggagaggcaggggaagacaccauugggccugguugaccucuuuguguucagcacaaguuucuaucucauuagcaucuuccuccaccuggucaaaauaccaacucauaggcauguuguaggcaagucgugucccaaaccucacagacugaaucacaugggcauauguucuuguggacucuacaaacagccuggugugccuguaaaauggaagagauga

SEQ ID NO: 461 - RNA, 1476 nt, Artificial Sequence
  derived and/or modified protein sequence (wt) from LASV(G2903-SLE-2012;Clade IV)__AIT17332__GPC
augggacaaauagugacauucuuccaggaagugccucauguaauagaagaggugaugaacauuguucucauugcacugucuauacuggcagugcugaaaggucuguacaaucuugcaacauguggccucguugguuuggucacuuuccuccuguugugugguaggucuugcacaaccagucuuuacaaagggguuuaugagcuucagacucuggaacuaaacauggagacacucaacaugaccaugccucucuccugcacaaagaacaacagucaucauuauauaagggugggcaaugagacaggacuagaacugaccuugaccaacacgagcauuauuaaucacaaguuuugcaaccugucugaugcccacaaaaagaaccucuaugaccacgcccucaugagcauaaucucaacuuuccacuuguccauccccaacuucaaucaguaugaggcaaugagcugcgauuucaaugggggaaagauuagugugcaguacaaccugagucacagcuaugccguagaugcagccaaucauuguggcacuguugcaaaugguguacugcagacuuucaugaggauggcuuggggugggagcuacauugcucuugacucaggucaugguagaugggacuguaucaugacuaguuaucaauaucugauaauccaaaauacaaccugggaagaucacugccuauucucgagaccaucucccaucgguuaucucgggcuccucucacaaagaacuagagauauuuauaucaguagaagacuacuaggcacauucacauggacauugucagauucugaaggcagggacacaccagggggauauugucuaaccagguggaugcuaauugaggcugaacuaaaaugcuucgggaacacagcuguggcaaaauguaaugaaaaacaugaugaggaauuuugugacaugcugaggcuguuugacuucaacaaacaagccauucaaagguugaaagcugaagcacaaaugagcauucaguuaaucaacaaagcaguaaaugcuuugauaaaugaucaacuuauaaugaagaaccaucuacgggacaucaugggaaucccauacuguaauuacagcaaauauugguaccucaaccacacaacuacuggaagaacaucacugccuagauguuggcuuguaucaaaugguucauaccugaacgaaacccacuuuucugaugauauugaacaacaagcugacaacaugaucacugagauguuacaaaaagaguauauggaaaggcaggggaagacaccauugggccuaguugaucucuuuguguuuagcacaaguuucuaccuuauuagcaucuuucuucaccuagucaaaauaccaacucauaggcauauuguaggcaagucgugucccaaaccucacagacugaaucacaugggcauuuguuccugugggcucuacaaacagccuggugugccuguaaaauggaagagauga

SEQ ID NO: 462 - RNA, 1476 nt, Artificial Sequence
  derived and/or modified protein sequence (wt) from LASV(G2944-SLE-2012;Clade IV)__AIT17340__GPC
augggacaaauagugacauucuuccaggaagugccccaugucauagaagaggugaugaacaucguucucauugcacugucuauacuagcaguguugaaaggucuguacaacuucgcaacauguggccucguuggcuuggucacuuuccuccuguuguguggcaggucuugcacaacuagccuuuacaaggggguuuaugagcuucagacucuggaacuaaacauggaaacacucaauaugaccaugccucucuccugcacaaagaacaauagucaucauuauauaauggugggcaaugagacaggacuagaacugaccuugaccaacauaagcauuauuaaccauaaauuuugcaaucugucugaugcccacaaaaagaaccucuaugaccacgcucucaugagcauuaucucaacuuuccacuuguccaucccuaacuucaaucaguaugaggcaaugagcugcgauuucaaugggggaaagauuaguguacaauacaaccugagccacagcuaugccggggacgcagccaaccauuguggcacuguugcaaaugguguauuacagacuuucaugaggauggcuuggggugggagcuacaucgcucuugacucaggccguggcgagugggacuguauuaugacgaguuaucaauaucugauaauccaaaauacaaccugggaagaucacugccaauucucgagaccaucucccaucgguuaucucgggcuccucucacaaaggaccagagauauuuauauuaguagaaggcuacuaggcacauucacauggacacugucagauucugaaggcaaggacacaccagggggauauugucuaaccagauggaugcuaauugaggcugagcuaaagugcuucgggaacacagcuguggcaaaauguaaugagaagcaugaugaggaauuuugugacaugcugagguuguuugacuuuaacaaacaagccauucaaagguugaaagcugaggcacaaaugagcauucaguuaaucaacaaagcaguaaaugcuuugauaaaugaccaacuuauaaugaagaaccaucuacgggacaucauggggauuccauacuguaauuacagcaaguauugguaccucaaccacacaacuacuggaaaaacaucacugcccaaguguuggcuuguuucaaaugguucauaccugaacgagacccacuuuucugaugacauugaacaacaagcugacaacaugaucacugagauguuacagaaggaguauauggagaggcaggggaagacaccauugggucugguugaccucuuuguguucagcacaagcuucuaucucauuagcaucuuccuucaccuaguuaaaauaccaacucauaggcauauuguaggcaagccgugucccagaccucacagguugaaucauaugggcauuuguuccuguggacucuauaaacagccuggugugccuguaaaauggaagagauga

SEQ ID NO: 463 - RNA, 1476 nt, Artificial Sequence
  derived and/or modified protein sequence (wt) from LASV(G3010-SLE-2013;Clade IV)__AIT17344__GPC
augggacagauaguaacauucuuccaggaagugccucaugugauagaagaggugaugaacauuguucucauugcacugucuauauuagcagugcugaaaggucuguacaauuuugcaacauguggccucguugguuugguuaccuuccuccuguuaugugguaggucuugcacaaccagucuuuacaaagggguuuaugagcuucagacucuggaacuaaacauggagacacucaauaugaccaugccucucuccuguacaaagaacaacagucaucauuauauuaugguggguaaugagacaggacuagaacugaccuugaccaacacgagcaucauuaaucauaaauuuugcaaucugucugaugcccacaaaaagaaccucuauaaucacgcucuuaugagcauaauuucaacuuuccaucuguccauucccaacuucaaucaguaugaggcaaugagcugcgauuucaaugggggaaagauuagugugcaguacaaccugagucacaguuaugcuggggaugcggccagccauuguggcacuguugcaaauggugucuuacagacuuucaugaggauggcuugggguggaagcuauauugcucuugacucaggcuauggcaagugggacugcauuaugacuaguuaucaguaccugauaauucaaaauacaaccugggaagaucacugccaauucucaagaccaucucccauuggcuaucucgggcuccucucacaaaggaccagagauauuuauauuaguagaagacugcugggcacauucacauggacacugucggauucugaagguaaggacacaccagggggauauuguuugaccagauggaugcuaauugaagcugaacuaaagugcuucgggaacacagcuguagcaaaauguaaugagaagcaugaugaggaauuuugugacaugcugaggcuguuugacuucaacaaacaagccauucaaagauugaaaacugaagcacaaaugagcauucaguugaucaacaaggcaguaaaugccuuaauaaaugaccagcuuauaaugaagaaccaucuacgagacauaaugggaauuccauacuguaacuacagcaaguauugguaccucaaccacacaaccacugggaaaacaucacugccuaaauguuggcuuguaucaaauggcucauacuugaaugagacccacuuuucugaugauauugaacaacaggcugacaacaugaucacugagauguuacagaaagaguacauggagaggcaggggaagacaccauugggccuggucgaccuuuuuguguucagcacaaguuucuaucucaucaguaucuuucuucaccuagucaaaauaccaacucauagacauauuguaggaaagucgugucccaaaccucacagauugaaucacaugggcauauguuccuguggacucuacaaacagcccggugugccugugagauggaagagauga

SEQ ID NO: 464 - RNA, 1476 nt, Artificial Sequence
  derived and/or modified protein sequence (wt) from LASV(G3016-SLE-2013;Clade IV)__AIT17348__GPC
augggacaaauagugacauucuuccaagaaguaccccauguaauagaagaggugaugaacauuguucucauugcacugucuauacuagcaguguugaaaggucuguacaauauugcgacauguggccucauuggcuuggucacuuuccuccuguuguguggcaggucuugcacaacuagccuuuacaaagggguuuaugaacuucagacucuggaacuaaacauggaaacacucaauaugaccaugccucucuccugcacaaagaacaauagucaucauuacauaauggugggcaaugagacaggauuagaacugaccuugaccaacacgagcauuauuaaucauaaauuuuguaaucugucugaugcccacaaaaagaaccucuaugaccacgcucucaugagcauuaucucaaccuuccacuuguccaucccuaacuucaaucaguaugaggcaaugagcugcgauuuuaaugggggaaagaucagugugcaguauaaccugagucacagcuaugccggggaugcagccaaccacuguggcacuguugcaaaugguguacuacagacuuucaugaggauggcuuggggugggagcuacauugcucuugacucaggcagaggcaggugggauuguauuaugacuaguuaucaauaucugauaauccaaaauacaaccugggaagaucacugccaauucucgagaccaucucccaucggcuaucucgggcuccucucacaaaggaccagggacauuuacauuaguagaagguugcuaggcacauucacauggacacugucagauuccgaaggcaaugacacaccagggggauauugucuaaccagauggaugcuaauugaagcugaacuaaagugcuucgggaacacagcuguggcaaaguguaaugagaagcaugaugaggaauuuugugacaugcugaggcuguuugacuucaacaaacaagccauucaaagguugaaagcugaggcacaaaugagcauucaguugaucaacaaagcaguaaaugcuuuaauaaaugaccaacucauaaugaagaaccaucuacgagacaucauggggauuccauacuguaauuacagcaaguauugguaccucaaccacacaacuacugggaaaacaucacugcccaaauguuggcuuguaucaaauggaucauaccugaacgagacccacuuuucugaugauauugaacaacaagcugacaacaugaucacugagauguuacagaaggaguauauggagaggcaggggaagacaccauugggucugguugaccucuuuguguucagcacaagcuucuaucucauuagcaucuuccuucaccuaguuaaaauaccaacucauaggcauauuguaggcaagccgugucccaaaccucacagguugaaucauaugggcauuuguuccuguggacucuauaaacagccuggugugccuguuaaauggaagagauga

SEQ ID NO: 465 - RNA, 1476 nt, Artificial Sequence
  derived and/or modified protein sequence (wt) from LASV(G3034-SLE-2013;Clade IV)__AIT17350__GPC
auggggcaaauagugacuuuuuuccaggaagugccucaugugauagaggaggugaugaacauuguacucaucgcacugucuauacuugcggugcuaaaagguuuguacaauguugcaacauguggucuuauugguuugguuaccuuucuuuuacugugugguagaucuuguacaaccacucuguacaaaggaguuuaugaacuucaggccuuggaauugaacauggagacacucaauaugaccaugccucucucuugcacaaagaacaauagccaucauuauauaaugguaggcaaugagacaggacuggaacuaaccuugaccaauacaaguaucaucgaucacaaguuuugcaaccugucugaugcccacaaaaagaaccucuaugaucaugcucuuaugaguauaaucucaacuuuccacuuguccauucccaacuuuaaucaguaugaagcaaugaguugugacuuuaauggagggaaaauuaguguacaauacaaccuaagucacagcuaugcuggagaugcagccaagcauuguggcacaguugcgaauggcguuuugcagaccuucaugagaauggccuggggugggaguuacauugcucuugacucaggucgcaauggaugggauuguguuaugacuaguuaucaauaucuaauaauucaaaacacaaccugggaagaucacugccaguucucaagaccaucucccauuggcuaccuugggcuccucucacaaaggaccagagacauuuacauuaguagaagacugcugggcacauucacauggacacugucagauucugaaggcaaagauacaccagggggguacugucugacuagauggaugcuaauugaggcugaacugaaauguuucggcaacacagcuguugccaaauguaaugagaagcaugaugaagaauucugugauaugcugaggcuauuugacuucaacaagcaagccauccaaagguuaaagacugaagcacaaaugagcauucaguugaucaacaaggcugugaaugcuuuaauaaaugaucaacugauaaugaaaaaccaucugcgggauaucauggggauuccauacuguaacuacagcaaguacugguaucucaaccacacaguuacugggaaaacaucacugccuagaugcuggcuuguaucaaauggcucauauuuaaacgagacccacuucucugaugacauugagcaacaagcugacaacaugaucacugagauguugcaaaaggaguacauagagaggcaggggaagacaccauugggucugguugaccucuuuguguucagcacaaguuuuuaucucauuaguaucuuccuucaccuagucaaaauaccaacucauagacacauuauaggcaaaccguguccaaaaccucacaggcugaaucauaugggcauaugcuccugugggcucuauaaacaaccuggugugccuguaagauggaagagauaa

SEQ ID NO: 466 - RNA, 1476 nt, Artificial Sequence
  derived and/or modified protein sequence (wt) from LASV(G3101-SLE-2013;Clade IV)__AIT17354__GPC
augggacaaauagugacauucuuccaggaagugccccauguuauagaagaggugaugaacaucguucucauugcacugucuauacuagcaguguugaaaggucuguacaacuucgcaacauguggccucguuggcuuggucacuuuccuccuguuguguggcaggucuugcacaacuagccuuuacaaggggguuuaugagcuucagacucuggaacuaaacauggaaacacucaauaugaccaugccucucuccugcacaaagaacaauagucaucauuauauaauggugggcaaugagacaggacuagaacugaccuugaccaacauaagcauuauuaaccauaaauuuugcaaucugucugaugcccacaaaaagaaccucuaugaccacgcucuuaugagcauuaucucaacuuuccacuuguccaucccuaacuucaaucaguaugaggcaaugagcugcgauuucaaugggggaaagauuaguguacaguacaaccugagccacagcuaugccggggacgcagccaaccauuguggcacuguugcaaaugguguauuacagacuuucaugaggauggcuuggggugggagcuacaucgcucuugacucaggccauggcgggugggacuguauuaugacgaguuaucaauaucugauaauccaaaauacaaccugggaagaucacugccaauucucgagaccaucucccaucgguuaucucgggcuccucucacaaaggaccagagauauuuauauuaguagaaggcuacuaggcacauucacauggacacugucagauucugaaggcaaggacacaccagggggauauugucuaaccagauggaugcuaauugaggcugagcuaaagugcuucgggaacacagcuguggcaaaauguaaugagaagcaugaugaggaauuuugugacaugcugagguuguuugacuuuaacaaacaagccauucaaagguugaaagcugaggcacaaaugagcauucaguugaucaacaaagcaguaaaugcucugauaaaugaccaacuuauaaugaagaaccaucuacgggacaucauggggauuccauacuguaauuacagcaaguauugguaccucaaccacacaacuacuggaaaaacaucacugcccaaguguuggcuuguuucaaaugguucauaccugaacgagacccacuuuucugaugacauugaacaacaagcugacaacaugaucacugagauguuacagaaggaguauauggagaggcaggggaagacaccauugggucugguugaccucuuuguguucagcacaagcuucuaucucauuagcaucuuccuucaccuaguuaaaauaccaacucauaggcauauuguaggcaagccgugucccagaccucacagguugaaucauaugggcauuuguuccuguggacucuauaaacagccuggugugccuguaaaauggaagagauga

SEQ ID NO: 467 - RNA, 1476 nt, Artificial Sequence
  derived and/or modified protein sequence (wt) from LASV(G3110-SLE-2013;Clade IV)__AIT17360__GPC
augggacaaauagugacauucuuccaggaagugccucauguaauagaagaggugaugaacauuguucucauugcacugucaauauuggcagugcuaaaaggucuguauaauuuugcuacauguggccucguugguuuggucacuuuccucuuacuguguggcaggucuugcacaaccagccuuuacaaaggaguuuaugagcuucagacucuggaacuaaacauggagacucucaauaugaccaugccucucucuugcacaaagaacaauagucaucauuacauaagggugggcaaugagacagggcuagaacugaccuuaaccaacacaagcauuauuaaucaucgauuuugcaaucugucugaugcccacaaaaagaaccuuuaugaccacgcucuuaugagcauaaucucaacuuuccacuuguccaucccuaacuucaaucaguaugaggcaaugagcugugauuuuaaugggggaaagauuagugugcaauacaaccuaagucacagcuaugcuggggaugcagccaaccauuguggcacaguugcaaaugguguccugcagacuuucaugaggauggccugggguggaagcuacauugcucuugacucaggccauggcaagugggacuguauuaugaccagcuaucaauaccugauaauccaaaauacaaccugggacgaucauugccaguucucgagaccaucucccaucgguuaucucggucuccuuucgcaaaggaccagagacauuuauauuaguagaagacuacuaggcacauucacauggacacugucagauucugaaggcaaggacacaccagggggauauugucugacuagauggaugcugauugaggcugaacuaaaaugcuucgggaacacagcuguggcaaaaugcaaugagaaacaugacgaagaauucugugauaugcugaggcuguuugacuucaacaaacaggccauucgaagguuaaaagccgaagcacaaaugagcauucaguuaauuaacaaagcaguaaaugcucugauaaaugaucaacuaauaaugaagaaccaucuacgggauaucaugggaauuccauacuguaauuacagcaaauacugguaccucaaccacacaacuacugggaaaacaucacugcccagauguuggcuuguaucaaauggaucauauuugaaugagacccacuuuuccgaugacauugagcaacaagcugacaauaugaucacugagauguugcagaaagaguauauggagagacaggggaaaacaccauuaggccuaguugaccucuuuguguucagcacaaguuuuuaucucauuagcaucuuccuucacuuagucaaaauaccaacucauaggcauauuguaggcaagucguguccaaaaccucacagguugaaucacauggguauauguuccugcgguuucuauaaacagcccggugugccugugaaauggaagagauga

SEQ ID NO: 468 - RNA, 1476 nt, Artificial Sequence
  derived and/or modified protein sequence (wt) from LASV(G3148-SLE-2013;Clade IV)__AIT17364__GPC
augggacaaauagugacauucuuccaggaagugccccaugucauagaagagguaaugaacaucguucucauugcacugucuauacuagcaguguugaaaggucuguauaauuuugcaacauguggccucguuggcuuagucacuuuccuccuguuguguggcaggucuugcacaacuagccuuuacaaggggguuuaugagcuucagacucuggaacuaaacauggaaacacucaauaugaccaugccucucuccugcacaaagaacaacagucaucauuauauaauggugggcaaugaaacaggacuagaacugaccuugaccaacacgagcauuauuaaucauaaauuuugcaaucugucugaugcccacaagaagaaccucuaugaccacgcucuuaugagcauuaucucaacuuuccacuuguccaucccuaacuucaaucaguaugaggcaaugagcugcgauuucaaugggggaaagauuagugugcaguacaaccugagucacagcuaugccggggacgcagccaaccauuguggcacuguugcaaaugguguauuacagacuuucaugaggauggcuuggggugggagcuacauugcucuugacucaggccgugacaggugggacuguauuaugacuaguuaucaauaucugauaauccaaaauacaaccugggaagaucacugucaauucucgagaccaucucccaucgguuaucucgggcuccucucacaaaggaccagagauauuuauauuaguagaaggcuacuaggcacauucacauggacacugucagauucugaaggcaaggacacaccagggggauauugucuaaccagauggaugcuaauugaggcugagcuaaagugcuucgggaacacagcuguggcaaaguguaaugagaagcaugaugaggaauuuugugacaugcugaggcuguuugacuuuaacaaacaagccauucaaagguugaaagcugaagcacaaaugagcauucaguugaucaacaaggcaguaaaugcuuugauaaaugaccaacuuauaaugaagaaccaucuacgggacaucauggggauuccauacuguaauuacagcaaguauugguaccucaaccacacaacuacuggaaaaacaucacugcccaaguguuggcuuguaucaaaugguucauaccugaacgagacccacuuuucugaugacauugaacaacaagcugacaacaugaucacugagauguuacagaaggaguauauagagaggcaggggaagacaccauugggucugguugaccucuuuguguucagcacaagcuucuaucucauuagcaucuuccuucaccuaguuaaaauaccaacucauaggcauauugugggcaagccguguccuaaaccucacagguugaaucauaugggcauuuguuccuguggacucuauaaacagccuggugugucugugaaauggaagagauga

SEQ ID NO: 469 - RNA, 1476 nt, Artificial Sequence
  derived and/or modified protein sequence (wt) from LASV(G3151-SLE-2013;Clade IV)__AIT17368__GPC
augggacaaauagugacauucuuccaggaagugccucauguaauagaagaggugaugaacauuguucucauugcacugucaauauuggcagugcuaaaaggucuguauaauuuugcuacauguggccucguugguuugguuacuuuccucuuacuguguggcaggucuugcacaaccagccuuuacaaaggaguuuaugagcuucagacucuggaacuaaacauggagacucucaauaugacuaugccucucucuugcacaaagaacaauagucaucauuacauaauggugggcaaugagacagggcuagaacugaccuuaaccaacacgagcauuauuaaucauaaauuuugcaaucugucugaugcccacaaaaagaaccuuuaugaccacgcucuuaugagcauaaucucaacuuuccacuuguccaucccuaacuucaaucaguuugaggcaaugagcugugauuuuaaugggggaaagauuagugugcaguacaaccuaagucacagcuaugcuggggaugcagccaaccauuguggcacaguugcaaaugguguccugcagacuuucaugaggauggccugggguggaagcuacauugcucuugacucaggccauagcaagugggacugcauuaugaccagcuaucaauaccugauaauccaaaacacaaccugggacgaucauugccaguucucaagaccaucucccaucgguuaucuuggucuccuuucgcaaaggaccagagacauuuauauuaguagaagacugcuaggcacauucacauggacucuaucagauucugaaggcaaggacacaccagggggguauugucugacuagauggaugcuaauugaggcugaacuaaaaugcuucgggaacacagcuguggcaaaaugcaaugagaaacaugacgaagaauucugugauaugcugaggcuguuugacuucaacaaacaggccauucaaagguuaaaagccgaagcacaaaugagcauucaguuaauuaacaaggcaguaaaugcucugauaaaugaucaacuaauaaugaagaaccaucuacgggauauuaugggaauuccauacuguaauuacagcaaauacugguaccucaaccacacaacuacugggaaaacaucacugcccaaauguuggcuuguaucaaauggaucauauuugaacgagacccacuuuuccgaugacauugagcaacaagcugacaauaugaucacugagauguugcagaaagaguauauggagagacagggaaaaacaccauugggccuaguugaccucuuuguguucagcacaaguuucuaucucauuagcaucuuccuucacuuagucaaaauaccaacucacaggcauauuguagguaagucguguccaaaaccucacagguugaauuacaugggcauauguuccugcggauucuauaaacagcccggugugccuguaaaauggaagagauga

SEQ ID NO: 470 - RNA, 1476 nt, Artificial Sequence
  derived and/or modified protein sequence (wt) from LASV(G3157-SLE-2013;Clade IV)__AIT17370__GPC
augggacaaauagugacauucuuccaggaagugccccaugucauagaagaggugaugaacaucguucucauugcacugucuauacuagcaguguugaaaggucuguacaauuuugcaacauguggccucguuggcuuagucacuuuccuccuguuguguggcaggucuugcacaacuagccuuuacaaggggguuuaugagcuucagacucuggaacuaaacauggaaacacucaauaugaccaugccucucuccugcacaaagaacaacagucaucauuauauaauggugggcaaugaaacaggacuagaacugaccuugaccaacacgagcauuauuaaucauaaauuuugcaaucugucugaugcccacaaaaagaaccucuaugaccacgcucuuaugagcauuaucucaacuuuccacuuguccaucccuaacuucaaucaguaugaggcaaugagcugcgauuucaaugguggaaagauuagugugcaguacaaccugagucacagcuaugccggggacgcagccaaccauuguggcacuguugcaaaugguguauuacagacuuucaugaggauggcuuggggugggagcuacauugcucuugacucaggccgugacaggugggacuguauuaugacuaguuaucaauaucugauaauccaaaacacaaccugggaagaucacugucaauucucgagaccaucucccaucgguuaucucgggcuccucucacaaaggaccagagauauuuauauuaguagaaggcuacuaggcacauucacauggacacugucagauucugaaggcaaggacacaccagggggauauugucuaaccagauggaugcuaauugaggcugagcuaaagugcuucgggaacacagcuguggcaaaguguaaugagaagcaugaugaggaauuuugugacaugcugaggcuguuugacuuuaacaaacaagccauucaaagguugaaagcugaagcacaaaugagcauucaguugaucaacaaggcaguaaaugcuuugauaaaugaccaacuuauaaugaagaaccaucuacgggacaucauggggauuccauacuguaauuacagcaaguauugguaccucaaccacacaacuacuggaaaaacaucacugcccaaguguuggcuuguaucaaaugguucauaccugaacgagacccacuuuucugaugacauugaacaacaagcugacaacaugaucacugagauguuacagaaggaguauauggagaggcaggggaagacaccauugggucugguugaccucuuuguguucagcacaagcuucuaucucauuagcaucuuccuucaccuaguuaaaauaccaacucauaggcauauugugggcaagccguguccuaaaccucacagguugaaucauaugggcauuuguuccuguggacucuauaaacagccuggugugucugugaaauggaagagauga

SEQ ID NO: 471 - RNA, 1476 nt, Artificial Sequence
  derived and/or modified protein sequence (wt) from LASV(G3206-SLE-2013;Clade IV)__AIT17378__GPC
augggacaaauagugacauucuuccaggaagugccucauguaauagaagaggugaugaacauuguucucauugcacugucuauacuagcagugcugaaaggucuguacaaucuugcaacauguggccucguugguuuggucacuuuccuccuguugugugguaggucuugcacaaccagucuuuacaaagggguuuaugagcuucagacucuggaacuaaacauggagacacucaacaugaccaugccucucuccugcacaaagaacaacagucaucauuauauaauggugggcaaugagacaggacuagaacugaccuugaccaacacgagcauuauuaaucauaaauuuugcaaccugucugaugcccacaaaaagaaccucuaugaucacacucuuaugagcauaaucucaacuuuccacuuguccauccccaacuucaaucaguaugaggcaaugagcugcgauuuuaaugggggaaagaucagugugcaguacaaccugagucacagcuaugccguggaugcagccaaccauuguggcacuguugcaaaugguguacuacagacuuucaugaggauggcuuggggugggagcuacauugcucuugacucaggccguagugggugggacugcauuaugacuaguuaucaauaucugguaauccaaaauacgaccugggaagaucacugccaauucucgagaccaucuccuaucgguuaucucgggcuccucucacaaaggaccagagauauuuauaucaguagaagacuacuaggcacauucacauggacacugucagauuccgaaggcaagaacacaccagggggauauugucugaccagguggaugcuaauugaggcugaauuaaaaugcuucgggaacacagcuguggccaaauguaacgagaaacaugaugaggaguuuugugacaugcuaaggcuguuugacuucaacaaacaagccauucaaagguugaaagcugaagcacaaaugagcauucaguugaucaacaaagcagugaaugcuuugauaaaugaucaacuuauaaugaagaaccaucuacgggacauuaugggaaucccauacuguaauuacagcaaguauugguaccucaaccacacaacuacugggagaacaucacugccuagauguuggcuuguaucaaaugguucauaccugaacgagacccacuuuucugaugauauugaacaacaagcugacaacaugaucacugagauguuacagaaggaguauauggaaaggcaggggaagacaccacugggucuaguugaucucuuuguguucagcacaaguuucuaucucauuagcaucuuccuucaccuagucaaaauaccaacucauaggcauauuguaggcaagucaugucccaaaccucacagacugaaucacaugggcauuuguuccuguggguucuauaaacagccuggugugccugugaaauggaagagauga

SEQ ID NO: 472 - RNA, 1476 nt, Artificial Sequence
  derived and/or modified protein sequence (wt) from LASV(G3234-SLE-2013;Clade IV)__AIT17388__GPC
augggacaaauagugacauuuuuccaggaagugccucaugugauagaggaagugaugaacauuguacucaucgcacugucuauucuugcaguguuaaaggguuuguacaauguugcaacauguggccucauugguuugguuaccuuucuuuuacugugugguagaucuugcacaaccacucuguacaaaggagucuaugaacuucaggcccuggaauuaaacauggagacacucaauaugaccaugccucucucuugcacaaagaacaauagucaccacuauauaaggguggguaaugagacaggacuagaacuaaccuugaccaacacauccaucaucaaucauaaguuuugcaacuuaucugaugcccacaaaaagaaccucuaugaucaugcacuuaugagcauaauuucaacuuuccacuuguccauuccuaacuuuaaucaguaugaagcaaugaguugugacuuuaauggagggauaaucagugugcaguacaaccuaagucacagcuaugcuggagacgcagccaaccauuguggcacaguugcaaauggcguuuugcagaccuucaugaggauggccuggggugggagcuacauugcucuugauucaggccguaaugggugggauugcauuaugaccaguuaucaauaucugauaauucagaauacaaccugggacgaucacugccaauuuucaagaccaucucccauugguuaccuugggcuccucucacaaagaaccagagacaucuacauuagcaggagacuucugggcacauucacauggacacugucagauucugaagguaaggauacaccagggggguacugucugaccagauggaugcuaauugaagcugaacuuaaauguuucggcaacacagcuguagcuaaauguaaugagaagcaugaugaagaauucugugacaugcugaggcuauuugauuucaacaaacaagcuauccaaagguuaaagacugaagcacaaaugaacauucaguugaucaacaaggcugugaacgcuuuaauaaaugaucaauugauaaugaaaaaccaucugcgggauaucauggggauuccauauuguaacuacagcaaguacugguaucucaacaacacagccacugggaaaacaucacugccuagaugcuggcuugugucaaauggcucauaucuaaacgagacccacuucucugaugacauugaacaacaagcugacaacaugaucacugagauguugcaaaaggaguacauggagagacagggaaagacaccauuaggucuggucgaccucuuuguguucagcacaaguuuuuaucucauuaguaucuuccuucaccuagucaaaauaccaacucauagacacauugugggcaaaccguguccuaaaccucacagguugaaucauauaggcauaugcuccuguggacucuauaaacaaccugguguaccuguaaaauggaagagauaa

SEQ ID NO: 473 - RNA, 1476 nt, Artificial Sequence
  derived and/or modified protein sequence (wt) from LASV(G502-SLE-2009;Clade IV)__AIT17126__GPC
augggacagauagugacauucuuccaggaaguaccucauguaauagaagaggugaugaacauuguucucauugcacugucuauacuagcagugcugaaaggucuguauaauuuugcaacauguggccucguuggucuacucaccuuccuccuauuguguggcaggucuugcacaaccggacuuuacaaagggguuuaugagcuucaaacucuggaacuaaacauggagacacucaauaugaccaugccucucuccugcacaaagaacaacagucaucauuauauaaugguggguaaugagacaggacuagaacugacuuugacuaacacgagcaucauuaaucauaaauuuugcaaucugucugaugcccacaaaaagaaccuuuaugaccacgcucuuaugagcauaauuucaacuuuccacuuguccauccccaacuucaaucaguaugaggcaaugagcugcgauuuuaaugggggaaagauuaguguacaguacaaccugagccacaguuaugcuggggaugcggcugaucauuguggcacuguugcaaauggugucuugcagacuuucaugaggauggccuggggugggagcuacauugcucuugacucaggucguggcaggugggacuguauuaugacuaguuaucaauauuugauaauccaaaauacaaccugggaagaucacugccaguucucaagaccaucucccaucgguuaucucgggcuccucucacaaagaacuagagacauuuacauuaguagaaggcuacuaggcacauucacauggacacugucagauucugaaggcaaggacacaccaggaggauauugucugacuagauggaugcugauugaggcugaauuaaaaugcuucgggaacacagcuguagcaaaauguaaugagaagcaugaugaggaauuuugugacaugcugaggcuguuugacuucaacaaacaagccauucaaagguuaaaagcugaagcacagaugagcauucaauugaucaacaaggcaguaaaugcuuugauaaaugaccaacuuguaaugaagaaccacuuacgggacaucaugggaauuccauacuguaauuacagcagguauugguaucucaaccacacaaccacuggaagaacaucacugccuaaauguuggcuugugucaaauggcucauacuuaaacgagacccacuuuucugaugauauugagcaacaagcugacaacaugaucacugagauguuacagaaggaauauauggaaaggcagggaaagacaccauuaggucugguugaccucuuuguguucagcacaaguuucuaucuuauuagcaucuuccuucaccuggucaagauaccaacucauaggcauauugugggcaagucgugucccaaaccucauagauugaaucacaugggcauauguuccuguggacucuacaaacagcccgguguaccugugaaauggaagagauga

SEQ ID NO: 474 - RNA, 1476 nt, Artificial Sequence
  derived and/or modified protein sequence (wt) from LASV(G503-SLE-2009;Clade IV)__AIT17130__GPC
augggacagauagugacauucuuccaggaagugccucauguaauagaagaggugaugaacauuguucucauugcacugucuauauuagcagugcugaaaggucuguacaauuuugcaacauguggcuuuguuggcuuggucacuuuccuccuguuguguggcaggucuuguacaaccagucuuuacaaaggggucuaugagcuucagacucuggaacuaaacauggagacacucaauaugaccaugccucucucuugcacaaagaacaacagucaucauuacauaaggguggguaaugacacaggacuagaacugaccuugaccaacacguccauuauuaaucauaaguuuugcaauuugucugaugcccacaaaaagaaccuuuaugaccacgcucuuaugagcauaauuucaacuuuccacuugucuauccccaacuucaaucaguaugaggcaaugagcugcgauuuuaaugggggaaagauuagugugcaguacaaccugagucacagcuaugcuguggaugcggccagccauuguggcacuauugcaaaugguguuuugcagaccuucaugaggauggcuuggggugggagcuacauugcccuugacucaggccgugacaggugggacuguauuaugacuaguuaucaauaucugauaauucaaaacacaaccugggaagaucacugccaauucucaagaccaucucccaucgguuaucucgggcuucucucacaaaggaccagagacaucuauauuaguagaagacuacuaggcacauucacauggacacugucagauucugaaggcaaggacacaccagggggauauugucugaccagauggaugcuaauugaagcugaacuaaaaugcuucgggaacacagcuguagcaaaguguaaugagaaacaugaugaggaauuuugugacaugcugaggcuguuugacuucaacaaacaagccauucaaagguugaaagcugaagcacagaugagcauucaguugaucaacaaggcaguaaaugcuuugauaaaugaccaacuuauaaugaagaaccaucuacgggacaucaugggaauuccauacuguaauuacagcaaguauugguaccuuaaucacacaacuacugggaaaacaucacuaccuaaauguuggcuugugucaaauggcucauacuugaacgagacccacuuuucugaugauauugagcaacaagcugacaacaugaucacugagauguuacagaaggaguauauggagaggcagggaaagacaccauugggucuaguugaccucuuuguguuuagcacaaguuucuaucucauuaguaucuuccuucaccuagucaaaauaccaacccauaggcauauugugggcaagucgugucccaagccccacagauugaaccacauggguauauguuccuguggacucuauaaacagcccggugugccugugaaauggaagagauga

SEQ ID NO: 475 - RNA, 1476 nt, Artificial Sequence
  derived and/or modified protein sequence (wt) from LASV(G610-SLE-2009;Clade IV)__AIT17134__GPC
augggacagauagugacauucuuccaggaagugccucauguaauagaagaggugaugaacauuguucucauugcacuguccauacuggcagugcugaaaggucuguacaauuuugcaacauguggccucguugguuugguuacuuuccuccuguuguguggcaggucuugcacaacuagucuuuauaaagggguuuaugagcuucagacucuggaacuaaauauggagacacucaauaugaccaugccucucuccugcacaaagaacaacagucaucauuacauaaugguggguaaugagacaggacuggaacugaccuugaccaacacaagcauuauuaaucauaaauuuugcaaucugucugaugcccacaaaaagaaccucuaugaccaugcccuuaugagcauaauuucaacuuuccacuuguccauccccaacuucaaucaguaugaggcaaugagcugcgacuucaaugggggaaagauuagugugcaguacaaccugagucacagcuaugcuggggaugcggccaaccacuguggcacuguugcaaauggugucuuacagacuuucaugaggauggcuuggggugggaguuacauugcucuugacucaggccguggccggugggacuguauuaugacuaguuaucaauaucugauaauccaaaauacgaccugggaagaucacugccaauucucaagaccaucacccaucgguuaucucgggcuccucucacagaggaccagagauauuuauauuaguagaagacuacuaggcacauuuacauggacacugucagauucugaagguaaggacacaccagggggauauugucugaccagauggaugcuaauugaagcugaauuaaaaugcuucggaaacacagcuguagcaaaauguaaugagaagcaugaugaggaauuuugugacaugcuaaggcuguuugacuucaacaaacaggcuauucaaaggcugaaagcugaagcacaaaugaguauucaguugaucaacaaggcaguaaaugcuuugauaaaugaccaacuuauaaugaagaaccaucuccgggacaucauggggauuccauacuguaauuacagcaaguauugguaccucaaccacacaacuacugggaaaacaucacugcccaaauguuggcuuguaucaaauggcucauacuugaacgagacccacuuuucugaugauauugaacaacaagcugacaacaugaucacugagauguugcagaaggaguauauggagaggcaggggaagacaccauugggccugguugaccucuuuguguucagcacaaguuucuaucucauuagcaucuuccuucaccuaguuaaaauaccaacucauaggcauauuguaggcaagucaugucccaaaccucacagauugaaucauaugggcauauguucuuguggacucuauaaacaacccggugugccugugaaguggaagagauga

SEQ ID NO: 476 - RNA, 1476 nt, Artificial Sequence
  derived and/or modified protein sequence (wt) from LASV(G636-SLE-2009;Clade IV)__AIT17138__GPC
auggggcaaauagugacauucuuccaggaagugccucauguaauagaagaggugaugaacauuguucucauugcacuguccauacuggcagugcugaaaggucuguacaaucuugcaacauguggccucguugguuuggucacuuuccuccuguugugugguaggucuugcacaaccagucuuuacaaagggguuuaugagcuucagacucuggaacuaaacauggagacacucaacaugaccaugccucucuccugcacaaagaacaacagucaucauuauauaaugguggguaaugagacaggacuagaacugaccuugaccaacacgagccuuauuaaucacaaauuuugcaaccugucugaugcccacaaaaagaaccucuaugaccacgcucuuaugagcauaaucucaacuuuccacuuguccauccccaacuucaaucaguaugaggcaaugagcugcgauuuuaaugggggaaagauuagugugcaguacaaccugagucacagcuaugccguggaugcagccagccauuguggcacuguugcaaaugguguacuacagacuuucaugaggauggcuuggggugggagcuacauugcucuugacucaggccgugguggaugggacuguauuaugacuaguuaucaauaucugauaauccaaaauacaacuugggaagaucacugccaauucucgagaccaucuccuaucgguuaucucgggcuccucucacaaaggaccagagauauuuauaucaguagaagacuacuaggcacauucacauggacauugucagauucugaaggcaaggacacaccagggggauauuguuugaccagauggaugcugauugaggcugaacuaaaaugcuucgggaauacagcuguggcaaaauguaaugagaaacaugaugaggaauuuugugacaugcugaggcuguuugacuucaacaaacaagccauucaaagguugaaagcugaagcacaaaugagcauucaguugaucaacaaagcaguaaaugcuuugauaaaugaucaacuuauaaugaagaaccaucuacgggauaucaugggaaucccauacuguaauuacagcaaguauugguaccucaaccacacaacuacugggagaacaucacugccuagauguuggcuuguaucaaaugguucauaccugaacgagacccacuuuucugaugauauugaacaacaagcugacaacaugaucacugagauguuacagaaggaguauauggaaaggcaggggaagacaccauugggccuaguugaucucuuuguguuuagcacaaguuucuaucucauuagcaucuuucuucaccuagucaaaauaccaacgcauaggcauauuguaggcaagucgugucccaaaccucacagacugaaucacaugggcauuuguuccugugggcuuuauaaacagccuggugugccuguaaaauggaagagauga

SEQ ID NO: 477 - RNA, 1476 nt, Artificial Sequence
  derived and/or modified protein sequence (wt) from LASV(G692-SLE-2009;Clade IV)__AIT17146__GPC
augggacaaauagucacauucuuucaggaagugccccauguaauagaagaggugaugaacauuguucucauugcacugucuauacuagcagugcugaaaggucuguacaaucuugcaacauguggccucguuggcuuggucacuuuccuccuguuauguggaaggucuuguacaaccagccuuuacaaagggguuuaugagcuucagacucuggaacuaaacauggaaacacucaacaugacuaugccucucuccugcacaaagaacaacagucaucauuauauaaugguggguaaugagacaggauuagaacugaccuugaccaacacgagcauuauuaaccauaaauuuugcaaucugucugaugcccacaaaaagaaccucuaugaccacgcccuuaugagcauuaucucaacuuuccacuuguccauccccaacuucaaucaguaugaggcaaugagcugcgauuuuaaugggggaaagauuagugugcaguacaaccugagucauagcuaugccggggaugcagccaaccauuguggcacuguugcaaaugguguguuacagaccuucaugaggauggcuuggggugggagcuacauugcucuugacucaggccguggcaggugggacuguaucaugacuaguuaucaauaucugauaauccagaauacaaccugggaagaucacugcaguuucucgagaccaucucccaucgguuaucucgggcuccucucacaaaggaccagagauauuuauauuaguagaaggcugcuaggcacauucacauggacacugucagauucugaaggcaaggacacaccagggggauauugucugaccagauggaugcuaauugaggcugaacuaaagugcuuugggaauacagccguggcaaaauguaaugagaagcaugaugaggaauuuugugacaugcugaggcuguuugacuuuaacaaacaagccauucaaagguugaaagcugaagcacaaaugagcauucaguugaucaacaaagcaguaaaugcuuuaauaaaugaccaacuuauaaugaagaaccaucuacgggacaucauggggauuccauacuguaauuacagcaaguauugguaccucaaccacacaacuacugggaaaacaucacugccuaaauguuggcuuguaucaaaugguucauaccugaaugagacccacuuuucugaugauauugaacaacaagcugacaacaugaucacugaaauguuacagaaggaguauauggagaggcagggaaagacaccauugggucuaguugaccucuuuguguuuagcacaaguuucuaucucaucagcaucuuccuucaccuagucaaaauaccaacucauaggcauauugugggcaagucaugucccaaaccucacagguugaaucauaugggcauuuguuccuguggauucuauaaacaaccuggugugccugugaaauggaagagauga

SEQ ID NO: 478 - RNA, 1476 nt, Artificial Sequence
  derived and/or modified protein sequence (wt) from LASV(G733-SLE-2010;Clade IV)__AIT17154__GPC
augggacagauagugacauucuuccaggaagugccucauguaauagaagaggugaugaacauuguucucauugcacugucuauacuagcaguccugaagggucuguacaacuuugcaacauguggcaucguugguuuggucagcuuucuccuguuguguggcaggucuugcacaaccagucuuuacaaagggguuuaugagcuucagacucuggagcuaaacauggagacacuuaacaugaccaugccucucucuugcacaaagaacaacagucaucauuauauaauggugggcaaugagacgggauuggaacugaccuugaccaacacgagcauuaucaaucauaaauuuugcaaucuaucugaugcccauaagaagaaccucuaugaccacgcccuuaugaguauaaucucaaccuuccacuuguccauccccaacuucaaucaguaugaagcaaugagcugugauuucaaugggggaaagauuaguguacaguacaaccugagucacagcuaugcuggggaugcagccaaccauuguggcacaauugcaaauggugucuuacagacuuucaugaggauggccuggggugggagcuacauugcucuugacucaggccgugacaggugggacugcauaaugaccaguuaucaauaucugauaauccaaaacacaaccugggaagaucacugccaauucucaagaccaucucccaucgguuaucuugggcuccucucacaaaggaccagagauauauauauuaguaggagacuacugggcacauuuacauggacauugucagauucugaagguaaggacacaccaggaggguauugucuaaccagauggaugcugauugaggcugagcugaaaugcuuugggaacacagcuguggcaaaaugcaaugagaaacaugaugaggaauuuugugauaugcuaaggcuguuugacuucaacaaacaagccauucaaagguuaaaagcugaggcacaaaugagcauucaguugaucaacaaagcagugaaugcuuugauaaacgaccaacuaauaaugaagaaccaucuacgggacaucaugggaauuccauacuguaauuacagcaaguacugguaccucaaccacacaacuacugggaaaacaucacugccuaaauguuggcuugugucgaaugguucauacuuaaacgagacucacuuuucugaugacauugaacaacaagcugacaauaugaucacugagauguuacagaaggaauacauggaaaggcaggggaagacaccauugggucuaguugaccucuuuguguucagcacaaguuucuaucucauuagcaucuuccuucauuuggucaaaauaccaacucauaggcauguuguaggcaagucgugucccaagccucacagauugaaucacaugggcauaugcuccugcggacucuauggacagccugguguaccugugaaauggaagagauga

SEQ ID NO: 479 - RNA, 1476 nt, Artificial Sequence
  derived and/or modified protein sequence (wt) from LASV(G771-SLE-2010;Clade IV)__AIT17158__GPC
augggacagauagugacauucuuccaggaagugccucauguaauagaagaggugaugaacauuguucucauugcacuguccauacuggcagugcugaaaggucuguacaauuuugcaacauguggccucguugguuugguuacuuuccuccuguuguguggcaggucuugcacaacuagucuuuauaaagggguuuaugagcuucagacucuggaacuaaauauggagacacucaauaugaccaugccucucuccugcacaaagaacaacagucaucauuacauaaugguggguaaugagacaggacuggaacugaccuugaccaacacaagcauuauuaaucauaaauuuugcaaucugucugaugcccacaaaaagaaccucuaugaccaugcccuuaugagcauaauuucaacuuuccacuuguccauccccaacuucaaucaguaugaggcaaugagcugcgacuucaaugggggaaagauuagugugcaguacaaccugagucacagcuaugcuggggaugcggccaaccacuguggcacuguugcaaauggugucuuacagacuuucaugaggauggcuuggggugggaguuacauugcucuugacucaggccgugaccggugggacuguauuaugacuaguuaucaauaucugauaauccaaaauacgaccugggaagaucacugccaauucucaagaccaucacccaucgguuaucucgggcuccucucacagaggaccagagauauuuauauuaguagaagacuacuaggcacauuuacauggacacugucagauucugaagguaaggacacaccagggggauauugucugaccagauggaugcuaauugaagcugaauuaaaaugcuucggaaacacagcuguagcaaaauguaaugagaagcaugaugaggaauuuugugacaugcuaaggcuguuugacuucaacaaacaggcuauucaaaggcugaaagcugaagcacaaaugaguauucaguugaucaacaaggcaguaaaugcuuugauaaaugaccaacuuauaaugaagaaccaucuccgggacaucauggggauuccauacuguaauuacagcaaguauugguaccucaaccacacaacuacugggaaaacaucacugcccaaauguuggcuuguaucaaaugguucauacuugaacgagacccacuuuucugaugauauugaacaacaagcugacaacaugaucacugagauguugcagaaggaguauauggagaggcaggggaagacaccauugggccugguugaccucuuuguguucagcacaaguuucuaucucauuagcaucuuccuucaccuaguuaaaauaccaacucauaggcauauuguaggcaagucaugucccaaaccucacagauugaaucauaugggcauauguucuuguggacucuauaaacaacccggugugccugugaaguggaagagauga

SEQ ID NO: 480 - RNA, 1476 nt, Artificial Sequence
  derived and/or modified protein sequence (wt) from LASV(G808-SLE-2010;Clade IV)__AIT17164__GPC
augggacaaauagugacauucuuucaggaagugccucauguaauagaagaggugaugaacauuguucucauugcacucucuauacuagcagugcugaaaggucuguacaauuucgcaacauguggccucguugguuuggucacuuuccuccuguugugugguaggucuugcacaagcagucucuauaagggaguuuaugagcuucagacucuagaacuaaacauggagacacucaauaugaccaugccucucuccugcacaaagaacaacagccaccauuauauaagggugggcaaugagacaggacuagagcugaccuugaccaacacgagcauuauugaucauaaauuuugcaaucugucugaugcccacaaaaagaaccucuaugaccacgcucuuaugagcauaaucucaacuuuccauuuguccaucccuaacuucaaucaguaugaggcaaugagcugcgauuuuaaugggggaaagauuagugugcaguacaaccugagucacaguuaugcuggggaugcagccaaacauuguggcacuguugcaaauggugugcugcagacuuucaugaggauggcuuggggugggagcuacauugcucuugacucaggccauggcaacugggacuguauuaugacuaguuaucaauauuugauaauccaaaauacaaccugggaagaucacugccaauucucgagaccaucucccaucgguuaucucgggcuccucucacaaaggaccagagauauuuauauuaguagaagacugcuaggcacauucacauggacauugucagauucugaaggcaaugaugcaccagggggauauugucugacuagauggaugcugauucaggcugaacuaaaaugcuucgggaacacagcuguggcaaaauguaaugagaagcaugaugaggaguuuugugacaugcugaggcuguuugacuucaacaaacaggccauucaaagguugaaagcugaagcacaaaugagcauucaguugaucaacaaagcagugaaugcuuuaauaaaugaucaacuuauaaugaagaaccaccuacgggacauuaugggaauuccauacuguaauuacagcaaguauugguaccucaaccacacgacuacugggagaacaucacugcccagauguuggcuuguaucaaaugguucuuauuugaacgagacccacuuuucugaugauauugaacaacaagcugacaacaugaucacugagauguuacagaaggaguacauggagaggcaaggaaagacaccauugggucugguugaccuauuuguguucaguacgaguuucuaucucauuagcaucuuccuucaccuagucaaaauaccaacucauaggcauauuguaggcaagucguguccuaaaccucacagguuaaaccacaugggcauauguucuuguggucucuuuaaacagccuggugugccugugaaauggaagagauga

SEQ ID NO: 481 - RNA, 1476 nt, Artificial Sequence
  derived and/or modified protein sequence (wt) from LASV(Guinea Faranah;Clade IV)__AMZ00381__GPC
augggacagauugugacauucuuccaagagguaccucaugugauagaggagguaaugaacauuguacucauugcauugucuauacuugcaguguugaaagguuuguacaauguggcaacauguggucucaucggccucauugcuuuucuucuacuguguggcagaucuuguacaucaacccuuuacaaagggguguaugaacuucaggcuuuagaauuaaacauggaaacacucaacaugaccaugccucucuccugcacaaaaaacaauucucaccauuacauuaugguggguaaugagacaggauuggaauuaacccugaccaacacaaguaucaucaaccacaaguuuugcaaccucucugaugcucauaaaaagaaucuauacaaccacgcucucaugagcauaauuucgacuuuccacuugucuauuccuaauuucaaucaguaugaggcaaugaguugugacuucaaugggggaaagaucagugugcaguacaaccugagccacaguuaugcuguggaugcagccaaccauuguggcacaguugccaauggcauucugcagaccuucaugaggauggccuggggugggagcuacauugcucuugacucaggccauggugggugggacugcauuaugagcaguuaccaauauuugguaauucaaaacacaaccugggaagaccacugucaauucucgagaccaucccccauugguuaucuugggcuccuaucacagagaacuagagacaucuacauuaguaggagauuacuggguacauucaccuggacauuaucagauucugaaggcaaagacacaccaggaggauauuguuugaccagguggauguugauugaagcugaauugaaaugcuuuggaaacacagcuguagcaaaauguaaugaaaaacaugaugaagaauucugugacaugcuuagguuauuugauuucaacaagcaagccauucaaagauugaaagcugaggcacaaaugagcauacaauuaaucaacaaagcagugaaugcucuaauaaacgaucagcuaauuaugaagaaucauuugcgugacaucaugggaauaccauacugcaauuacaguaaguauugguaucuuaaccacacaaucacugggagaacuucccuaccaaaauguuggcuuguauccaauggcucauacuugaaugaaacccacuucuccgaugacaucgagcaacaagcugacaacaugaucacugagaugcugcagaaagaauaucuagagagacaagggaaaacaccacuagguuugguugaccuuuuuguguuuagcacgaguuuuuaccucauaagcauuuuccuacacuuaaucaaaauaccaacucauagacacauugugggcaaaucauguccuaaaccccacaggcuaaaucacauggguguaugcucauguggucucuacaaacagccuggcguuccugugagauggaagagauaa

SEQ ID NO: 482 - RNA, 1476 nt, Artificial Sequence
  derived and/or modified protein sequence (wt) from LASV(GUINEA Z-185a;Clade IV)__AMZ00377__GPC
auggggcaaauagucacauuuuuccaggaagucccucauguaauagaggaggucaugaacauuguacuuauugcacuguccauacuagcugugcugaaagguuuguacaauguugcaacauguggccuuauuggcuuggucaccuuucucuuccuaugugguaggucuuguucaaccucucuuuacaagggaguuuaugagcuucagaccuuggaguugaacauggaaacacugaauaugacaaugccccucucuugcacaaagaacaacagucaccauuacauaaugguggguaaugagacaggacuagaacugacuuugaccaacacaaguauuauaaaucacaaguucugcaaucuaucugaugcccacaaaaagaaucucuaugaccacacucuuaugagcauaaucucaacuuuccaucugucuauacccaauuucaaucaguaugaagcaaugaguugugacuuuaauggggguaagaucagugugcaauacaaccugagucacaguuaugcuguagaugcagcuaaucauugugguacaguggcaaaugguguuuugcagaccuucaugaggauggcuuggggcggaaguuacauugcccuugauucaggucguggcaacugggacugcaucaugacuaguuaccaauaucuuguaauucagaacacaaccugggaagaccauugucaguucucaagaccaucucccaucggcuaucuugggcuccuuucacagagaaccagagauauuuacaucagcaggagauugcugggaacauucacauggacacuaucagauucugaagguaaggacacaccagggggguacuguuugaccagguggaugcugauugaagcugaguuaaagugcuuuggcaacacagccguggcaaaguguaaugagaaacaugaugaagaguuuugugacaugcugaggcuauuugacuucaacaaacaagccauccaaagauugaaagccgaggcucagaugaguauacagcugaucaacaaagcaguaaaugcucugauaaaugaucagcuaauaaugaagaaccauuugcgagacauuauggggaucccauacugcaauuacagcaaauacugguaucucaaccacacagucacuggaaagacaucauugcccaaauguuggcuuguaucaaauggaucauaccuaaaugagacccacuucucugaugauaucgaacagcaagcugacaauuuaaucacugagauguuacaaaaggaauacauggaaagacaaggcaaaacaccauuagguuugguugaccucuuuguguucaguacaagcuuuuaccuuauaagcaucuuccuccaccuagucaaaauaccaacacauagacacauuguaggcaaaccauguccuaaaccucauaggcugaaccauauggguauauguuccugugguguuuacaaacaaccugguguaccugugagauggaaaagguaa

SEQ ID NO: 483 - RNA, 1476 nt, Artificial Sequence
  derived and/or modified protein sequence (wt) from MOPV/LASV reassortant(IGS-1;Clade IV)__AFY05576__GPC
augggacaaauagugacauucuuccaggaagugccucauguaauagaagaggugaugaacauuguucucauugcacugucuguacuagcagugcugaaaggucuguacaauuuugcaacguguggccuuguugguuuggucacuuuccuccuguugugugguaggucuugcacaaccagucuuuauaaagggguuuaugagcuucagacucuggaacuaaacauggagacacucaauaugaccaugccucucuccugcacaaagaacaacagucaucauuauauaauggugggcaaugagacaggacuagaacugaccuugaccaacacgagcauuauuaaucacaaauuuugcaaucugucugaugcccacaaaaagaaccucuaugaccacgcucuuaugagcauaaucucaacuuuccacuuguccauccccaacuucaaucaguaugaggcaaugagcugcgauuuuaaugggggaaagauuagugugcaguacaaccugagucacagcuaugcuggggaugcagccaaccauugugguacuguugcaaaugguguguuacagacuuuuaugaggauggcuuggggugggagcuacauugcucuugacucaggccguggcaacugggacuguauuaugacuaguuaucaauaucugauaauccaaaauacaaccugggaagaucacugccaauucucgagaccaucucccaucgguuaucucgggcuccucucacaaaggacuagagauauuuauauuaguagaagauugcuaggcacauucacauggacacugucagauucugaaggugaagacacaccagggggauauugucugaccagguggaugcuaauugaggcugaacuaaaaugcuucgggaacacagcuguggcaaaauguaaugagaagcaugaugaggaauuuugugacaugcugaggcuguuugacuucaacaaacaagccauucaaagguugaaagcugaagcacaaaugagcauucaguugaucaacaaagcaguaaaugcuuugauaaaugaccaacuuauaaugaagaaccaucuacgggacaucaugggaauuccauacuguaauuacagcaaguauugguaccucaaccacacaacuacugggagaacaucacugcccaaauguuggcuuguaucaaaugguucauacuugaacgagacccacuuuucugaugauauugaacaacaagcugacaauaugaucacugagauguuacagaaggaguauauggagaggcaggggaagacaccauugggucuaguugaccucuuuguguucagcacaaguuucuaucuuauuagcaucuuccuucaccuagucaaaauaccaacucauaggcauauuguaggcaagucgugucccaaaccucacagauugaaucauaugggcauuuguuccuguggacucuacaaacagccuggugugccugugaaauggaagagauga

SEQ ID NO: 484 - RNA, 1476 nt, Artificial Sequence
  derived and/or modified protein sequence (wt) from MOPV/LASV reassortant(IGS-11;Clade IV)__AFY05588__GPC
augggacaaauagugacauucuuccaggaagugccucauguaauagaagaggugaugaacauuguucucauugcacugucuguacuagcagugcugaaaggucuguacaauuuugcaacguguggccuuguugguuuggucacuuuccuccuguugugugguaggucuugcacaaccagucuuuauaaagggguuuaugagcuucagacucuggaacuaaacauggagacacucaauaugaccaugccucucuccugcacaaagaacaacagucaucauuauauaauggugggcaaugagacaggacuagaacugaccuugaccaacacgagcauuauuaaucacaaauuuugcaaucugucugaugcccacaaaaagaaccucuaugaccacgcucuuaugagcauaaucucaacuuuccacuuguccauccccaacuucaaucaguaugaggcaaugagcugcgauuuuaaugggggaaagauuagugugcaguacaaccugagucacagcuaugcuggggaugcagccaaccauugugguacuguugcaaaugguguguuacagacuuuuaugaggauggcuuggggugggagcuacauugcucuugacucaggccguggcaacugggacuguauuaugacuaguuaucaauaucugauaauccaaaauacaaccugggaagaucacugccaauucucgagaccaucucccaucgguuaucucgggcuccucucacaaaggacuagagaucuuuauauuaguagaagauugcuaggcacauucacauggacacugucagauucugaaggugaagacacaccagggggauauugucugaccagguggaugcuaauugaggcugaacuaaaaugcuucgggaacacagcuguggcaaaauguaaugagaagcaugaugaggaauuuugugacaugcugaggcuguuugacuucaacaaacaagccauucaaagguugaaagcugaagcacaaaugagcauucaguugaucaacaaagcaguaaaugcuuugauaaaugaccaacuuauaaugaagaaccaucuacgggacaucaugggaauuccauacuguaauuacagcaaguauugguaccucaaccacacaacuacugggagaacaucacugcccaaauguuggcuuguaucaaaugguucauacuugaacgagacccacuuuucugaugauauugaacaacaagcugacaauaugaucacugagauguuacagaaggaguauauggagaggcaggggaagacaccauugggucuaguugaccucuuuguguucagcacaaguuucuaucuuauuagcaucuuccuucaccuagucaaaauaccaacucauaggcauauuguaggcaagucgugucccaaaccucacagauugaaucauaugggcauuuguuccuguggacucuacaaacagccuggugugccugugaaauggaagagauga

SEQ ID NO: 485 - RNA, 1476 nt, Artificial Sequence
  derived and/or modified protein sequence (wt) from MOPV/LASV reassortant(IGS-12;Clade IV)__AFY05590__GPC
augggacaaauagugacauucuuccaggaagugccucauguaauagaagaggugaugaacauuguucucauugcacugucuguacuagcagugcugaaaggucuguacaauuuugcaacguguggccuuguugguuuggucacuuuccuccuguugugugguaggucuugcacaaccagucuuuauaaagggguuuaugagcuucagacucuggaacuaaacauggagacacucaauaugaccaugccucucuccugcacaaagaacaacagucaucauuauauaauggugggcaaugagacaggacuagaacugaccuugaccaacacgagcauuauuaaucacaaauuuugcaaucugucugaugcccacaaaaagaaccucuaugaccacgcucuuaugagcauaaucucaacuuuccacuuguccauccccaacuucaaucaguaugaggcaaugagcugcgauuuuaaugggggaaagauuagugugcaguacaaccugagucacagcuaugcuggggaugcagccaaccauugugguacuguugcaaaugguguguuacagacuuuuaugaggauggcuuggggugggagcuacauugcucuugacucaggccguggcaacugggacuguauuaugacuaguuaucaauaucugauaauccaaaauacaaccugggaagaucacugccaauucucgagaccaucucccaucgguuaucucgggcuccucucacaaaggacuagagauauguauauuaguagaagauugcuaggcacauucacauggacacugucagauucugaaggugaagacacaccagggggauauugucugaccagguggaugcuaauugaggcugaacuaaaaugcuucgggaacacagcuguggcaaaauguaaugagaagcaugaugaggaauuuugugacaugcugaggcuguuugacuucaacaaacaagccauucaaagguugaaagcugaagcacaaaugagcauucaguugaucaacaaagcaguaaaugcuuugauaaaugaccaacuuauaaugaagaaccaucuacgggacaucaugggaauuccauacuguaauuacagcaaguauugguaccucaaccacacaacuacugggagaacaucacugcccaaauguuggcuuguaucaaaugguucauacuugaacgagacccacuuuucugaugauauugaacaacaagcugacaauaugaucacugagauguuacagaaggaguauauggagaggcaggggaagacaccauugggucuaguugaccucuuuguguucagcacaaguuucuaucuuauuagcaucuuccuucaccuagucaaaauaccaacucauaggcauauuguaggcaagucgugucccaaaccucacagauugaaucauaugggcauuuguuccuguggacucuacaaacagccuggugugccugugaaauggaagagauga

SEQ ID NO: 486 - RNA, 1476 nt, Artificial Sequence
  derived and/or modified protein sequence (wt) from LASV(LM032-SLE-2010;Clade IV)__AIT17802__GPC
augggacagauagugacauucuuccaggaagugccucauguaauagaagaggugaugaacauuguucucauugcacuguccauacuggcagugcugaagggucuguacaaucuugcaacauguggccucguugguuugguuacuuuccucuuguuguguggcaggucuugcacaaccagucuuuauaaagggguuuaugagcuucagacucuggaacuaaauauggagacacucaauaugaccaugccucucuccugcacaaagaacaacagucaucauuacauaaugguggguaaugagacaggacuggaacugaccuugaccaauacgagcauuauuaaucauaaauuuugcaaucugucugaugcccacaaaaagaaccucuauaaccaugcccuuaugagcauaauuucaacuuuccacuuguccauccccaacuucaaucaguaugaggcaaugagcugcgauuuuaaugggggaaagauuagugugcaguacaaccugagucacagcuaugcuggggaugcggcuaaccacuguggaacuguugcaaauggugucuuacagacuuucaugaggauggcuuggggugggaguuacauugcucuugacucaggccgugaccggugggacuguauuaugacuaguuaucaauaucugauaauccaaaauacaaccugggaagaucacugccaauucucaagaccaucacccaucgguuaucucgggcuccuuucacaaaggaccagagacauuuauauuagcaggagacuacuaggcacauuuacauggacacugucagauucugaaggcaaggacacaccagggggguauugucugaccagauggaugcugauugaagcugaauugaaaugcuucggaaacacagcuguagcaaaauguaaugagaagcaugaugaggaauuuugugacaugcugaggcuguuugacuucaacaagcaagccauucagaggcugaaagcugaagcacaaaugagcauucaguugaucaacaaagcaguaaaugcuuugauaaaugaccaacucauaaugaagaaccaucuacgggacaucaugggaauuccauacuguaauuacagcaaguauugguaccucaaccacacaacuacugggaaaacaucacugcccaaauguuggcuuguaucaaaugguucauacuugaacgagacccauuuuucugaugauauugaacaacaagcugacaacaugaucaccgaaauguugcagaaggaguauauggagagacugggaaagacaccauugggucuaguugaccucuuuguguucagcacaaguuucuaucucauaagcaucuuccuucaccuagucaaaauaccaacucauaggcauauuguaggcaggucaugucccaaaccucacagauugaaucauaugggcauauguuccuguggacucuauaaacagcccggugugccugugaaauggaagagauga

SEQ ID NO: 487 - RNA, 1476 nt, Artificial Sequence
  derived and/or modified protein sequence (wt) from LASV(LM222-SLE-2010;Clade IV)__AIT17806__GPC
augggacagauagugacauucuuccaggaagugccucauguaauagaagaggugaugaacauuguucucauugcgcugucuauauuagcagugcugaaaggucuauacaacuuugcaacauguggccucauuggccuggucacuuuucuccuguuguguggcagguccugcacaaccagucuuuauaaaggggucuaugagcuucagacucuggaguuaaacauggagacacucaauaugaccaugccucucuccugcacaaagaauaacagucaucauuauauaaugguaggcaaugagacaggacuagaacugaccuugaccaacacaaguauuauuaaucauaaauuuugcaaucugucugaugcucacaaaaagaaccucuaugaccacgcucuuaugagcauaauuucaacuuuccauuuguccauccccaacuucaaucaguaugaggcaaugagcugcgauuuuaaugggggaaagauuagugugcaguacaaccugagucacagcuaugcuggggaugcugccaaccauuguggcacuguugcaaauggugucuuacagacuuucaugagaauggcuuggggugggagcuacauugcucuugacucaggccguggcaagugggauuguaucaugacuaguuaucaauaucugauaauucaaaauacaaccugggaagaucacugccaauucucaagaccaucuccuaucgguuaucuugggcuccucucacaaaggaccagagacauuuauaucaguagaagacuacuaggcacauucacauggacacugucagauucugaaggcaaggacacaccagggggauauugucugaccagauggaugcugauugaagcugaauuaaaauguuucgggaacacagcuguggcaaaauguaaugagaagcaugaugaggaauuuugugacauguugaggcuguuugacuucaacaaacaggccauucaaagguugaaagcugaagcacaaaugagcauucaguugaucaacaaggcagugaaugccuugauaaaugaucaacuuauaaugaagaaccaucugcgagacaucaugggaauuccauacuguaauuauagcaaauauugguaccucaaccacacaacuacugggaaaacaucacugccuaaauguuggcuuguaucaaaugggucauacuugaacgagacccacuuuucugaugauauugaacaacaagcugacaacaugaucacugagauguuacagaaggaguauauggagaggcaggggaagacaccauugggccuaguugaccucuuuguguucagcacaaguuucuaucucaucagcaucuuccuucaccuagucaaaauaccaacucauaggcauauuguaggcaagucauguccuaaaccucacagauugaaucacaugggcauauguuccuguggacucuauaaacagcccggugugccugugaaauggaaaagauga

SEQ ID NO: 488 - RNA, 1476 nt, Artificial Sequence
  derived and/or modified protein sequence (wt) from LASV(LM395-SLE-2009;Clade IV)__AIT17810__GPC
augggacaaauagugacauucuuccaggaagugccccauguaauagaagaggugaugaacauuguucucauugcacuguccauacuagcaguguugaagggucuguacaaucuugcaacauguggccucguuggcuuggucacuuuccuccuguuguguggcaggucuugcacaaccagccuuuacaaagggguuuaugagcuucagacucuggaacugaacauggaaacacucaauaugaccaugccucucuccugcacaaaagacaacagucaucauuacauaagggugggcaaugagacaggacuagaacugaccuugaccaacacgagcauucuuaaucauaaauuuugcaaucugucugaugcccacaaaaagaaccucuaugaccacgcucuuaugagcauuaucucuaccuuccacuuguccaucccuaacuucaaucaguaugaggcaaugagcugcgauuucaaugggggaaggauuagugugcaguacaaccugagucacagcuacgccggggaugcagccaaccauuguggcacuguugcaaaugguguacuacagacuuucaugaggauggcuuggggugggagcuacauugcucuugacucaggccguggcaggugggacuguauuaugacuaguuaucaauaucugauaauucaaaauacaaccugggaagaucacugccaauucucgagaccaucucccaucgguuaucucgggcuucucucacaaaggaccagagauauuuauauuaguagaaggcuacugggcacauucacauggacacugucagauucugaaggcaaagacacaccagggggguauugucugaccagauggaugcuaauugaggcugaacuaaaguguuucgggaacacagcuguggcaaaauguaaugagaagcaugaugaagaauuuugugacaugcugaggcuguuugacuucaacaagcaagccauucaaagguugaaagcugaggcacaaaugagcauucaguugaucaacaaagcaguaaaugcuuugauaaaugaccaacuuauaaugaagaaccaucuacgggacaucauggggauuccauacuguaauuacagcaaguauugguaccucaaucacacaacuacugggaaaacaucacugcccagauguuggcuuguaucaaaugguucauacuugaacgagacccacuuuucugaugauauugaacaacaagcugacaacaugaucacugagauguuacagaaggaguacauggagaggcaggggaagacaccauugggucuaguugaccucuuuguguucagcacaaguuucuaucucauuagcaucuuccuccaccuagucaaaauaccaacucauaggcauguuguaggcaagccgugucccaaaccucacagguugaaucauaugggcauuuguuccuguggacucuauaaacagccuggugugccugugaaauggaagagauga

SEQ ID NO: 489 - RNA, 1476 nt, Artificial Sequence
  derived and/or modified protein sequence (wt) from LASV(LM765-SLE-2012;Clade IV)__AIT17814__GPC
augggacaaauagugacauucuuccaggaagugccccaugucauagaagaggugaugaacauuguucucauugcacuguccauacuagcagugcugaaaggucuguacaauuuugcaacauguggccucguuggcuuggucacuuuccuccuguuguguggcaggucuuguacaacuagccuuuacaaagggguuuaugagcuucagacucuggaacuaaacauggaaacacucaauaugaccaugccucucuccugcacaaagaacaauagucaucauuauauaauggugggcaaugagacaggacuagaacugaccuugaccaacacgagcauuauugaucauaaauuuugcaaucugucugaugcccacagaaagaaccucuaugaccacgcucuuaugagcauuaucucaacuuuccacuugucuaucccuaacuucaaucaguaugaggcaaugagcugcgauuucaaugggggaaagauuaguguacaguacaaccugagucacagcuaugccaaggacgcagccgaccauuguggaacuguugcaaaugguguauuacagacuuucaugaggauggcuuggggugggagcuacaucgcucuugacucaggccguggcaggugggacuguauuaugacuaguuaucaauaucugauaauccaaaauacaaccugggaagaucacugccaauucucgagaccaucucccaucgguuaucucgggcuccucucacagaggaccagagauauuuauauuaguagaaggcuacuaggcacauucacauggacacugucagauucugaaggcaaggacacaccagggggauauugucuaaccagauggaugcuaauugaggcugagcuaaagugcuucgggaauacagcuguggcaaaauguaaugagaagcaugaugaggaauuuugugacaugcugagguuguuugacuuuaacaagcaagccauucaaagguugaaagcugaagcacaaaugagcauucaguugaucaacaaagcaguaaaugcuuugauaaaugaccaacuuauaaugaagaaccaucuacgggacaucauggggauuccauacuguaauuacagcaaguauugguaccucaaccacacaacuacuggaaaaacaucacugcccaaguguuggcuuguaucaaaugguucauaccugaacgagacccacuuuucugaugacauugaacaacaagcugacaacaugaucaccgagauguuacagaaggaguauauggagaggcaggggaagacaccauugggucugguugaccucuuuguguucagcacaagcuucuaucucauuagcaucuuccuucaccuaguuaaaauaccaacucauaggcauauuguaggcaagccgugucccaaaccucacagguugaaucauaugggcauuuguuccuguggacucuauaaacagccuggugugccuguaaaauggaagagauga

SEQ ID NO: 490 - RNA, 1476 nt, Artificial Sequence
  derived and/or modified protein sequence (wt) from LASV(LM774-SLE-2012;Clade IV)__AIT17820__GPC
augggacagauagugacauucuuucaggaagugccucauguaauagaagaggugaugaacauuguucucauugcgcugucuauauuagcagugcugaaaggucuauacaacuuugcaacauguggccucguugguuugguuacuuuucuccuguuguguggcaggucuugcacaaccagucuuuauaaaggggucuaugagcuucagacucuggaguuaaacauggagacacucaauaugaccaugccucucuccugcacaaagaauaacagucaucauuacauaaugguaggcaaugagacaggacuagaacugaccuugaccaacacaaguauuauuaaucauaaauuuugcaaucugucugaugcccacaaaaagaaccucuaugaccaugcucuuaugagcauaauuucaacuuuccacuuguccauccccaacuucaaucaguaugaggcaaugagcugcgauuuuaaugggggaaagauuagugugcaguacaaccugagucacagcuaugcugaggaugcugccaaccauuguggcacuguugcaaauggugucuuacagacuuucaugagaauggcuuggggugggagcuacauugcucuugacucaggccguggcaauugggauugcauuaugacuaguuaucaauaucugauaauucaaaauacaaccugggaagaucacugccaauucucaagaccaucuccuaucgguuaucuugggcuccucucacaaaggaccagagauauuuauaucaguagaagacuacuaggcacauucacauggacacugucagauucugaaggcaaggacacaccagggggauauugucugaccagauggaugcugauugaagcugaauuaaaauguuucgggaacacagcuguggcaaaauguaaugagaagcaugaugaggaauuuugugacauguugaggcuguuugacuucaacaaacaagccauucaaagguugaaagcugaagcacaaaugagcauucaguugaucaauaaggcaguaaaugccuugauaaaugaucaacuuauaaugaagaaccaucuacgggacaucaugggaauuccauacuguaauuacagcaaauauugguaccucaaccacacaacuacugggaaaacaucacugccuaaauguuggcuuguaucaaaugggucauacuugaacgagacccacuuuucugaugauauugaacaacaagcugacaacaugaucacugagauguuacagaaggaguauauggagaggcaggggaagacaccauugggccuaguugaccucuuuguguucagcacaaguuucuaucucaucagcaucuuccuucaccuagucaaaauaccaacucauaggcauauuguaggcaagucauguccuaaaccucacagauugaaucacaugggcauauguuccuguggacucuauaaacagcccggugugccugugaaauggaaaagauga

SEQ ID NO: 491 - RNA, 1476 nt, Artificial Sequence
  derived and/or modified protein sequence (wt) from LASV(LM776-SLE-2012;Clade IV)__AIT17824__GPC
augggacagauagugacauucuuccaggaagugccucauguaauagaagaggugaugaacauuguccucauugcgcugucuauauuagcagugcugaaaggucuguacaacuuugcaacauguggccucguugguuugguuacuuuccuccuguuguguggcaggucuugcacaaccaguguuuauaaaggggucuaugagcuucagacucuggaguuaaacauggagacacucaauaugaccaugccucucuccugcacaaagaauaacagucaucauuauauaaugguagguaaugagacaggacuagaacugaccuugaccaacacaagcauuauuaaucauaaauuuugcaaucugucugaugcccacaaaaagaaccucuaugaccaugcccuuaugagcauaauuucaacuuuccacuuguccauccccaacuucaaucaguaugaagcaaugagcugugauuucaaugggggaaagauuagugugcaguacaaccugagucacagcuaugcuggggaugcugccaaccauuguggcacuguugcaaauggugucuuacagacuuucaugaggauggcuuggggugggagcuacauugcucuugacucaggccauggcaagugggacuguauuaugacuaguuaucaauaucugauaauccaaaauacaaccugggaagaucacugccaauucucaagaccaucuccuaucgguuaucuugggcuucucucacaaaggaccagagauauuuauaucaguagaagacuacuaggcacauucacauggacacugucagauucugaaggcaaggacacaccagggggauauugucugaccagauggaugcugauugaagcugaauuaaaaugcuucgggaacacagcuguagcaaaauguaaugagaagcaugaugaggaauuuugugacauguugaggcuguuugacuucaacaaacaagccauucaaagguugaaagcugaagcacaaaugagcauucaguugaucaacaaggcaguaaaugccuugauaaaugaucaacuuauaaugaagaaccaucuacgggacaucaugggaaucccauacuguaauuacagcaaauauugguaccucaaccacacaacuacugggaaaacaucacugccuaaauguuggcuugucucaaaugggucauacuugaacgagacccacuuuucugaugauauugaacaacaagcugacaacaugaucacugagauguuacagaaggaguauauggagaggcaggggaagacaccauugggccuaguugaccucuuuguguucagcacaaguuucuaucucaucagcaucuuccuucaccuagucaaaauaccaacucauaggcauauuguaggcaagucguguccuaaaccucacagauugaaucacaugggcauauguuccuguggacucuacaaacagcccggugugccugugagauggaaaagauga

SEQ ID NO: 492 - RNA, 1476 nt, Artificial Sequence
  derived and/or modified protein sequence (wt) from LASV(LM778-SLE-2012;Clade IV)__AIT17828__GPC
augggacagauagugacauucuuccaggaagugccucauguaauagaagaggugaugaacauuguucucauugcgcugucuauauuagcagugcugaaaggucuauacaacuuugcaacauguggccucguugguuugguuacuuuucuccuguuguguggcaggucuugcacaaccagucuuuauaaaggggacuaugagcuucagacucuggaguuaaacauggagacacucaauaugaccaugccucucuccugcacaaagaauaacagucaucauuacauaaugguaggcaaugagacaggacuagaacugaccuugaccaacacaaguauuauuaaucauaaauuuugcaaucugucugaugcccacaaaaagaaccucuaugaccacgcucuuaugagcauaauuucaacuuuccacuuguccauccccaacuucaaucaguaugaggcaaugagcugcgauuuuaaugggggaaagauuagugugcaguacaaccugagucacagcuaugcuggggaugcugccaaccauuguggcacuguugcaaauggugucuuacagacuuucaugagaauggcuuggggugggagcuacauugcucuugacucaggccguggcaauugggauugcauuaugacuaguuaucaauaucugauaauucaaaauacaaccugggaagaucacugccaauucucaagaccaucuccuaucgguuaucuugggcuccucucacaaaggaccagagauauuuauaucaguagaagacuacuaggcacauucacauggacacugucagauucugaaggcaaggacacaccagggggauauugucugaccagauggaugcugauugaagcugaauuaaaauguuucgggaacacagcuguggcaaaauguaaugagaagcaugaugaggaauuuugugacauguugaggcuguuugacuucaacaaacaagccauucaaagguugaaagcugaagcacaaaugagcauucaguugaucaauaaggcaguaaaugccuugauaaaugaucaacuuauaaugaagaaccaucuacgggacaucaugggaauuccauacuguaauuacagcaaauauugguaccucaaccacacaacuacugggaaaacaucacugccuaaauguuggcuuguaucaaaugggucauacuugaacgagacccacuuuucugaugauauugaacaacaagcugacaacaugaucacugagauguuacagaaggaguauauggagaggcaggggaagacaccauugggccuaguugaccucuuuguguucagcacaaguuucuaucucaucagcaucuuccuucaccuagucaaaauaccaacucauaggcauauuguaggcaagucauguccuaaaccucacagauugaaucacaugggcauauguuccuguggacucuauaaacagcccggugugccugugaaauggaaaagauga

SEQ ID NO: 493 - RNA, 1476 nt, Artificial Sequence
  derived and/or modified protein sequence (wt) from LASV(Mad39;Clade IV)__ANH09722__GPC
auggggcaaauugugacauucuuucaggaagugccucauguaauugaggaggugaugaacauuguacucauugcacuauccauacuggcagugcuaaagggucuguacaauguugcaacauguggccucauuggcuugguuaccuuccuccugcugugugguagaucuuguacaaccacucuuuauaaagggguuuaugagcuucaagcucuggaacuaaacauggaaacacucaacaugacuaugccucucucuugcacaaaaaacaacucucaucacuauauaagggugggcaaugaaacaggccuagaacugaccuugaccaacacaagccucauaaaucacaaguucugcaaucugucugaugcucacaaaaagaaccucuaugaucaugcucuuaugagcauaaucucaacuuuccauuuguccauccccaacuucaaucaguaugaagcaaugagcugugauuucaaugaugggaagaucaguguacaguacaaccuaagccacaccuacgcuggggauacagccaaccacugugguacuguugcgaacgguguuuuacagacuuucaugaggauggcuuggggugggaguuacauugcucuugauucaggccgugguggaugggacugcauuaugaccagcuaucaauauuugauaauucagaacacaaccugggaagaucacugucaguucucaagaccaucucccaucggguaccuugggcuccucucacaaagaaccagagacauuuauaucaguagaagacuacugggcacauucacauggacacuaucagauucugaggguaaagacacaccagggggguacugucuaacuagguggaugcugauugaagcugaauugaaaugcuuuggcaacacagcuguagcaaaaugcaaugagaagcaugaugaggaauuuugugauauguugaggcuauuugacuuuaacaaacaagccauucaaagauugaaagcugaagcacaaaugaguauucagcugaucaacaaagcagugaaugccuugauaaaugaucaacugauaaugaaaaaccauuugcgggacauuauggggauuccguacugcaacuacagcaaguauugguaucuuaaucacacagucaccggaaagacaucauuacccaaaugcuggcuuguaucaaauggcucauaccuaaacgagacccacuucucugaugauauugagcagcaagcugauaacaugauuacugagaugcuacagaaggaauacauggagagacaggggaagacaccacuuggucugguugaccucuuuguauuuagcacaaguuucuaucucauuagcauuuuccuucaccuagugaaaauaccaacucauaggcauguugugggcaaaccguguccuaaaccucacagacugaaccacauggguauauguucuuguggguucuacaagcaaccuggugugccugugagauggaagagauga

SEQ ID NO: 494 - RNA, 1476 nt, Artificial Sequence
  derived and/or modified protein sequence (wt) from LASV(Mad41;Clade IV)__ANH09724__GPC
auggggcagauugugacauucuuccaggaagugccucauguaauagaggaggugaugaacauuguacucaucgcacugucuauacuagcagugcugaagggucuguauaauguugcaacauguggccucauuggcuugguuacuuuccuucugcugugugguagaucuugcacaaccacucuuuauaaagggguuuaugagcuucaagcucuggaacugaacauggaaacacucaacaugacuaugccucucucuugcacaaaaaacgacagucaucacuauauaauggugggcaaugaaacaggccuagaacugacuuugaccaacacaagcaucaucagucauaaguucugcaaucuguccgaugcucacaaacagaaccucuaugaucaugcucucaugagcauaaucucaacuuuccauuuguccaucccuaacuucaaucaguaugaagcaaugagcugugacuuuaauggugggaagaucaguguacaguacaaccuaagccauaccuaugcuggagaugcagccaaccauuguggcacuguugcaaaugguguuuuacagacuuucaugaggauggcuuggggugggaguuacauugcucuugauucaggccgugguggaugggauugcauuaugacuagcuaucaauauuugauaauucagaauacaaccugggaagaucacugucaguuuucaaggccaucucccaucggguaccuugggcuccuuucacaaagaaccagagacauuuauaucaguagaagacuccugggcacauucacauggacgcugucagauuccgaggguaaagacacaccagggggcuacugucugaccagguggaugcugauugaagcugaauugaaaugcuuuggcaacacagcuguggcaaaaugcaaugagaagcaugaugaggaauuuugugacauguugaggcuauuugacuucaacaaacaagccauucaaagguugaaggcugaagcacaaaugaguauucagcuaaucaacaaagcagugaaugccuugauaaaugaucaacuaauaaugaagaaccaucugcgggauauuauggggauuccguacugcaacuacagcaaguauugguaucuuaaccacacagucaccgggaaaacaucgcugccuaaaugcuggcuuguaucaaaugguucauaccuaaaugagacucacuucucugaugauauugagcagcaggcugauaacaugaucacugagaugcugcaaaaggaauacauggagaggcaggggaagacaccauugggucugguugaccucuuuguauuuagcacaaguuucuaucucaucagcaucuuucuucaccuagucaaaauaccaacucauaggcauguugugggcaaaccguguccuaaaccucacagacugaaccacauggguauaugcucuuguggauucuauggacaaccugguguaccuguaagauggaagagauga

SEQ ID NO: 495 - RNA, 1476 nt, Artificial Sequence
  derived and/or modified protein sequence (wt) from LASV(Mad63;Clade IV)__ANH09728__GPC
auggggcaaauugugacauucuuucaggaagugccucaugugauugaggaggugaugaacauuguacucaucgcauugucuguacuagcagugcuaaagggucuguauaauguugcaacauguggccuuauuggcuuggucaccuuucuucugcugugugguagaucuugcacaacuacccuuuauaaagggguuuaugagcuucaagcucuggaacugaacauggggacacucaacaugacuaugccucucucuuguacaaaaaacaacagucaucacuauauaaugguaggcaaugaaacaggccuggaacugacuuugaccaacacaaguaucaucaaucacaaguucugcaaucugucugaugcucacaaaaaggaccucuaugaucaugcucuuaugaguauaaucucaacuuuccacuuguccgucccuaacuucaaucaguaugaagcaaugaguugugauuucaauggggggaagaucaguguacaauacaaccuaagccaugccuaugcuggagauacagccaaccacuguggcaccguugcaaacggcguuuuacagaccuucaugaggauggcuuggggugggaguuacauugcucuugauucaggccgugguggaugggacugcauuaugaccagcuaucaauauuugauaauucaaaacacaaccugggaagaucacugucaguuuucaagaccaucucccaucggguaccuugggcuccucucacaaagaaccagagacauuuauaucaguagaagacuacugggcacauucacauggacacugucagauucugagggugaauacacaccagggggguacugucuaacuagguggaugcugauugaagcugaauugaaaugcuuuggcaacacagcuguagcaaaaugcaaugagaagcaugaugaggaauuuugugauauguugaggcuauuugacuucaacaaacaagcuauucagagguugaaagcugaagcacaaaugaguauucagcugauaaacaaagcagugaaugccuuaauaaaugaucaacugauaaugaagaaccaucugcgggacauuauggggauuccauacugcaacuacaguaaguauugguaucuuaaccacacagucaccgggaaaacaucauugcccaaaugcuggcuuguaucaaauggcucauaccuaaacgagacccacuucucugaugauauugagcagcaggcugauaacaugauuacugagaugcugcagaaggaauacauggagaggcaggggaagacaccauuggguuugguugaccucuuuguauuuagcacaaguuucuaucucauuagcauuuuccuucaucuugucaaaauaccaacucauaggcauguugugggcaaaccgugucccaaaccucacagacugaaccacauggguauauguucuuguggguucuauaaacaaccuggugugccuguaagauggaagagauga

SEQ ID NO: 496 - RNA, 1476 nt, Artificial Sequence
  derived and/or modified protein sequence (wt) from LASV(Mad69;Clade IV)__ANH09730__GPC
auggggcaaauugugacauucuuucaggaagugccucaugugauugaggaggugaugaacauuguacucaucgcacugucuguacuagcagugcuaaagggucuguauaacguugcaacauguggucucauuggcuuggucaccuuucuucugcugugugguagaucuugcacaaccacccuuuauaaagggguuuaugagcuucaagcucuggaacugaacauggagacacucaacaugacuaugccucucucuugcacaaaaaacaacagucaucacuauauaaugguaggcaaugaaacaggccuggaacugacuuugaccaacacaagcauuaucaaucacaaguucugcaaucugucugaugcucacaaaaagaaccucuaugaucaugcucuuaugagcauaaucucaacuuuccacuuguccaucccuaacuucaaucaguaugaagcaaugagcugugauuuuaaucaggggaagauuaguguacaauacaaccuaagccaugccuaugcuggagaugcagccaaccacuguggcacuguugcaaacggcguuuuacagacuuucaugaggauggcuuggggugggaguuacauugcucuugacucaggccgugguggaugggacugcaucaugaccagcuaucaauauuugauaauucagaacacaaccugggaaaaucacugucaguucucaagaccaucucccauuggguaccuugggcuccucucacaaagaaccagagacauuuauaucaguagaagacuacuuggcacauucacauggacacugucagauucugaggguaaaggcacaccagggggguacugucuaacuagguggaugcugauugaagcugaguugaaaugcuuuggcaacacagcuguagcaaaaugcaaugagaagcaugaugaggaauuuugugacauguugaggcuauuugacuucaacaaacaagccauucagagguuuaaagcugaagcacaaaugaguauucaguugaucaauaaagcagugaaugccuugauaaaugaucaacugauaaugaagaaccaucugcgggacauuauggggauuccauacugcaacuacagcaaguauugguaucuuaaccacacagucaccgggaaaacaucauugcccaaaugcuggcuuguaucaaauggcucauaccuaaacgagacccacuucucugaugauauugagcagcaggcugauaacaugauuacugagaugcugcagaaggaauacauggagaggcaggggaggacaccauugggucugguugaccucuuuguauuuagcacaaguuucuaucuuauuagcauuuuccuucaucuugucaaaauaccaacucacaggcauguugugggcaagccgugucccaaaccucacagacugaaucacauggguauauguucuuguggguucuauaaacaaccuggugugccuguaagauggaagagauga

SEQ ID NO: 497 - RNA, 1476 nt, Artificial Sequence
  derived and/or modified protein sequence (wt) from LASV(Mad83;Clade IV)__ANH09732__GPC
auggggcaaauugugacauucuuucaggaagugccucauguaauagaggaggugaugaacauuguacucaucgcacugucuauacuagcaguguuaaaggguguguauaauguugcaacauguggccucauuggcuugguuaccuuccuuuuacugucugguagaucuugcacaaccacuauuuauaaagggguuuaugagcuucaagcucuggaacugaacauggagacacuuaacaugacuaugccccucucuugcacaaagaauaacagucaucacuauauaauggugggcaaugaaacagguuuagaacugacuuugaccaacacaaguaucauuaaucauaaguucugcaauuugucugaugcccacaaaaagaaccuuuaugaucaugcucuuaugagcauaaucuccacuuuccauuuauccaucccuaacuuuaaucaguaugaagcaaugagcugugauuuuaauggugggaagaucagugugcaguacaaccuaagccauaccuaugcuggagaugcagccaaccacuguggcacuguugcaaaugguguuuuacagacuuucaugaggauggccuggggugggaguuacauugcucuugauucaggccaugguggaugggauugcauuaugaccagcuaucaauauuugauaauucagaacacaaccugggaaaaucacugucaguucucaagaccaucccccaucggguaccuugggcuccucucacaaagaaccagagacauuuauaucaguagaagacuacugggcacauucacauggacacugucagauucugaagguaaagacacaccagggggguacugucugacuagguggaugcugauugaagcugaauugaaaugcuuuggcaacacagcuguagcaaaaugcaaugagaagcaugaugaggaauucugugacauguugaggcuauuugacuucaacaaacaagccauucaaagguugaaagcugaggcacagaugaguauucagcugaucaacaaagcagugaaugccuuaauaaaugaucaacugauaaugaagaaccaucugcgggacauuauggggauuccauacugcaacuacagcaaguauugguaccuuaaccacacagucaccgggaaaacaucauugccuaaaugcuggcuuguaucaaauggcucauaccuaaacgagacccacuucucugaugauauugagcagcaggcugauaacaugauuacugagaugcuacagaaggaauacauggaaaggcaggggaagacaccacugggucuaguugaccuuuuuguguuuagcacaaguuucuaucucauuagcaucuuccuccaccuagucaaaauaccaacucauaggcacauuguuggcaaaccguguccuaaaccucacagacugaaccacauggguauauguucuuguggguucuauaaacaaccugguguaccuguaagauggaagagauga

SEQ ID NO: 498 - RNA, 1476 nt, Artificial Sequence
  derived and/or modified protein sequence (wt) from LASV(NL;Clade IV)__AAO59512__GPC
augggacaaauagucacauucuuccaggaagugccucauguaauagaagaggugaugaacauuguccucauugcgcugucuauacuagcugugcugaagggucuguacaacuuugcgacauguggccucguugguuuaguugcuuuccucuuguuguguggcaggucuugcacaagcagucuuuacaaagggguuuaugagcuccagacucuggaacuaaacauggagacacucaauaugaccaugccucucucuugcacaaagaacaacagucaucauuacauaagggugggcaaugagacaggacuagaacugaccuugaccaacaccaguauuauuaaucauaaauuuugcaaucuaucugaugcucacaagaagaaccuuuaugaccacgcucuuaugagcauaaucucaacuuuccacuuguccaucccaaacuucaaucaguaugaggcaaugagcugugauuucaacggaggaaagauuagugugcaguacaaccugagccacagcuaugcuguggaugcagccaaacauuguggcacaguugcaaauggugucuuacagacuuucaugaggauggcuugggguggaagcuacauugcucuugauucaggccaugguagaugggacuguauuaugacuaguuaucaauaucuaauaauucagaauacaaccugggaagaucacugccaauucucaagaccaucucccauugguuaucucgggcuccucucacagaggacuagagacauuuauauuaguagaagacuacuaggcacauuuacauggacacugucagacucugaaggcaaggacacaccagggggauauugucugaccagauggaugcuaauugaagcugagcuaaaaugcuucgggaacacagcuguggcaaaauguaaugagaaacaugaugaggaauuuugugacaugcugaggcuguuugacuucaauaaacaagccauucaaaggcugaaaacugaagcacaaaugagcauucaguugaucaauaaagcagugaaugcuuugauaaaugaccaacuaauaaugaagaaucauuugcgggacauaaugggaauuccauacuguaauuacagcagguauugguaccuuaaccacacaacuacuggaaaaacaucacugcccaaauguuggcuuguaucaaaugguucauaccugaacgagacccgcuuuucugacgauauugaacaacaagcugacaacaugaucacugagauguuacagaaagaguacauggaaaggcaggggaagacaccauugggucuaguugaccucuuuguguucagcacaaguuucuaucucauuagcaucuuccuucaccuaguuaaaauaccgacucauaggcauauugugggcaagucaugucccaagccucacagguugaaucacaugggcauauguuccugcggacucuauaaacagcccggugugccuguaaaauggaagagguga

SEQ ID NO: 499 - RNA, 1476 nt, Artificial Sequence
  derived and/or modified protein sequence (wt) from LASV(Z0947-SLE-2011;Clade IV)__AIT17840__GPC
augggacaaauagugacauucuuccaggaagugccccaugucauagaagaggugaugaacaucguucucauugcacugucuauacuagcaguguugaaaggucuguacaauuuugcaacauguggccucguuggcuuggucacuuuccuccuguuguguggcaggucuugcacaauuagccuuuacaaggggguuuaugagcuucagacucuggaacuaaacauggaaacacucaauaugaccaugccucucuccuguacaaagaacaacagucaucauuauauaauggugggcaaugagacaggacuagaacugaccuugaccaacacgagcauuauuaaucauaaauuuugcaaucugucugaugcccacaaaaagaaccucuaugaccaugcucuuaugagcauuaucucaacuuuccacuuguccaucccuaacuucaaucaguaugaggcaaugagcugcgauuucaaugggggaaagauuagugugcaguacaaccugagucacagcuaugccggggacgcagccaaccauugugguacuguugcaaaugguguauuacagacuuucaugaggauggcuuggggugggagcuacaucgcucuugacucaggccgugacaggugggacuguauuaugacuaguuaucaauaucugauaauccaaaauacaaccugggaagaucacugccaauucucgagaccaucucccaucgguuaucucgggcuccucucacaaaggaccagagauauuuauauuaguagaaggcuacuaggcacauucacauggacacugucagauucugaaggcaaggacacaccagggggauauugucuaaccagauggaugcuaauugaggcugagcuaaagugcuucgggaacacagccguggcaaaauguaaugagaagcaugaugaggaauuuugugacaugcugagguuguuugacuuuaacaaacaagccauucaaagguugaaagcugaagcacaaaugagcauucaguugaucaacaaagcaguaaaugcuuugauaaaugaccaacuuauaaugaagaaccaucuacgggacaucauggggauuccauacuguaauuacagcaaguauugguaccucaaccacacaacuacuggaaaaacaucacugcccaaguguuggcuuguaucaaaugguucauaccugaacgagacccacuuuucugaugacaucgaacaacaagcugacaacaugaucacugagauguuacagaaggaguauauggagaggcaggggaagacaccauugggucugguugaccucuuuguguucagcacaagcuucuaucucauuagcaucuuccuucaccuaguuaaaauaccaacucauaggcauauuguaggcaagccgugucccaaaccucacagguugaaucauaugggcauuuguuccuguggacucuauaaacagccuggugugccugugaaauggaagagauga

SEQ ID NO: 500 - RNA, 1476 nt, Artificial Sequence
  derived and/or modified protein sequence (wt) from LASV(Z0948-SLE-2011;Clade IV)__AIT17844__GPC
augggacaaauagugacauucuuccaggaagugccccaugucauagaagaggugaugaacaucguucucauugcacugucuauacuagcaguguugaaaggucuguacaauuuugcaacauguggccucguuggcuuggucacuuuccuccuguuguguggcaggucuugcacaauuagccuuuacaaggggguuuaugagcuucagacucuggaacuaaacauggaaacacucaauaugaccaugccucucuccuguacaaagaacaacagucaucauuauauaauggugggcaaugagacaggacuagaacugaccuugaccaacacgagcauuauuaaucauaaauuuugcaaucugucugaugcccacaaaaagaaccucuaugaccaugcucuuaugagcauuaucucaacuuuccacuuguccaucccuaacuucaaucaguaugaggcaaugagcugcgauuucaaugggggaaagauuagugugcaguacaaccugagucacagcuaugccggggacgcagccaaccauugugguacuguugcaaaugguguauuacagacuuucaugaggauggcuuggggugggagcuacaucgcucuugacucaggccgugacaggugggacuguauuaugacuaguuaucaauaucugauaauccaaaauacaaccugggaagaucacugccaauucucgagaccaucucccaucgguuaucucgggcuccucucacaaaggaccagagauauuuauauuaguagaaggcuacuaggcacauucacauggacacugucagauucugaaggcaaggacacaccagggggauauugucuaaccagauggaugcuaauugaggcugagcuaaagugcuucgggaacacagccguggcaaaauguaaugagaagcaugaugaggaauuuugugacaugcugagguuguuugacuuuaacaaacaagccauucaaagguugaaagcugaagcacaaaugagcauucaguugaucaacagagcaguaaaugcuuugauaaaugaccaacuuauaaugaagaaccaucuacgggacaucauggggauuccauacuguaauuacagcaaguauugguaccucaaccacacaacuacuggaaaaacaucacugcccaaguguuggcuuguaucaaaugguucauaccugaacgagacccacuuuucugaugacaucgaacaacaagcugacaacaugaucacugagauguuacagaaggaguauauggagaggcaggggaagacaccauugggucugguugaccucuuuguguucagcacaagcuucuaucucauuagcaucuuccuucaccuaguuaaaauaccaacucauaggcauauuguaggcaagccgugucccaaaccucacagguugaaucauaugggcauuuguuccuguggacucuauaaacagccuggugugccugugaaauggaagagauga

SEQ ID NO: 501 - RNA, 1476 nt, Artificial Sequence
  derived and/or modified protein sequence (wt) from LASV(Z148;Clade IV)__AAT49008__GPC
auggggcaaauagucacauuuuuccaggaagucccucauguaauagaggaggucaugaacauuguacuuaucgcacuguccauacuagcugugcugaaagguuuguacaauguugcaacauguggccuuauuggcuuggucaccuuucucuuccuaugugguaggucuuguucaaccacucuuuacaagggaguuuaugagcuucagaccuuggaguugaacauggaaacacugaacaugacaaugccccucucuugcacaaagaacaacagucaccauuacauaauggugggcaaugagacaggacuggaacugacuuugaccaacacaaguauuauaaaucacaaguucugcaaucuaucugaugcccacaaaaagaaucucuaugaccacacucuuaugagcauaaucucaacuuuccaucugucuauaccuaauuucaaucaguaugaagcaaugaguugugacuuuaauggggguaagaucagugugcaauacaaccugagucacaguuaugcuguagaugcagcuaaucauuguggcacaguggcaaaugguguuuugcagaccuucaugaggauggcuuggggcgggaguuacauugcccuugauucaggucguggcaacugggacugcaucaugacuaguuaccaauaucuuauaauucagaacacaaccugggaagaccauugucaguucucaaggccaucucccaucggcuaucuugggcuccuuucacaaagaaccagagauauuuacaucagcaggagauugcugggaacauucacauggacacuaucagauucugaagguaaagacacaccaggaggguacuguuugaccagguggaugcugauugaagcugaguuaaagugcuuuggcaacacagccguggcaaaguguaaugagaagcaugaugaagaguuuugugacaugcugaggcuauuugacuucaacaaacaagccauccaaagauugaaagccgaggcucagaugaguauacaacugaucaacaaagcaguaaaugcucugauaaaugaucagcuaauaaugaagaaccauuugcgagacauuauggggaucccauacugcaauuacaguagauacugguaucucaaccacacagucaccggaaagacaucauugcccaaguguuggcuugugucaaauggaucauaccuaaaugagacccacuucucugaugauaucgaacagcaagcugacaauuugaucacugagauguuacaaaaggaauacauggaaagacaaggcaaaacaccauuggguuugguugaccucuuuguguucaguacaagcuuuuaccuuauaagcaucuuccuccaccuagucaaaauaccaacucauagacacauuguaggcaaaccauguccuaaaccucauagauugaaccauauggguauaugcuccugugguguuuacaaacaaccugguguaccugugagauggaaaagguaa

SEQ ID NO: 502 - RNA, 1476 nt, Artificial Sequence
  derived and/or modified protein sequence (wt) from LASV(Bamba-R114;Clade V)__AHC95555__GPC
auggggcagauagugacauucuuucaagaagugccccauguuauagaggaagugaugaacauuguucucauagcacugucuauauuggcagugcugaaaggccuguacaacauugccacauguggucugauuggccuggucacuuuccuccugcuguguggaagauccuguuccuccaauuuauacaagggaguuuaugagcuccaaucucuggaccugaacauggaaacacucaacaugacuaugccucucucuugcaccaagaacaacagucaccauuauauaagagcugguaaugagacagggcuggagcugaccuugaccaacacuagcuugauuaaucacaaauucugcaaccuuucagaugcccacaaaaagaaccuguaugaccacacacucaugagcauaauuucaacuuuccaccuaucuauacccaacuuuaaucaguaugaagcaaugaguugugauuuuaaugggggcaagauuagugugcaauacaaucuaagccaugcuuaugcuauagaugcagccgagcacuguggcacaguugcaaauggugucuugcagaccuucaugagaauggcaugggguggaagcuacauugcucuugacucaggccgugggaacugggacuguaucaugaccaguuaucaguaucugauaauucagaacacaacuugggaagaucacugucaguuuucaagaccaucucccauugguuaucucggacuccucucacagagaaccagagacauuuacauaagcaggagguuguuggguacauucacauggacacugucagacuccgaggguaacgcuacaccaggggguuauugccuaacuagguggauguuaaucgaggcugaauugaaaugcuuuggaaauacagcgguagcaaagugcaaugagaagcaugaugaagaauucugugacaugcucagacuauuugauuucaauaagcaggccauaaguagguugaaauccgaagcacagaugagcauucaacugaucaacaaagcaguaaaugcuuugaucaaugaucaauugauuaugaaaaaccauuuacgggacauaauggggauuccauauuguaauuacagcaaauauugguaccucaaccauacaauuacuggcagaacuucauuacccaaguguuggcuugugucuaauggcucauaccugaaugagacccacuucucugaugauauagagcaacaagcugacaacaugaucacagagaugcuacaaaaggaauauauggaaaggcaggggaagacgcccuugggcuuagucgacuuguuugucuucagcacaagcuuuuaucugaucaguaucuuccuccaucuagucaagauuccgacccauagacacauuguagguaagccauguccuaagccccacaggcugaaccacauggguaucuguuccugugguuuauacaagcaaccuggugucccccucaaguggaagagauaa

SEQ ID NO: 503 - RNA, 1476 nt, Artificial Sequence
  derived and/or modified protein sequence (wt) from LASV(Komina-R16;Clade V)__AHC95557__GPC
auggggcagauugugacauucuuucaagaagugccucauguaauagaagaagugaugaacaucguucuuauagcauuguccauauuggcaguguuaaaggguuuguacaacauugcaacauguggccucauuggcuuggucaccuucuuccuacugugugguagauccugcuccuccaaccucuauaagggggucuaugaacuccaaucccuagaucugaacauggagacacucaacaugacuaugccccucucuugcaccaaaaacaacagucaucauuacauaagaguuggcaaugagacagggcuggaacugaccuuaaccaacacaaguuugcuuaaucauaaguucuguaaccugucggaugcucacaagaggaaucuuuacgaccacgcacucaugaguauaaucucaacuuuccaccuaucuauacccaacuucaaccaauaugaagcaaugagcugugacuuuaaugggggcaaaaucacuguccaguacaaccuaagccacucuuaugcaggggauacagccaagcacugcggcacaaucgcaaauggcguccugcagacuuuuaugaggauggcaugggguggaagcuacauugcucuugacucaggccaugggaacugggacugcauuaugaccaguuaucaauaucugauaauccaaaacacaaccugggaggaccauugucaguucucaagaccaucucccaucggcuaccuuggucuccucucacagagaaccagagauaucuacauuagcagaagguuguuaggcacauucacauggacacugucagacuccgaggggaaugccacaccaggagguuacugcuuaaccagguggauguugauugaggcugaauuaaaaugcuuuggcaacacagcaguggcaaagugcaaugaaaagcaugaugaggaauucugugacaugcucagacuguuugauuucaacaagcaggccauaagcagacugagaucugaagcacaaaugagcauccagcuuaucaacaaggcagugaaugccuuaauuaaugaucaguugauuaugaaaaaccauuugcgagacauuauggggaucccauauugcaauuacagcaaauacugguaucuuaaccacacagucacugguagaaccucacuaccuaaguguuggcuuguguccaauggcucauacuugaaugagacucauuuuucugaugacaucgaacagcaagccgacaacaugaucacagagaugcuacaaaaagaauacauggacaggcaaggaaaaacaccuuugggccugguugacuuguuuguguuuagcacaaguuuuuaucugauuagcauuuuccuucauuuagucaaaauaccgacccauagacacauuguggguaaaccguguccuaagccucacaggcugaaccguaugggcauuugcucuugugguuuguacaagcaaccuggcgucccuguuaaauggaagagauag

SEQ ID NO: 504 - RNA, 1476 nt, Artificial Sequence
  derived and/or modified protein sequence (wt) from LASV(Ouoma-R123;Clade V)__AHC95559__GPC
auggggcagauaauaacauucuuucaagaagugccccauguuauagaggaagugaugaacauuguucuuauagcauuguccauauuggcaguguuaaaaggcuuguacaacauugccacauguggucugauuggccuagucacuuuccuccugcuguguggaagauccugcuccuccagucuuuacaaaggagucuacgagcuccaaucccuggaccugaacauggagacacucaauaugacuaugccccucucuugcaccaaaaacaacagucaucauuauauaagaguuggcaaugagacaggguuggaguugaccuugaccaacacuagcuugaucaaucacaaguuuugcaaccuuucagaugcccacaagaagaaccuguaugaccacgcacucaugagcauaauuucaacuuuccaccuaucuauacccaacuucaaucaauaugaagcaaugaguugugauuucaaugggggcaaaauuaguguacaauacaaucuaagccaugcuuaugccauagaugcagccagccacuguggcacaguugcaaauggugucuugcagaccuucaugaggauggcaugggguggaaguuacauugcucuagauucaggccaugggaacugggacuguauuaugaccaguuaucaguaucugauaauccagaacacaacuugggaagaucacugucaauucucaagaccguccccuauugguuaucuuggucuccucucacagagaacuagagauauuuacauuagcaggagguugcugggcacauucacauggacacugucagacuccgaggguaaugcuacaccaggagguuauugccuaacuagguggauguuaauugaggcugaauugaaaugcuuuggaaauacagcgguggcaaagugcaaugagaagcaugaugaagaauucugugacaugcucagacuguucgauuucaauaagcaagccauaaguagguuaaaauccgaagcacaaaugagcauccaacuaaucaauaaagcagugaaugcuuugaucaaugaucaauuaauaaugaaaaaccacuuacgggacauaauggggauuccauauuguaauuacagcaaguauugguaccucaaccacacaguuacugguaaaaccucauugcccaaaugcuggcuuguguccaauggcucauacuugaaugagacccacuuuucugaugacaucgaacaacaagcugacaacaugaucacagagaugcuacaaaaggaauacauggagaggcaggggaagacgcccuuaggccugguugaucuauuugucuuuagcacaagcuuuuaucugaucaguaucuuccuccaucuagucaagauuccgacucauagacacauuguggguaaaccauguccuaaaccccacaggcugaaccacaugggcaucuguuccugugguuuguacaagcagccuggugucccugucaaauggaagagauag

SEQ ID NO: 505 - RNA, 1476 nt, Artificial Sequence
  derived and/or modified protein sequence (wt) from LASV(Soromba-R;Clade V)__AHC95553__GPC
auggggcagauugugacauucuuucaagaagugccucauguaauagaagaagugaugaacaucguccuuauagcauuguccauauuggcaguguuaaaggguuuguacaacauugcuacauguggucucauuggcuuggucaccuucuuccuacugugugguagauccugcuccuccaaccucuauaagggggucuaugaacuccaaucucuagaucugaacauggagacacucaacaugacuaugccccucucuugcaccaaaaacaacagucaucauuacauaagaguuggcaaugagacagggcuggaacugaccuuaaccaacacaaguuugcuugaucauaaguucuguaaccugucggaugcccacaagaagaaucuuuacgaccacgcacucaugaguauaaucucaacuuuccaccuaucuauacccaacuucaaccaauaugaagcaaugagcugugacuuuaaugggggcaaaaucacuguccaguacaaccuaagccacucuuaugcaggggaugcagccaggcacugcggcacaauugcaaauggcguccugcagacuuucaugaggauggcaugggguggaagcuacauugcucuugacucaggccaugggaacugggacugcaucaugaccaguuaucaauaccugauaauccaaaacacaaccugggaagaccauugucaguucucaagaccaucucccaucggcuaccuuagucuccucucacagagaaccagagauaucuacauuagcagaagguuguuaggcacauucacauggacacugucagacuccgaggggaaugcuacaccaggagguuacugcuuaaccagguggauguugauugaggcugaauuaaaaugcuuuggcaacacagcaguggcaaagugcaaugaaaagcaugaugaggaauucugugacaugcucagacuguuugauuucaacaagcaggccauaagcagacugagaucugaagcacaaaugagcauccagcuuaucaacaaggcagugaaugccuuaauuaaugaucaguugauuaugaaaaaccauuugcgagacauuauggggaucccauauugcaauuacagcaaauacugguaucuuaaccacacagucacugguagaaccucacuaccuaaguguuggcuuguguccaauggcucauacuugaaugagacccauuuuucugaugacaucgaacagcaagccgacaacaugaucacagagaugcuacaaaaggaauacauggacaggcaaggaaaaacaccuuugggccugguugacuuguuuguguuuagcacaaguuuuuaucugauuagcauuuuccuucauuuagucaaaauaccgacccauagacacauuguggguaaaccgugucccaagccucacaggcugaaccgcaugggcauuugcucuugugguuuguacaagcaaccuggcgucccuguuaaauggaagagauag

SEQ ID NO: 506 - RNA, 1473 nt, Artificial Sequence; identical to SEQ ID NO: 260
  derived and/or modified protein sequence (wt) from LASV(Alzey;Clade VI)__SCA79105__GPC

SEQ ID NO: 507 - RNA, 1473 nt, Artificial Sequence
  derived and/or modified protein sequence (wt) from LASV(Lassa/H.sapiens-wt/TGO/2016/201600568;Clade VI)__AVN98153__GPC
auggggcaaauaauaaccuucuuccaggagguuccucauguuauagaggaggugaugaacauuguucugauagcacucucacuccuagcuauccugaaaggggucuacaauguggcaacaugugggauaauugggcuugugaccuuccucuuucucuguggaagaucuuguucacugaucuacaaaggcaguuaugagcugcaaacauuggaguuaaauauggagacccuaaacaugaccaugccucugucaugcacuaaaaauaguagccaccauuauauucgaguugggaacgagacuggcuuagagcugacauugaccaacaccagcauuauaaaucacaaauucuguaaccugucagaugcucacaaacguaaucuguaugaccacgcacucaugagcauccuuuccacauuccaucuguccaucccaaacuucaaccaguaugaggcgaugaguugugacuucaauggaggcaaaaucagugugcaauauaaucucagccaugcuuaugcaguugaugcugccgaacacugcggaacaguugcaaauggugugcuacaaacauucaugaggauggcuuggggaggaaguuacauugcacuugacucugggagaggcaauugggacuguauuaugacaagcuaccaauacuuaaucauucagaauacaacaugggaagaucacugccaauuuucaagaccuucuccuauugguuaucucggcuuauugucacaaagaacaagagacauuuauaucaguaggaggcugcuggguacauucaccuggacacuuucugacucagagggaaaugagacaccaggcggauacuguuuaacaagauggaugcugauagaggcugagcuaaaauguuuuggaaacacagcuguugcaaaguguaaugagaagcaugaugaggaauucugcgacauguuaagguuguuugacuucaacaaacaggcaauucagaggcucaaaucagaggcacaaaugagcauccaguuaauaaauaaagcagugaaugcauugauaaaugaucagcucauuaugaagaaccacuuaagggauaugauggguauaccguauugcaacuacaguaaguauugguaucucaaucacaccucaucagggagagcaucguugccuaaaugcuggcuuguuuccaauggaaguuaucugaaugagacccacuucucagaugauauugaacaacaggcagacaacaugauaacugaaauguuacaaaaggaauauaucgauaggcaggguaaaacaccuuuaggacuuguugaccuuuuuguuuucagcacgaguuuuuaccuuauaaguauauucuuacacuugauaaagauaccuacucauaggcacauaguuggaaagccaugccccaagccacaccgccucaaccacauggggaucugcucuuguggacuauacaagcagccuggugucccaaccagauggaagagauaa

SEQ ID NO: 508 - RNA, 1473 nt, Artificial Sequence
  derived and/or modified protein sequence (wt) from LASV(NIGERIA IKEJI;Clade II)__AMZ00373__GPC
augggacagauaauaaccuucuuucaagaggugccccauguuauagaggaggugaugaacauaguucuaauugcacucagccuuuuggcaauauuaaaaggaauuuacaauguugccacuugugggcucuuugggcugaucuccuuucuuuuucugugcggcagaucauguucaacaauguacaagggugucuaugaguugcaaaccuuggaacuggacauggcaaaccuuaacaugacaaugccuuuaucuugcacaaaaaacaacagccaucauuacaucauggucgggaaugagacaggucuggaguugacuuugaccaaccagagcaucaucaaucacaaguuuuguaaccuuucugaugcucacaagaagaaccucuaugaccacacuuugaugaguaucauuucaacuuuccaccuguccaucccaaacuucaaucaguaugaggccaugagcugugacuucaauggagggaagauaaguguccaguacaaccucagucauagcuaugcuguggaugcagccaaccacuguggaacuguugcaaacggagucuugcaaacuuuuaugagaauggcuuggggugggaguuauauagcacuugacucuggaaagggaaauugggacugcauaaugacuucuuaucaguauuugauaauucaaaacaccaccugggaggaucauugccaauuuucucgcccauccccuauugguuaucuuggguugcugucacagaggaccagagacauuuauauuagccgaagacuucucgguacuuucaccuggacucucucugauucugaaggcaaugaugcaccugguggguacuguuugacuagauggaugcucauugaagcugaacugaaguguuuugggaacacagccauugcaaaaugcaaugagaaacaugacgaagaguucugugauaugcugagacuuuucgauuucaacaaacaggcuauaaaaagguugaaagcagaggcacagaugagcauucagcuuauaaauaaagcggucaaugcacuaaucaaugaccaacuaaucaugaagaaucauuugagggauaucaugggcauuccuuacuguaauuacaguaaguacugguaccugaacaacacgguaacagguaaaucaucacuaccaaaaugcuggcuuguuucgaaugggucuuaucugaaugagacacauuuuucugaugacauugaacaacaagcagauaacaugauaacggaaaugcuacagaaagaguacauggauaggcaggggaaaacaccuuuaggguuaguggaucucuuugucuuuagcaccagcuuuuaucuuauaaguaucuuccuccauuuagucaagauuccgacucacaggcacaucacugggaaaccuugucccaagccacacaggcucaaccacaugggcauuugcucauguggccuguauaaacaacccggugugccaguuaaauggaaaagauag

SEQ ID NO: 509 - RNA, 1476 nt, Artificial Sequence
  derived and/or modified protein sequence (opt1) from LASV(Josiah;Clade IV)__NP_694870__GPC
augggccagaucgugaccuucuuccaggaggucccccacgugaucgaggaggugaugaacaucguccugaucgcccucagcgugcuggccgugcugaaggggcucuacaacuucgcgaccugcggccuggucgggcuggugacguuccuccugcugugcggccgcuccugcaccaccagccucuacaaggggguguacgagcugcagacccuggagcucaacauggagacgcugaacaugaccaugccgcuguccugcaccaagaacaacagccaccacuacaucauggucggcaacgagaccggccucgagcugacgcugaccaacaccuccaucaucaaccacaaguucugcaaccucagcgacgcccacaagaagaaccuguacgaccacgcccugauguccaucaucagcaccuuccaccucuccauccccaacuucaaccaguacgaggccaugagcugcgacuucaacgggggcaagaucuccgugcaguacaaccugagccacuccuacgccggggacgcggccaaccacugcggcacgguggccaacgggguccugcagaccuucaugcggauggccuggggcggcagcuacaucgcgcucgacuccgggcgcggcaacugggacugcaucaugaccagcuaccaguaccugaucauccagaacaccacgugggaggaccacugccaguucucccggcccagccccaucggguaccugggccuccugucccagcgcacccgggacaucuacaucagccgccggcugcucggcaccuucaccuggacgcugagcgacuccgaggggaaggacaccccgggcggguacugccugacccgcuggaugcucaucgaggccgagcugaagugcuucggcaacaccgccguggccaagugcaacgagaagcacgacgaggaguucugcgacaugcugcggcuguucgacuucaacaagcaggccauccagcgccugaaggcggaggcccagaugagcauccagcugaucaacaaggccgugaacgcccucaucaacgaccagcugaucaugaagaaccaccuccgggacaucauggggauccccuacugcaacuacuccaaguacugguaccucaaccacacgaccaccggccgcaccagccugcccaagugcuggcuggucuccaacggcagcuaccucaacgagacgcacuucuccgacgacaucgagcagcaggccgacaacaugaucaccgagaugcugcagaaggaguacauggagcggcaggggaagacgccccugggccucguggaccuguucguguucagcaccuccuucuaccugaucagcaucuuccugcaccucgucaagaucccgacccaccgccacaucguggggaaguccugccccaagccccaccggcugaaccacaugggcaucugcagcugcgggcuguacaagcagcccggcgugccggucaaguggaagcgcuga

SEQ ID NO: 510 - RNA, 1473 nt, Artificial Sequence
  derived and/or modified protein sequence (opt1) from LASV(LP;Clade I)__AAF86701__GPC
augggccagaucaucaccuucuuccaggaggugccccacgucaucgaggaggugaugaacaucgugcugaucgcccucagccugcuggccauccucaaggggcuguacaacaucgcgaccugcggcaucaucgggcuggucgccuuccucuuccugugcggcaaguccugcagccugacgcucaagggcggguacgagcugcagacccuggagcucaacauggagacccugaacaugaccaugccgcuguccugcacgaagaacagcucccaccacuacauccgcgugggcaacgagaccgggcucgagcugacccugaccaacacgagcaucaucaaccacaaguucugcaaccucuccgacgcccacaagaagaaccuguacgaccacgcccugaugagcaucaucuccaccuuccaccucagcauccccaacuucaaccaguacgaggccauguccugcgacuucaacggcgggaagaucagcgugcaguacaaccugucccacagcuacgcgggcgacgccgccgagcacugcgggaccgucgccaacggcgugcugcagaccuucaugcggauggcguggggcgggcgcuacaucgcccucgacuccggcaaggggaacugggacugcaucaugacgagcuaccaguaccugaucauccagaacaccaccugggaggaccacugccaguucucccggcccagccccaucggcuaccugggccuccugucccagcgcacccgggacaucuacaucagccgccggcugcucgggacguucaccuggacccugagcgacuccgagggcaacgagacccccgggggcuacugccugacgcgcuggaugcucaucgaggccgagcugaagugcuucgggaacaccgccguggccaagugcaacgagaagcacgacgaggaguucugcgacaugcugcggcuguucgacuucaacaagcaggcgauccgccggcugaaggccgaggcccagaugagcauccagcugaucaacaaggccgucaacgcccucaucaacgaccagcugaucaugaagaaccaccuccgcgacaucaugggcauccccuacugcaacuacuccaaguacugguaccucaaccacaccagcuccggccggaccagccugcccaagugcuggcugaucuccaacgggagcuaccucaacgagacgcaguucuccgacgacaucgagcagcaggcggacaacaugaucaccgagaugcugcagaaggaguacaucgagcgccagggcaagaccccgcuggggcucguggacaucuucaucuucagcaccuccuucuaccugaucagcaucuuccugcaccugaucaagaucccgacgcaccggcacaucgugggcaagcccugccccaagccccaccgccucaaccacaugggggucugcuccugcggccuguacaagcacccgggcgugcccaccaaguggaagcgguga

SEQ ID NO: 511 - RNA, 1473 nt, Artificial Sequence
  derived and/or modified protein sequence (opt1) from LASV(803213;Clade II)__AAF86703__GPC
augggccagaucaucaccuucuuccaggaggugccccacgucaucgaggaggugaugaacaucgugcugaucgcccucagccugcuggccauccucaaggggaucuacaacgucgcgaccugcggccuguucgggcugaucuccuuccuccugcugugcggccgcagcugcuccgugacguacaaggggguguacgagcuccagacccuggagcugaacauggccaaccucaacaugaccaugccgcugagcugcaccaagaacaacucccaccacuacaucauggucggcaacgagacgggccuggagcucacccugaccaacaccagcaucaucaaccacaaguucugcaaccuguccgacgcccacaagaagaaccucuacgaccacgcccugaugagcaucaucuccacguuccaccugagcauccccaacuucaaccaguacgaggccauguccugcgacuucaacgggggcaagaucagcgugcaguacaaccucucccacagcuucgcgguggacgccgccaaccacugcgggaccaucgccaacggcguccugcagaccuucaugcggauggcguggggcggguccuacaucgcccuggacagcggcaaggggaacugggacugcaucaugaccuccuaccaguaccucaucauccagaacacgaccugggaggaccacugccaguucagccgccccucccccaucggcuaccuggggcugcucagccagcggacccgcgacaucuacaucagccggcgccugcugggcaccuucacguggacccucuccgacagcgagggcaacgaggcccccgggggcuacugccugacccgguggaugcugaucgaggccgagcucaagugcuucgggaacaccgccguggcgaagugcaacgagaagcacgacgaggaguucugcgacaugcugcgccuguucgacuucaacaagcaggccaucaagcggcucaagacggaggcccagauguccauccagcugaucaacaaggccgugaacgcccugaucaacgaccagcucaucaugaagaaccaccuccgcgacaucaugggcauccccuacugcaacuacagccgguacugguaccugaaccacaccgucaccgggaagaccucccugccccgcugcuggcuggugagcaacggcuccuaccugaacgagacgcacuucagcgacgacaucgagcagcaggcggacaacaugaucaccgagaugcuccagaaggaguacauggaccggcagggcaagaccccgcuggggcugguggaccucuucgucuucuccaccagcuucuaccugaucuccaucuuccugcaccuggugaagaucccgacgcaccgccacaucgugggcaagcccugccccaagccccaccggcucaaccacauggggaucugcagcugcggccuguacaagcacccggggguccccgugaaguggaagcgcuga

SEQ ID NO: 512 - RNA, 1473 nt, Artificial Sequence
  derived and/or modified protein sequence (opt1) from LASV(GA391;Clade III)__CAA36645__GPC
augggccagaucgugaccuucuuccaggaggucccccacgugaucgaggaggugaugaacaucguccugaucgcccucagcauccuggccauccugaaggggcucuacaacguggcgaccugcggccugaucgggcuggugacguuccuccugcuguccggccgcagcugcucccucaucuacaaggggaccuacgagcugcagacccuggagcucaacauggagacccugaacaugacgaugccgcugagcugcaccaagaacaacucccaccacuacauccgggucggcaacgagaccggccucgagcugacccugacgaacaccagcauccucaaccacaaguucugcaaccuguccgacgcccacaagcgcaaccuguacgaccacagccucauguccaucaucagcaccuuccaccuguccauccccaacuucaaccaguacgaggccaugagcugcgacuucaacgggggcaagaucaccgugcaguacaaccugucccacagcuucgccguggacgccgcggggcacugcggcacgcucgccaacgggguccugcagaccuucaugcggauggccuggggcggcuccuacaucgcccuggacagcgggcgcggcaacugggacugcaucaugaccuccuaccaguaccucaucauccagaacaccacgugggacgaccacugccaguucagccggcccucccccaucggguaccugggccugcucagccagcgcacccgggacaucuacaucagccgccggcugcugggcaccuucaccuggacgcucuccgacagcgaggggaacgagaccccgggcggguacugccugacccgcuggaugcugaucgaggcggagcucaagugcuucggcaacaccgccguggccaagugcaacgagaagcacgacgaggaguucugcgacaugcugcggcuguucgacuucaacaagcaggccauccgccggcucaagacggaggcccagauguccauccagcugaucaacaaggcggugaacgcccugaucaacgaccagcucaucaugaagaaccaccuccgcgacaucauggggauccccuacugcaacuacagccgguacugguaccugaaccacaccuccaccggcaagaccagccugccccgcugcuggcugaucuccaacggcagcuaccugaacgagacgaaguucuccgacgacaucgagcagcaggccgacaacaugaucaccgagaugcuccagaaggaguacaucgaccggcaggggaagacgccccugggccuggucgaccuguucguguucagcaccuccuucuaccucaucagcaucuuccugcaccuggugaagaucccgacccaccgccacaucgucgggaagcccugccccaagccccaccggcucaaccacaugggcaucugcuccugcgggcuguacaagcagccgggcgugcccgugcgcuggaagcgguga

SEQ ID NO: 513 - RNA, 1476 nt, Artificial Sequence
  derived and/or modified protein sequence (opt1) from LASV(AV;Clade V)__CCA30314__GPC
augggccagaucgugaccuucuuccaggaggucccccacgugaucgaggaggugaugaacaucguccugaucgcccucagcauccuggccgugcugaaggggcucuacaacaucgcgaccugcggccugaucgggcugaucacguuccuccugcugugcggccgcuccugcagcuccaaccucuacaaggggguguacgagcugcagagccuggaccucaacauggagacccugaacaugaccaugccgcuguccugcaccaagaacaacagccaccacuacauccgggucggcaacgacacgggccucgagcugacccugaccaacaccuccauccucaaccacaaguucugcaaccugagcgacgcccacaagaaggaccuguacgaccacgcccucauguccaucaucagcacguuccaccuguccauccccaacuucaaccaguacgaggccaugagcugcgacuucaacgggggcaagaucuccgugcaguacaaccugagccacuccuacgccaucgacgcggccaaccacugcgggaccguggccaacggcauccuccagaccuucaugcgcauggccuggggcgggagcuacaucgcgcuggacuccggccgggggaacugggacugcaucaugaccagcuaccaguaccugaucauccagaacacgaccugggagaaccacugccaguucucccgccccagccccaucggcuaccucgggcugcugagccagcggacccgcgacaucuacaucucccggcgccuccugggcaccuucacguggacccugagcgacuccgagggcaacgccacccccgggggcuacugccucacccgguggaugcugaucgaggccgagcugaagugcuucgggaacacggccgucgccaagugcaacgagaagcacgacgaggaguucugcgacaugcuccgccuguucgacuucaacaagcaggcgaucagccggcugaaguccgaggcccagaugagcauccagcucaucaacaaggccgugaacgcccugaucaacgaccagcugaucaugaagaaccaccuccgcgacaucaugggcauccccuacugcaacuacuccaaguacugguaccugaaccacaccaucaccgggaagaccagccugcccaagugcuggcucguguccaacggcagcuaccugaacgagacgcacuucuccgacgacaucgagcagcaggccgacaacaugaucaccgagaugcugcagaaggaguacauggagcggcagggcaagaccccgcucgggcuggucgaccuguucguguucagcaccuccuucuaccugaucagcaucuuccuccgccuggugaagaucccgacgcaccggcacaucgucggcaagcccugccccaagccccaccgccugaaccacauggggaucugcuccugcggccucuacaagcagccgggggugcccgugcgguggaagcgcuga

SEQ ID NO: 514 - RNA, 1473 nt, Artificial Sequence
  derived and/or modified protein sequence (opt1) from LASV(Togo/2016/7082;Clade VI)__AMR44577__GPC
augggccagaucaucaccuucuuccaggaggugccccacgucaucgaggaggugaugaacaucgugcugaucgcccucagccugcuggccauccucaagggggucuacaacguggcgaccugcggcaucaucgggcuggugacguuccuguuccucugcggccgcuccugcagccugaucuacaagggguccuacgagcugcagacccucgagcugaacauggagacccugaacaugaccaugccgcucagcugcacgaagaacuccagccaccacuacauccgggucggcaacgagaccggccuggagcugacccucaccaacacguccaucaucaaccacaaguucugcaaccugagcgacgcccacaagcgcaaccuguacgaccacgcccucauguccauccugagcaccuuccaccuguccauccccaacuucaaccaguacgaggccaugagcugcgacuucaacgggggcaagaucuccgugcaguacaaccucagccacgccuacgcgguggacgccgccgagcacugcgggaccgucgccaacggcgugcugcagaccuucaugcggauggcguggggcggguccuacaucgcccuggacagcggccgcgggaacugggacugcaucaugacguccuaccaguaccucaucauccagaacaccaccugggaggaccacugccaguucagccggcccucccccaucggcuaccuggggcugcucagccagcgcacccgggacaucuacaucagccgccggcugcugggcacguucaccuggacccucuccgacagcgagggcaacgagacccccgggggcuacugccugacgcgcuggaugcugaucgaggccgagcucaagugcuucgggaacaccgccguggccaagugcaacgagaagcacgacgaggaguucugcgacaugcugcggcuguucgacuucaacaagcaggcgauccagcgccucaaguccgaggcccagaugagcauccagcugaucaacaaggccgucaacgcccugaucaacgaccagcucaucaugaagaaccaccuccgggacaugaugggcauccccuacugcaacuacuccaaguacugguaccugaaccacaccagcuccgggcgcaccagccugcccaagugcuggcugguguccaacggcagcuaccugaacgagacgcacuucuccgacgacaucgagcagcaggccgacaacaugaucaccgagaugcuccagaaggaguacaucgaccggcagggcaagaccccgcuggggcugguggaccucuucgucuucagcaccuccuucuaccugaucagcaucuuccugcaccugaucaagaucccgacgcaccgccacaucgugggcaagcccugccccaagccccaccggcucaaccacauggggaucugcuccugcggccuguacaagcagccgggggugcccacccgcuggaagcgguga

SEQ ID NO: 515 - RNA, 1473 nt, Artificial Sequence
  derived and/or modified protein sequence (opt1) from LASV(KAK-428;Clade n.d. (VII))__ANH09740__GPC
augggccagaucgugaccuucuuccaggaggucccccacgugaucgaggaggugaugaacaucguccugaucgcccucagccugcuggccauccucaaggggcuguacaacuucgcgaccugcggcgugaucgggcugaucacguuccuccugcugugcggccgcuccugcagcgccaccuacaaggggcaguacgagcuccagacccuggagcugaacauggagucccucaacaugaccaugccgcugagcugcacgaagaacaacucccaccacuacauccgggccggcaacaacaccggccuggagcucacccugaccaacacgagcaucaucucccacaaguucugcaaccugagcgacgcccacaagaagaaccucuacgaccacacccugauguccaucaucaccaccuuccaccugagcauccccaacuucaaccaguacgaggccauguccugcgacuucaacgggggcaagaucagcauccaguacaaccucucccacagcuacgcgggggacgccgcccagcacugcggcacgguggccaacgggguccugcagaccuucaugcgcauggcguggggcggcuccuaccuggcccucgacagcgggcggcgcggcugggacugcaucaucuccagcuaccaguaccugaucauccagaacaccaccugggacgaccacugccaguucucccggcccagccccaucggguaccugggcuucgugagccagaagacgcgcgacaucuacaucucccggcgccuccugggcaccuucaccuggacccugagcgacuccgaggggcacgacaugccgggcggguacugccucacgcgguggaugcugaucgaggccgaccugaagugcuucggcaacaccgccguggccaagugcaacgagaagcacgacgaggaguucugcgacauguggcgccucuucgacuucaacaagcaggcgauccagcggcugaaggccgaggcccagaugaacauccagcugaucaacaaggccgucaacgcccucaucaacgaccagcugaugaugaagaaccaccuccgcgacaucauggggauccccuacugcaacuacagcaaguucugguaccugaacaacaccaccacgggccggaccucccugccccgcugcuggcugaucagcaacggcuccuaccucaacgagacccacuucagcgacgacaucgagcagcaggcggacaacaugaucaccgagaugcugcagaaggaguacauggaccggcaggggaagacgccccugggccucguggaccuguucguguucuccaccagcuucuaccugaucaccaucuuccuccaccuggucaagaucccgacccaccgccacaucguggggaagcccugccccaagccccaccggcugaaccacaugggcaucugcuccugcgggcuguacaagcagccgggcgugcccguccgcuggaagcgguga

SEQ ID NO: 516 - RNA, 1473 nt, Artificial Sequence
  derived and/or modified protein sequence (opt1) from LASV(Acar 3080;Clade I)__AAT49014__GPC
augggccagaucaucaccuucuuccaggaggugccccacgucaucgaggaggugaugaacaucgugcugaucgcccucagccugcuggccauccucaaggggcuguacaacaucgcgaccugcggcaucaucgggcuggucgccuuccucuuccugugcggcaaguccugcagccugacgcucaagggcggguacgagcugcagacccuggagcucaacauggagacccugaacaugaccaugccgcuguccugcacgaagaacagcucccaccacuacauccgcgugggcaacgagaccgggcucgagcugacccugaccaacacgagcaucaucaaccacaaguucugcaaccucuccgacgcccacaagaagaaccuguacgaccacgcccugaugagcaucaucuccaccuuccaccucagcauccccaacuucaaccaguacgaggccauguccugcgacuucaacggcgggaagaucagcgugcaguacaaccugucccacagcuacgcgggcgacgccgccgagcacugcgggaccgucgccaacggcgugcugcagaccuucaugcggauggcguggggcgggcgcuacaucgcccucgacuccggcaaggggaacugggacugcaucaugacgagcuaccaguaccugaucauccagaacaccaccugggaggaccacugccaguucucccggcccagccccaucggcuaccugggccuccugucccagcgcacccgggacaucuacaucagccgccggcugcucgggacguucaccuggacccugagcgacuccgagggcaacgagacccccgggggcuacugccugacgcgcuggaugcucaucgaggccgagcugaagugcuucgggaacaccgccguggccaagugcaacgagaagcacgacgaggaguucugcgacaugcugcggcuguucgacuucaacaagcaggcgauccgccggcugaaggccgaggcccagaugagcauccagcugaucaacaaggccgucaacgcccucaucaacgaccagcugaucaugaagaaccaccuccgcgacaucaugggcauccccuacugcaacuacuccaaguacugguaccucaaccacaccagcuccggccggaccagccugcccaagugcuggcugaucuccaacgggagcuaccucaacgagacgcaguucuccgacgacaucgagcagcaggcggaccacaugaucaccgagaugcugcagaaggaguacaucgagcgccagggcaagaccccgcuggggcucguggacaucuucaucuucagcaccuccuucuaccugaucagcaucuuccugcaccugaucaagaucccgacgcaccggcacaucgugggcaagcccugccccaagccccaccgccucaaccacaugggggucugcuccugcggccuguacaagcacccgggcgugcccaccaaguggaagcgguga

SEQ ID NO: 517 - RNA, 1473 nt, Artificial Sequence; identical to SEQ ID NO: 510
  derived and/or modified protein sequence (opt1) from LASV(Pinneo-NIG-1969;Clade I)__AIT17836__GPC

SEQ ID NO: 518 - RNA, 1473 nt, Artificial Sequence
  derived and/or modified protein sequence (opt1) from LASV(ISTH0009-NIG-2011;Clade II)__AIT17404__GPC
augggccagaucaucaccuucuuccaggaggugccccacgucaucgaggaggugaugaacaucgugcugaucgcccucagccugcuggccauccucaaggggaucuacaacgucgcgaccugcggccuguucgggcugguguccuuccuccugcugugcggccgcagcugcuccacgaccuacaaggggguguacgagcuccagacccuggagcuggacauggccagccucaacaugaccaugccgcuguccugcacgaagaacaacagccaccacuacaucauggucggcaacgagaccggccuggagcucacccugaccaacacguccaucaucaaccacaaguucugcaaccugagcgacgcccacaagaagaaccucuacgaccacgcccugauguccaucaucagcaccuuccaccuguccauccccaacuucaaccaguacgaggccaugagcugcgacuucaacgggggcaagaucuccgugcaguacaaccucagccacgcguacgccguggacgccgccaaccacugcgggaccaucgcgaacggcguccugcagaccuucaugcggauggccuggggcggguccuacaucgcccuggacagcggcaagggguccugggacugcaucaugacgagcuaccaguaccucaucauccagaacaccaccugggaggaccacugccaguucucccgccccagccccaucggcuaccuggggcugcucagccagcggacccgcgacaucuacaucucccggcgccugcugggcacguucaccuggacccucagcgacuccgagggcaacgagacccccgggggcuacugccugacgcgguggaugcugaucgaggccgagcucaagugcuucgggaacaccgccguggcgaagugcaacgagaagcacgacgaggaguucugcgacaugcugcgccuguucgacuucaacaagcaggccauccggcgccucaagaccgaggcccagaugagcauccagcugaucaacaaggccgugaacgcccugaucaacgaccagcucaucaugaagaaccaccuccgggacaucaugggcaucccguacugcaacuacuccaaguacugguaccugaaccacaccgucacggggaagaccagccugccccgcugcuggcugguguccaacggcagcuaccugaacgagacccacuucuccgacgacaucgagcagcaggcggacaacaugaucaccgagcuccugcagaaggaguacauggaccggcagggcaagacgccccuggggcucguggaccuguucgucuucagcaccuccuucuaccugaucagcaucuuccugcaccucaucaagaucccgacccaccgccacaucaccggcaagcccugccccaagccccaccggcugaaccacauggggaucugcuccugcggccuguacaagcacccgggggugcccgugaaguggaagcgcuga

SEQ ID NO: 519 - RNA, 1473 nt, Artificial Sequence
  derived and/or modified protein sequence (opt1) from LASV(ISTH0012-NIG-2011;Clade II)__AIT17408__GPC
augggccagaucaucaccuucuuccaggaggugccccacgucaucgaggaggugaugaacaucgugcugaucgcccucagccugcuggccauccucaaggggaucuacaacgucgcgaccugcggccuguucgggcugguguccuuccuccugcugugcggccgcagcugcuccacgaccuacaaggggguguacgagcuccagacccuggagcuggacauggccagccucaacaugaccaugccgcuguccugcacgaagaacaacagccaccacuacaucauggucggcaacgagaccggccuggagcucacccugaccaacacguccaucaucaaccacaaguucugcaaccugagcgacgcccacaagaagaaccucuacgaccacgcccugauguccaucaucagcaccuuccaccuguccauccccaacuucaaccaguacgaggccaugagcugcgacuucaacgggggcaagaucuccgugcaguacaaccucagccacaccuacgcgguggacgccgccaaccacugcgggaccgucgccaacggcgugcugcagacguucaugcggauggcguggggcggguccuacaucgcccuggacagcggcaagggguccugggacugcaucaugaccagcuaccaguaccucaucauccagaacaccaccugggaggaccacugccaguucucccgccccagccccaucggcuaccuggggcugcucagccagcggacgcgcgacaucuacaucucccggcgccugcugggcaccuucaccuggacccucagcgacuccgagggcaacgagacgcccgggggcuacugccugacccgguggaugcugaucgaggccgagcucaagugcuucgggaacaccgccguggccaagugcaacgagaagcacgacgaggaguucugcgacaugcugcgccuguucgacuucaacaagcaggcgauccggcgccucaagaccgaggcccagaugagcauccagcugaucaacaaggccgucaacgcccugaucaacgaccagcucaucaugaagaaccaccuccgggacaucaugggcauccccuacugcaacuacuccaaguacugguaccugaaccacacggugaccgggaagaccagccugccccgcugcuggcugguguccaacggcagcuaccugaacgagacccacuucuccgacgacaucgagcagcaggccgacaacaugaucacggagcuccugcagaaggaguacauggaccggcagggcaagaccccgcuggggcucgucgaccuguucguguucagcaccuccuucuaccugaucagcaucuuccugcaccucgugaagaucccgacccaccgccacgucaucggcaagcccugccccaagccccaccggcugaaccacauggggaucugcuccugcggccuguacaagcacccgggggugcccgugaaguggaagcgcuga

SEQ ID NO: 520 - RNA, 1473 nt, Artificial Sequence
  derived and/or modified protein sequence (opt1) from LASV(ISTH0047-NIG-2011;Clade II)__AIT17412__GPC
augggccagaucaucaccuucuuccaggaggugccccacgucaucgaggaggugaugaacaucgugcugaucgcccucagccugcuggccauccucaaggggaucuacaacgucgcgaccugcggccuguucgggcugguguccuuccuccugcugugcggccgcagcugcuccacgaccuacaaggggguguacgagcuccagacccuggagcuggacauggccagccucaacaugaccaugccgcuguccugcacgaagaacaacagccaccacuacaucauggucggcaacgagaccggccuggagcucacccugaccaacacguccaucaucaaccacaaguucugcaaccugagcgacgcccacaagaagaaccucuacgaccacgcccugauguccaucaucagcaccuuccaccuguccauccccaacuucaaccaguacgaggccaugagcugcgacuucaacgggggcaagaucuccgugcaguacaaccucagccacgcguacgccguggacgccgccaaccacugcgggaccaucgcgaacggcguccugcagaccuucaugcggauggccuggggcggguccuacaucgcccuggacagcggcaagggguccugggacugcaucaugacgagcuaccaguaccucaucauccagaacaccuccugggaggaccacugccaguucagccgccccagccccaucggcuaccuggggcugcucucccagcggacccgcgacaucuacaucagccggcgccugcugggcaccuucacguggacccucuccgacagcgagggcaacgagacccccgggggcuacugccugacccgguggaugcugaucgaggccgagcucaagugcuucgggaacacggccguggcgaagugcaacgagaagcacgacgaggaguucugcgacaugcugcgccuguucgacuucaacaagcaggccauccggcgccucaagaccgaggcccagauguccauccagcugaucaacaaggccgugaacgcccugaucaacgaccagcucaucaugaagaaccaccuccgggacaucaugggcauccccuacugcaacuacagcaaguacugguaccugaaccacaccgucaccgggaagacgucccugccccgcugcuggcuggugagcaacggcuccuaccugaacgagacccacuucagcgacgacaucgagcagcaggcggacaacaugaucaccgagcuccugcagaaggaguacaucgaccggcagggcaagaccccgcuggggcucguggaccuguucgucuucuccacgagcuucuaccugaucuccaucuuccugcaccucgugaagaucccgacccaccgccacgugaucggcaagcccugccccaagccccaccggcugaaccacauggggaucugcagcugcggccuguacaagcacccggggguccccgugaaguggaagcgcuga

SEQ ID NO: 521 - RNA, 1473 nt, Artificial Sequence
  derived and/or modified protein sequence (opt1) from LASV(ISTH0073-NIG-2011;Clade II)__AIT17416__GPC
augggccagaucaucaccuucuuccaggaggugccccacgucaucgaggaggugaugaacaucgugcugaucgcccucagccugcuggccauccucaaggggaucuacaacgucgcgaccugcggccuguucgggcugguguccuuccuccugcugugcggccgcagcugcuccacgaccuacaaggggguguacgagcuccagacccuggagcuggacauggccagccucaacaugaccaugccgcuguccugcacgaagaacaacagccaccacuacaucauggucggcaacgagaccggccuggagcucacccugaccaacacguccaucaucaaccacaaguucugcaaccugagcgacgcccaccggaagaaccucuacgaccacgcccugauguccaucaucagcaccuuccaccuguccauccccaacuucaaccaguacgaggccaugagcugcgacuucaacgggggcaagaucuccgugcaguacaaccucagccacgcguacgccguggacgccgccaaccacugcgggaccaucgcgaacggcguccugcagaccuucaugcgcauggccuggggcggguccuacaucgcccuggacagcggcaagggguccugggacugcaucaugacgagcuaccaguaccucaucauccagaacaccuccugggaggaccacugccaguucagccggcccagccccaucggcuaccuggggcugcucucccagcgcacccgggacaucuacaucagccgccggcugcugggcaccuucacguggacccucuccgacagcgagggcaacgagacccccgggggcuacugccugacccgcuggaugcugaucgaggccgagcucaagugcuucgggaacacggccguggcgaagugcaacgagaagcacgacgaggaguucugcgacaugcugcggcuguucgacuucaacaagcaggccauccgccggcucaagaccgaggcccagauguccauccagcugaucaacaaggccgugaacgcccugaucaacgaccagcucaucaugaagaaccaccuccgcgacaucaugggcauccccuacugcaacuacagcaaguacugguaccugaaccacaccgucaccgggaagacgucccugccccggugcuggcuggugagcaacggcuccuaccugaacgagacccacuucagcgacgacaucgagcagcaggcggacaacaugaucaccgagcuccugcagaaggaguacaucgaccgccagggcaagaccccgcuggggcucguggaccuguucgucuucuccacgagcuucuaccugaucuccaucuuccugcaccucgugaagaucccgacccaccggcacgugaucggcaagcccugccccaagccccaccgccugaaccacauggggaucugcagcugcggccuguacaagcacccggggguccccgugaaguggaagcgguga

SEQ ID NO: 522 - RNA, 1473 nt, Artificial Sequence
  derived and/or modified protein sequence (opt1) from LASV(ISTH0230-NIG-2011;Clade II)__AIT17420__GPC
augggccagaucaucaccuucuuccaggaggugccccacgucaucgaggaggugaugaacaucgugcugaucgcccucagccugcuggccauccucaaggggaucuacaacgucgcgaccugcggccuguucgggcugguguccuuccuccugcugugcggccgcagcugcuccacgaccuacaaggggguguacgagcuccagacccuggagcuggacauggccagccucaacaugaccaugccgcuguccugcacgaagaacaacagccaccacuacaucauggucggcaacgagaccggccuggagcucacccugaccaacacguccaucaucaaccacaaguucugcaaccugagcgacgcccacaagaagaaccucuacgaccacgcccugauguccaucaucagcaccuuccaccuguccauccccaacuucaaccaguacgaggccaugagcugcgacuucaacgggggcaagaucuccgugcaguacaaccucagccacaccuacgcgguggacgccgccaaccacugcgggaccaucgccaacggcguccugcagacguucaugcggauggcguggggcggguccuacaucgcccuggacagcggcaagggguccugggacugcaucaugaccagcuaccaguaccucaucauccagaacaccaccugggaggaccacugccaguucucccgccccagccccaucggcuaccuggggcugcucagccagcggacgcgcgacaucuacaucucccggcgccugcugggcaccuucaccuggacccucagcgacuccgagggcaacgagacgcccgggggcuacugccugacccgguggaugcugaucgaggccgagcucaagugcuucgggaacaccgccguggccaagugcaacgagaagcacgacgaggaguucugcgacaugcugcgccuguucgacuucaacaagcaggcgauccggcgccucaagaccgaggcccagaugagcauccagcugaucaacaaggccgugaacgcccugaucaacgaccagcucaucaugaagaaccaccuccgggacaucaugggcauccccuacugcaacuacuccaaguacugguaccugaaccacacggucaccgggaagaccagccugccccgcugcuggcugguguccaacggcagcuaccugaacgagacccacuucuccgacgacaucgagcagcaggccgacaacaugaucacggagcuccugcagaaggaguacauggaccggcagggcaagaccccgcuggggcucguggaccuguucgucuucagcaccuccuucuaccugaucagcaucuuccugcaccucaucaagaucccgacccaccgccacaucacgggcaagcccugccccaagccccaccggcugaaccacauggggaucugcuccugcggccuguacaagcacccgggggugcccgugaaguggaagcgcuga

SEQ ID NO: 523 - RNA, 1473 nt, Artificial Sequence
  derived and/or modified protein sequence (opt1) from LASV(ISTH0531-NIG-2011;Clade II)__AIT17424__GPC
augggccagaucaucaccuucuuccaggaggugccccacgucaucgaggaggugaugaacaucgugcugaucgcccucagccugcuggccauccucaaggggaucuacaacgucgcgaccugcggccuguucgggcugguguccuuccuccugcugugcggccgcagcugcuccacgaccuacaaggggguguacgagcuccagacccuggagcuggacaugaccaaccucaacaugacgaugccgcugagcugcaccaagaacaacucccaccacuacaucauggucggcaacgagaccggccuggagcucacccugacgaacaccagcaucaucaaccacaaguucugcaaccuguccgacgcccacaagaagaaccucuacaaccacgcccugaugagcaucaucuccaccuuccaccugagcauccccaacuucaaccaguacgaggccauguccugcgacuucaacgggggcaagaucagcgugcaguacaaccucucccacgccuacgcgguggacgccgccaaccacugcgggaccaucgccaacggcguccugcagacguucaugcggauggcguggggcgggagcuacaucgcccuggacuccggcaaggggagcugggacugcaucaugaccuccuaccaguaccucaucauccagaacaccaccugggaggaccacugccaguucagccgccccucccccaucggcuaccuggggcugcucagccagcggacgcgcgacaucuacaucagccggcgccugcugggcaccuucaccuggacccucuccgacagcgagggcaacgagacgcccgggggcuacugccugacccgguggaugcugaucgaggccgagcucaagugcuucgggaacaccgccguggccaagugcaacgagaagcacgacgaggaguucugcgacaugcugcgccuguucgacuucaacaagcaggcgauccggcgccucaagaccgaggcccagacgaacauccagcugaucaacaaggccgugaacgcccugaucaacgaccagcucaucaugaagaaccaccuccgggacaucaugggcauccccuacugcaacuacuccaaguacugguaccugaaccacaccgucaccgggaagaccagccugccccgcugcuggcugguguccaacggcagcuaccugaacgagacgcacuucuccgacgacaucgagcagcaggccgacaacaugaucaccgagcuccugcagaaggaguacauggaccggcagggcaagaccccgcuggggcucguggaccuguucgucuucagcaccuccuucuaccugaucagcaucuuccugcaccucgugaagaucccgacgcaccgccacaucaucggcaagcccugccccaagccccaccggcugaaccacauggggaucugcuccugcggccuguacaagcacccgggggugcccgucaaguggaagcgcuga

SEQ ID NO: 524 - RNA, 1473 nt, Artificial Sequence
  derived and/or modified protein sequence (opt1) from LASV(ISTH0595-NIG-2011;Clade II)__AIT17428__GPC
augggccagaucaucaccuucuuccaggaggugccccacgucaucgaggaggugaugaacaucgugcugaucgcccucagccugcuggccauccucaaggggaucuacaacgucgcgaccugcggccuguucgggcugguguccuuccuccugcugugcggccgcagcugcuccacgaccuacaaggggguguacgagcuccagacccuggagcuggacauggccagccucaacaugaccaugccgcuguccugcacgaagaacaacagccaccacuacaucauggucggcaacgagaccggccuggagcucacccugaccaacacguccaucaucaaccacaaguucugcaaccugagcgacgcccacaagaagaaccucuacgaccacgcccugauguccaucaucagcaccuuccaccuguccauccccaacuucaaccaguacgaggccaugagcugcgacuucaacgggggcaagaucuccgugcaguacaaccucagccacaccuacgcgguggacgccgccaaccacugcgggaccaucgccaacggcguccugcagacguucaugcggauggcguggggcggguccuacaucgcccuggacagcggcaagggguccugggacugcaucaugaccagcuaccaguaccucaucauccagaacaccaccugggaggaccacugccaguucucccgccccagccccaucggcuaccuggggcugcucagccagcggacgcgcgacaucuacaucucccggcgccugcugggcaccuucaccuggacccucagcgacuccgagggcaacgagacgcccgggggcuacugccugacccgguggaugcugaucgccgccgaccucaagugcuucgggaacaccgccguggcgaagugcaacgagaagcacgacgaggaguucugcgacaugcugcgccuguucgacuucaacaagcaggccaucgagcggcucaagaccgaggcccagaugagcauccagcugaucaacaaggccgugaacgcccugaucaacgaccagcucaucaugaagaaccaccuccgcgacaucaugggcauccccuacugcaacuacuccaaguacugguaccugaaccacacggucaccgggcggaccagccugccccgcugcuggcugguguccaacggcagcuaccugaacgagacccacuucuccgacgacaucgagcagcaggcggacaacaugaucacggagcuccugcagaaggaguacauggaccggcagggcaagaccccgcuggggcucguggaccuguucgucuucagcaccuccuucuaccugaucagcaucuuccugcaccucgugcgcaucccgacccaccggcacgugaucggcaagcccugccccaagccccaccgccugaaccacauggggaucugcuccugcggccuguacaagcacccggggguccccgugaaguggaagcgguga

SEQ ID NO: 525 - RNA, 1473 nt, Artificial Sequence
  derived and/or modified protein sequence (opt1) from LASV(ISTH0964-NIG-2011;Clade II)__AIT17430__GPC
augggccagaucaucaccuucuuccaggaggugccccacgucaucgaggaggugaugaacaucgugcugaucgcccucagccugcuggccauccucaaggggaucuacaacgucgcgaccugcggccuguucgggcugguguccuuccuccugcugugcggccgcagcugcuccacgaccuacaaggggguguacgagcuccagacccuggagcuggacauggccagccucaacaugaccaugccgcuguccugcacgaagaacaacagccaccacuacaucauggucggcaacgagaccggccuggagcucacccugaccaacacguccaucaucaaccacaaguucugcaaccugagcgacgcccacaagaagaaccucuacgaccacgcccugauguccaucaucagcaccuuccaccuguccauccccaacuucaaccaguacgaggccaugagcugcgacuucaacgggggccggaucuccgugcaguacaaccucagccacaccuacgcgguggacgccgccaagcacugcgggaccaucgccaacggcguccugcagacguucaugcgcauggcguggggcggguccuacaucgcccuggacagcggcaagggguccugggacugcaucaugaccagcuaccaguaccucaucauccagaacaccaccugggaggaccacugccaguucucccggcccagccccaucggcuaccuggggcugcucagccagcgcacgcgggacaucuacaucucccgccggcugcugggcaccuucaccuggacccucagcgacuccgagggcaacgagacgcccgggggcuacugccugacccgcuggaugcugaucgaggccgagcucaagugcuucgggaacaccgccguggccaagugcaacgagaagcacgacgaggaguucugcgacaugcugcggcuguucgacuucaacaagcaggcgauccgccggcucaagaccgaggcccagaugagcauccagcugaucaacaaggccgugaacgcccugaucaacgaccagcucaucaugaagaaccaccuccgcgacaucaugggcauccccuacugcaacuacuccaaguacugguaccugaaccacacggucaccgggaagaccagccugccccggugcuggcugguguccaacggcagcuaccugaacgagacccacuucuccgacgacaucgagcagcaggccgacaacaugaucacggagcuccugcagaaggaguacaucgaccgccagggcaagaccccgcuggggcucguggaccuguucgucuucagcaccuccuucuaccugaucagcaucuuccugcaccucgugaagaucccgacccaccggcacgugaucggcaagcccugccccaagccccaccgccugaaccacauggggaucugcuccugcggccuguacaagcacccggggguccccgugaaguggaagcgguga

SEQ ID NO: 526 - RNA, 1473 nt, Artificial Sequence
  derived and/or modified protein sequence (opt1) from LASV(ISTH1038-NIG-2011;Clade II)__AIT17438__GPC
augggccagaucaucaccuucuuccaggaggugccccacgucaucgaggaggugaugaacaucgugcugaucgcccucagccugcuggccauccucaaggggaucuacaacgucgcgaccugcggccuguucgggcugguguccuuccuccugcugugcggccgcagcugcuccacgaccuacaaggggguguacgagcuccagacccuggagcuggacauggccaaccucaacaugaccaugccgcugagcugcacgaagaacaacucccaccacuacauccgggucggcaacgagaccggccuggagcucacccugaccaacacgagcaucaucucccacaaguucugcaaccugagcgacgcccacaagaagaaccucuacgaccacgcccugauguccaucaucagcaccuuccaccuguccauccccaacuucaaccaguacgaggccaugagcugcgacuucaacgggggcaagaucuccgugcaguacaaccucagccacaccuacgcgguggacgccgccaaccacugcgggaccaucgccaacggcguccugcagacguucaugcgcauggcguggggcggguccuacaucgcccuggacagcggcaagggguccugggacugcaucaugaccagcuaccaguaccucaucauccagaacaccaccugggaggaccacugccaguucucccggcccagccccaucggcuaccuggggcugcucagccagcgcacgcgggacaucuacaucucccgccggcugcugggcaccuucaccuggacccucagcgacuccgagggcaaggagacgcccgggggcuacugccugacccgcuggaugcugaucgaggccgagcucaagugcuucgggaacaccgccguggccaagugcaacgagaagcacgacgaggaguucugcgacaugcugcggcuguucgacuucaacaagcaggcgauccgccggcucaagaccgaggcccagaugaacauccagcugaucaacaaggccgugaacgcccugaucaacgaccagcucaucaugaagaaccaccuccgcgacaucaugggcauccccuacugcaacuacagcaaguacugguaccugaaccacacggucaccgggaagaccucccugccccggugcuggcuggugagcaacggcuccuaccugaacgagacccacuucagcgacgacaucgagcagcaggccgacaacaugaucacggagcuccugcagaaggaguacaucgaccgccagggcaagaccccgcuggggcucguggaccuguucgucuucuccaccagcuucuaccugaucuccaucuuccugcaccucgugaagaucccgacccaccggcacgugaucggcaagcccugccccaagccccaccgccugaaccagauggggaucugcagcugcggccuguacaagcagccggggguccccgugaaguggaagcgguga

SEQ ID NO: 527 - RNA, 1473 nt, Artificial Sequence
  derived and/or modified protein sequence (opt1) from LASV(ISTH1048-NIG-2011;Clade II)__AIT17442__GPC
augggccagaucaucaccuucuuccaggaggugccccacgucaucgaggaggugaugaacaucgugcugaucgcccucagccugcuggccauccucaaggggaucuacaacgucgcgaccugcggccuguucgggcugguguccuuccuccugcugugcggccgcagcugcuccacgaccuacaaggggguguacgagcuccagacccuggagcuggacauggccagccucaacaugaccaugccgcuguccugcacgaagaacaacagccaccacuacaucauggucggcaacgagaccggccuggagcucacccugaccaacacguccaucaucaaccacaaguucugcaaccugagcgacgcccaccggaagaaccucuacgaccacgcccugauguccaucaucagcaccuuccaccuguccauccccaacuucaaccaguacgaggccaugagcugcgacuucaacgggggcaagaucuccgugcaguacaaccucagccacgcguacgccguggacgccgccaaccacugcgggaccaucgcgaacggcguccugcagaccuucaugcgcauggccuggggcggguccuacaucgcccuggacagcggcaagggguccugggacugcaucaugacgagcuaccaguaccucaucauccagaacaccuccugggaggaccacugccaguucagccggcccagccccaucggcuaccuggggcugcucucccagcgcacccgggacaucuacaucagccgccggcugcugggcaccuucacguggacccucuccgacagcgagggcaacgagacccccgggggcuacugccugacccgcuggaugcugaucgaggccgagcucaagugcuucgggaacacggccguggcgaagugcaacgagaagcacgacgaggaguucugcgacaugcugcggcuguucgacuucaacaagcaggccauccgccggcucaagaccgaggcccagauguccauccagcugaucaacaaggccgugaacgcccugaucaacgaccagcucaucaugaagaaccaccuccgcgacaucaugggcauccccuacugcaacuacagcaaguacugguaccugaaccacaccgucaccgggaagacgucccugccccggugcuggcuggugagcaacggcuccuaccugaacgagacccacuucagcgacgacaucgagcagcaggcggacaacaugaucaccgagcuccugcagaaggaguacaucgaccgccagggcaagaccccgcuggggcucguggaccuguucgucuucuccacgagcuucuaccugaucuccaucuuccugcaccucgugaagaucccgacccaccggcacgugaucggcaagcccugccccaagccccaccgcaucaaccacauggggaucugcagcugcggccuguacaagcacccggggguccccgugaaguggaagcgguga

SEQ ID NO: 528 - RNA, 1473 nt, Artificial Sequence
  derived and/or modified protein sequence (opt1) from LASV(ISTH1058-NIG-2011;Clade II)__AIT17446__GPC
augggccagaucaucaccuucuuccaggaggugccccacgucaucgaggaggugaugaacaucgugcugaucgcccucagccugcuggccauccucaaggggaucuacaacgucgcgaccugcggccuguucgggcugguguccuuccuccugcugugcggccgcagcugcuccacgaccuacaaggggguguacgagcuccagacccuggagcuggacauggccagccucaacaugaccaugccgcuguccugcacgaagaacaacagccaccacuacaucauggucggcaacgagaccggccuggagcucacccugaccaacacguccaucaucaaccacaaguucugcaaccugagcgacgcccacaagaagaaccucuacgaccacgcccugauguccaucaucagcaccuuccaccuguccauccccaacuucaaccaguacgaggccaugagcugcgacuucaacgggggcaagaucuccgugcaguacaaccucagccacaccuacgcgguggacgccgccucccacugcgggaccgucgccaacggcgugcugcagacguucaugcggauggcguggggcgggagcuacaucgcccuggacuccggcaaggggagcugggacugcaucaugaccuccuaccaguaccucaucauccagaacaccaccugggaggaccacugccaguucagccgccccagccccaucggcuaccuggggcugcucucccagcggacgcgcgacaucuacaucagccggcgccugcugggcaccuucaccuggacccucuccgacagcgagggcaacgagacgcccgggggcuacugccugacccgguggaugcugaucgaggccgagcucaagugcuucgggaacaccgccguggccaagugcaacgagaagcacgacgaggaguucugcgacaugcugcgccuguucgacuucaacaagcaggcgauccggcgccucaagaccgaggcccagauguccauccagcugaucaacaaggccgucaacgcccugaucaacgaccagcucaucaugaagaaccaccuccgggacaucaugggcauccccuacugcaacuacagcaaguacugguaccugaaccacacggugaccgggaagaccucccugccccgcugcuggcuggugagcaacggcuccuaccugaacgagacccacuucagcgacgacaucgagcagcaggccgacaacaugaucacggagcuccugcagaaggaguacauggaccggcagggcaagaccccgcuggggcucgucgaccuguucguguucuccaccagcuucuaccugaucuccaucuuccugcaccucgugaagaucccgacccaccgccacgucaucggcaagcccugccccaagccccaccggcugaaccacauggggaucugcagcugcggccuguacaagcacccgggggugcccgugaaguggaagcgcuga

SEQ ID NO: 529 - RNA, 1473 nt, Artificial Sequence
  derived and/or modified protein sequence (opt1) from LASV(ISTH1064-NIG-2011;Clade II)__AIT17450__GPC
augggccagaucaucaccuucuuccaggaggugccccacgucaucgaggaggugaugaacaucgugcugaucgcccucagccugcuggccauccucaaggggaucuacaacgucgcgaccugcggccuguucgggcugguguccuuccuccugcugugcggccgcagcugcuccacgaccuacaaggggguguacgagcuccagacccuggagcuggacauggccagccucaacaugaccaugccgcuguccugcacgaagaacaacagccaccacuacaucauggucggcaacgagaccggccuggagcucacccugaccaacacguccaucaucaaccacaaguucugcaaccugagcgacgcccacaagaagaaccucuacgaccacgcccugauguccaucaucagcaccuuccaccuguccauccccaacuucaaccaguacgaggccaugagcugcgacuucaacgggggcaagaucuccgugcaguacaaccucagccacaccuacgcgguggacgccgccaaccacugcgggaccaucgccaacggcguccugcagacguucaugcggauggcguggggcggguccuacaucgcccuggacagcggcaagggguccugggacugcaucaugaccagcuaccaguaccucaucauccagaacaccaccugggaggaccacugccaguucucccgccccagccccaucggcuaccuggggcugcucagccagcggacgcgcgacaucuacaucucccggcgccugcugggcaccuucaccuggacccucagcgacuccgagggcaacgagacgcccgggggcuacugccugacccgguggaugcugaucgaggccgagcucaagugcuucgggaacaccgccguggccaagugcaacgagaagcacgacgaggaguucugcgacaugcugcgccuguucgacuucaacaagcaggcgauccggcgccucaagaccgaggcccagaugagcauccagcugaucaacaaggccgugaacgcccugaucaacgaccagcucaucaugaagaaccaccuccgggacaucaugggcauccccuacugcaacuacuccaaguacugguaccugaaccacacggucaccgggaagaccagccugccccgcugcuggcugguguccaacggcagcuaccugaacgagacccacuucuccgacgacaucgagcagcaggccgacaacaugaucacggagcuccugcagaaggaguacaucgaccggcagggcaagaccccgcuggggcucguggaccuguucgucuucagcaccuccuucuaccugaucagcaucuuccugcaccucgugaagaucccgacccaccgccacaucaucggcaagcccugccccaagccccaccggcugaaccacauggggaucugcuccugcggccuguacaagcacccgggggugcccgucaaguggaagcgcuga

SEQ ID NO: 530 - RNA, 1473 nt, Artificial Sequence
  derived and/or modified protein sequence (opt1) from LASV(ISTH1069-NIG-2011;Clade II)__AIT17454__GPC
augggccagaucaucaccuucuuccaggaggugccccacgucaucgaggaggugaugaacaucgugcugaucgccuucagccuccuggccauccugaaggggaucuacaacgucgcgaccugcggccucuucgggcugguguccuuccugcuccugugcggccgcagcugcuccaccaccuacaaggggguguacgagcugcagacccucgagcuggacauggccagccugaacaugaccaugccgcucuccugcacgaagaacaacagccaccacuacaucauggucggcaacgagaccggccuggagcugacccucaccaacacguccaucaucaaccacaaguucugcaaccugagcgacgcccacaagcggaaccuguacgaccacgcccucauguccaucaucagcaccuuccaccuguccauccccaacuucaaccaguacgaggccaugagcugcgacuucaacgggggcaagaucuccgugcaguacaaccugagccacaccuacgcgguggacgccgccgggcacugcggcaccaucgccaacgggguccuccagacguucaugcgcauggcguggggcggcuccuacaucgcccuggacagcgggaagggcuccugggacugcaucaugaccagcuaccaguaccugaucauccagaacaccaccugggaggaccacugccaguucucccggcccagccccaucggguaccucggccugcugagccagcgcacgcgggacaucuacaucucccgccggcuccugggcaccuucaccuggacccugagcgacuccgaggggaacgagacgccgggcggguacugccucacccgcuggaugcugaucgaggccgagcugaagugcuucggcaacaccgccguggccaagugcaacgagaagcacgacgaggaguucugcgacaugcuccggcuguucgacuucaacaagcaggcgauccgccggcugaagaccgaggcccagaugagcauccagcucaucaacaaggccgugaacgcccugaucaacgaccagcugaucaugaagaaccaccuccgcgacaucauggggauccccuacugcaacuacuccaaguacugguaccugaaccacacgaucaccggcaagaccagccugccccggugcuggcucgucuccaacggcagcuaccugaacgagacccacuucuccgacgacaucgagcagcaggccgacaacaugaucacggagcugcuccagaaggaguacauggaccgccaggggaagacgccccugggccugguggaccucuucguguucagcaccuccuucuaccugaucagcaucuuccugcaccuggucaagaucccgacccaccggcacaucaucgggaagcccugccccaagccccaccgccucaaccacaugggcaucugcuccugcgggcuguacaagcacccgggcgugcccgugcgguggaagcgcuga

SEQ ID NO: 531 - RNA, 1473 nt, Artificial Sequence
  derived and/or modified protein sequence (opt1) from LASV(ISTH1096-NIG-2012;Clade II)__AIT17458__GPC
augggccagaucaucaccuucuuccaggaggugccccacgucaucgaggaggugaugaacaucgugcugaucgcccucagccugcuggccauccucaaggggaucuacaacgucgcgaccugcggccuguucgggcugguguccuuccuccugcugugcggccgcagcugcuccacgaccuacaaggggguguacgagcuccagacccuggagcuggacauggccagccucaacaugaccaugccgcuguccugcacgaagaacaacagccaccacuacaucauggucggcaacgagaccggccuggagcucacccugaccaacacguccaucaucaaccacaaguucugcaaccugagcgacgcccacaagaagaaccucuacgaccacgcccugauguccaucaucagcaccuuccaccuguccauccccaacuucaaccaguacgaggccaugagcugcgacuucaacgggggcaagaucuccgugcaguacaaccucagccacaccuacgcgaucgacgccgccaaccacugcgggaccaucgccaacggcgugcugcagacguucaugcggauggcguggggcggguccuacaucgcccuggacagcggcaagggguccugggacugcaucaugaccaccuaccaguaccucaucauccagaacaccacgugggaggaccacugccaguucagccgccccucccccaucggcuaccuggggcugcucagccagcggacccgcgacaucuacaucagccggcgccugcugggcaccuucaccuggacgcucuccgacagcgagggcaacgagacccccgggggcuacugccugacccgguggaugcugaucgaggccgagcucaagugcuucgggaacaccgccgucgccaagugcaacgagaagcacgacgaggaguucugcgacaugcugcgccuguucgacuucaacaagcaggcgauccggcgccucaagacggaggcccagauguccauccagcugaucaacaaggccgugaacgcccugaucaacgaccagcucaucaugaagaaccaccuccgggacaucaugggcauccccuacugcaacuacagcaaguacugguaccugaaccacaccgugaccgggaagaccucccugccccgcugcuggcuggucagcaacggcuccuaccugaacgagacgcacuucagcgacgacaucgagcagcaggccgacaacaugaucaccgagcuccugcagaaggaguacauggaccggcagggcaagaccccgcuggggcucguggaccuguucguguucuccaccagcuucuaccugaucuccaucuuccugcaccucgucaagaucccgacgcaccgccacgugaucggcaagcccugccccaagccccaccggcugaaccacauggggaucugcagcugcggccuguacaagcacccgggggugcccgucaaguggaagcgcuga

SEQ ID NO: 532 - RNA, 1473 nt, Artificial Sequence
  derived and/or modified protein sequence (opt1) from LASV(ISTH1107-NIG-2012;Clade II)__AIT17462__GPC
augggccagaucaucaccuucuuccaggaggugccccacgucaucgaggaggugaugaacaucgugcugaucgcccucagccugcuggccauccucaaggggaucuacaacgucgcgaccugcggccuguucgggcugguguccuuccuccugcugugcggccgcagcugcuccacgaccuacaaggggguguacgagcuccagacccuggagcuggacauggccagccucaacaugaccaugccgcuguccugcacgaagaacaacagccaccacuacaucauggucggcaacgagaccggccuggagcucacccugaccaacacguccaucaucaaccacaaguucugcaaccugagcgacgcccacaagaagaaccucuacgaccacgcccugauguccaucaucagcaccuuccaccuguccauccccaacuucaaccaguacgaggccaugagcugcgacuucaacgggggcaagaucuccgugcaguacaaccucagccacgcguacgccguggacgccgccaaccacugcgggaccaucgcgaacggcguccugcagaccuucaugcggauggccuggggcggguccuacaucgcccuggacagcggcaagggguccugggacugcaucaugacgagcuaccaguaccucaucauccagaacaccaccugggaggaccacugccaguucucccgccccagccccaucggcuaccuggggcugcucagccagcggacccgcgacaucuacaucucccggcgccugcugggcacguucaccuggacccucagcgacuccgagggcaacgagacccccgggggcuacugccugacgcgguggaugcugaucgaggccgagcucaagugcuucgggaacaccgccguggcgaagugcaacgagaagcacgacgaggaguucugcgacaugcugcgccuguucgacuucaacaagcaggccauccggcgccucaagaccgaggcccagaugagcauccagcugaucaacaaggccgugaacgcccugaucaacgaccagcucaucaugaagaaccaccuccgggacaucaugggcaucccguacugcaacuacuccaaguacugguaccugaaccacaccgucacggggaagaccagccugcccaagugcuggcugguguccaacggcagcuaccugaacgagacccacuucuccgacgacaucgagcagcaggcggacaacaugaucaccgagcuccugcagaaggaguacaucgaccgccagggcaagacgccccuggggcucguggaccuguucgucuucagcaccuccuucuaccugaucagcaucuuccugcaccucgugaagaucccgacccaccggcacgugaucggcaagcccugccccaagccccaccgccugaaccacauggggaucugcuccugcggccuguacaagcacccggggguccccgugaaguggaagcgguga

SEQ ID NO: 533 - RNA, 1473 nt, Artificial Sequence
  derived and/or modified protein sequence (opt1) from LASV(ISTH1111-NIG-2011;Clade II)__AIT17466__GPC
augggccagaucaucaccuucuuccaggaggugccccaggucaucgaggaggugaugaacaucgugcugaucgcccucagccugcuggccauccucaaggggaucuacaacgucgcgaccugcggccuguucgggcugguguccuuccuccugcugugcggccgcagcugcuccacgaccuacaaggggguguacgagcuccagacccuggagcuggacauggccagccucaacaugaccaugccgcuguccugcacgaagaacaacagccaccacuacaucauggucggcaacgagaccggccuggagcucacccugaccaaccaguccaucaucaaccacaaguucugcaaccugagcgacgcccacaagaagaaccucuacgaccacgcccugauguccaucaucagcacguuccaccuguccauccccaacuucaaccaguacgaggccaugagcugcgacuucaacgggggcaagaucuccgugcaguacaaccucagccacaccuucgcgguggacgccgccaaccacugcgggaccaucgccaacggcguccugcagaccuucaugcggauggcguggggcggguccuacaucgcccuggacagcggccgcggguccugggacugcaucaugacgagcuaccaguaccucaucauccagaacaccaccugggaggaccacugccaguucucccggcccagccccaucggcuaccuggggcugcucagccagcgcacccgggacaucuacaucucccgccggcugcugggcacguucaccuggacccucagcgacuccgagggcaacgagacccccgggggcuacugccugacgcgcuggaugcugaucgaggccgagcucaagugcuucgggaacaccgccguggccaagugcaacgagaagcacgacgaggaguucugcgacaugcugcggcuguucgacuucaacaagcaggcgauccgccggcucaagaccgaggcccagaugagcauccagcugaucaacaaggccgugaacgcccugaucaacgaccagcucaucaugaagaaccaccuccgcgacaucaugggcaucccguacugcaacuacuccaaguacugguaccugaaccacaccaucacggggaagaccagccugccccggugcuggcuggucuccaacggcagcuaccugaacgagacccacuucuccgacgacaucgagcagcaggccgacaacaugaucaccgagcuccugcagaaggaguacauggaccgccagggcaagacgccccuggggcucguggaccuguucguguucagcaccuccuucuaccugaucagcaucuuccugcaccucgucaagaucccgacccaccggcacgugaucggcaagcccugccccaagccccaccgccugaaccacauggggaucugcuccugcggccuguacaagcacccgggggugcccgucaaguggaagcgguga

SEQ ID NO: 534 - RNA, 1473 nt, Artificial Sequence
  derived and/or modified protein sequence (opt1) from LASV(ISTH1121-NIG-2012;Clade II)__AIT17470__GPC
augggccagaucaucaccuucuuccaggaggugccccacgucaucgaggaggugaugaacaucgugcugaucgcccucagccugcuggccauccucaaggggaucuacaacgucgcgaccugcggccuguucgggcugguguccuuccuccugcugugcggccgcagcugcuccacgaccuacaaggggguguacgagcuccagacccuggagcuggacauggccagccucaacaugaccaugccgcuguccugcacgaagaacaacagccaccacuacaucauggucggcaacgagaccggccuggagcucacccugaccaacacguccaucaucaaccacaaguucugcaaccugagcgacgcccaccggaagaaccucuacgaccacgcccugauguccaucaucagcaccuuccaccuguccauccccaacuucaaccaguacgaggccaugagcugcgacuucaacgggggcaagaucuccgugcaguacaaccucagccacaccuacgcgguggacgccgccaaccacugcgggaccaucgccaacggcguccugcagacguucaugcgcauggcguggggcggguccuacaucgcccuggacagcggcaagggguccugggacugcaucaugaccagcuaccaguaccucaucauccagaacaccaccugggaggaccacugccaguucucccggcccagccccaucggcuaccuggggcugcucagccagcgcacgcgggacaucuacaucucccgccggcugcugggcaccuucaccuggacccucagcgacuccgagggcaacgagacgcccgggggcuacugccugacccgcuggaugcugaucgaggccgagcucaagugcuucgggaacaccgccguggccaagugcaacgagaagcacgacgaggaguucugcgacaugcugcggcuguucgacuucaacaagcaggcgauccgccggcucaagaccgaggcccagaugagcauccagcugaucaacaaggccgugaacgcccugaucaacgaccagcucaucaugaagaaccaccuccgcgacaucaugggcauccccuacugcaacuacuccaaguacugguaccugaaccacacggucaccgggaagaccagccugccccggugcuggcugguguccaacggcagcuaccugaacgagacccacuucuccgacgacaucgagcagcaggccgacaacaugaucacggagcuccugcagaaggaguacaucgaccgccagggcaagaccccgcuggggcucguggaccuguucgucuucagcaccuccuucuaccugaucagcaucuuccugcaccucgugaagaucccgacccaccggcacgugaucggcaagcccugccccaagccccaccgccugaaccacauggggaucugcuccugcggccuguacaagcacccggggguccccgugaaguggaagcgguga

SEQ ID NO: 535 - RNA, 1473 nt, Artificial Sequence
  derived and/or modified protein sequence (opt1) from LASV(ISTH1129-NIG-2012;Clade II)__AIT17474__GPC
augggccagaucaucaccuucuuccaggaggugccccacgucaucgaggaggugaugaacaucgugcugaucgcccucagccugcuggccauccucaaggggaucuacaacgucgcgaccugcggccuguucgggcugguguccuuccuccugcugugcggccgcagcugcuccacgaccuacaaggggguguacgagcuccagacccuggagcuggacauggccagccucaacaugaccaugccgcuguccugcacgaagaacaacagccaccacuacaucauggucggcaacgagaccggccuggagcucacccugaccaacacguccaucaucaaccacaaguucugcaaccugagcgacgcccacaagaagaaccucuacgaccacgcccugauguccaucaucagcaccuuccaccuguccauccccaacuucaaccaguacgaggccaugagcugcgacuucaacgggggcaagaucuccauccaguacaaccucagccacaccuacgcgguggacgccgccaaccacugcgggaccaucgccaacggcgugcugcagacguucaugcggauggcguggggcggguccuacaucgcccuggacagcggcaagggguccugggacugcaucaugaccagcuaccaguaccucaucauccagaacaccaccugggaggaccacugccaguucucccgccccagccccaucggcuaccuggggcugcucagccagcggacgcgcgacaucuacaucucccggcgccugcugggcaccuucaccuggacccucagcgacuccgagggcaacgagacgcccgggggcuacugccugacccgguggaugcugaucgaggccgagcucaagugcuucgggaacaccgccgucgccaagugcaacgagaagcacgacgaggaguucugcgacaugcugcgccuguucgacuucaacaagcaggcgauccggcgccucaagaccgaggcccagaugagcauccagcugaucaacaaggccgugaacgcccugaucaacgaccagcucaucaugaagaaccaccuccgggacaucaugggcauccccuacugcaacuacuccaaguacugguaccugaaccacacgaucaccgggaagaccagccugccccgcugcuggcugguguccaacggcagcuaccugaacgagacccacuucuccgacgacaucgagcagcaggccgacaacaugaucacggagcuccugcagaaggaguacaucgaccggcagggcaagaccccgcuggggcucgucgaccuguucguguucagcaccuccuucuaccugaucagcaucuuccugcaccucgugaagaucccgacccaccgccacaucacgggcaagcccugccccaagccccaccggcugaaccacauggggaucugcuccugcggccuguacaagcacccggggguccccgugcgcuggaagcgguga

SEQ ID NO: 536 - RNA, 1473 nt, Artificial Sequence
  derived and/or modified protein sequence (opt1) from LASV(ISTH1137-NIG-2011;Clade II)__AIT17478__GPC
augggccagaucaucaccuucuuccaggaggugccccacgucaucgaggaggugaugaacaucgugcugaucgcccucagccugcuggccauccucaaggggaucuacaacgucgcgaccugcggccuguucgggcugguguccuuccuccugcugugcggccgcagcugcuccacgaccuacaaggggguguacgagcuccagacccuggagcuggacauggccagccucaacaugaccaugccgcuguccugcacgaagaacaacagccaccacuacaucauggucggcaacgagaccggccuggagcucacccugaccaacacguccaucaucaaccacaaguucugcaaccugagcgacgcccacaagaagaaccucuacgaccacgcccugauguccaucaucagcaccuuccaccuguccauccccaacuucaaccaguacgaggccaugagcugcgacuucaacgggggcaagaucuccgugcaguacaaccucagccacaccuacgcgguggacgccgccgaccacugcgggaccaucgccaacggcguccugcagacguucaugcggauggcguggggcggguccuacaucgcccuggacagcggcaagggguccugggacugcaucaugaccagcuaccaguaccucaucauccagaacaccaccugggaggaccacugccaguucucccgccccagccccaucggcuaccuggggcugcucagccagcggacgcgcgacaucuacaucucccggcgccugcugggcaccuucaccuggacccucagcgacuccgagggcaacgagacgcccgggggcuacugccugacccgguggaugcugaucgaggccgagcucaagugcuucgggaacaccgccguggccaagugcaacgagaagcacgacgaggaguucugcgacaugcugcgccuguucgacuucaacaagcaggcgaucagccggcucaagaccgaggcccagauguccauccagcugaucaacaaggccgugaacgcccugaucaacgaccagcucaucaugaagaaccaccuccgcgacaucaugggcauccccuacugcaacuacagcaaguacugguaccugaaccacacggucaccgggaagaccucccugccccggugcuggcuggugagcaacggcuccuaccugaacgagacccacuucagcgacgacaucgagcagcaggccgacaacaugaucacggagaugcuccagaaggaguacaucgaccgccagggcaagaccccgcuggggcugguggaccucuucgucuucuccaccagcuucuaccugaucuccaucuuccugcaccuggugaagaucccgacccaccggcacgugaucggcaagcccugccccaagccccaccgccucaaccacauggggaucugcagcugcggccuguacaagcacccggggguccccgugaaguggaagcgguga

SEQ ID NO: 537 - RNA, 1473 nt, Artificial Sequence
  derived and/or modified protein sequence (opt1) from LASV(ISTH2010-NIG-2012;Clade II)__AIT17482__GPC
augggccagaucaucaccuucuuccaggaggugccccacgucaucgaggaggugaugaacaucgugcugaucgcccucagccugcuggccauccucaaggggaucuacaacgucgcgaccugcggccuguucgggcugguguccuuccuccugcugugcggccgcagcugcuccacgaccuacaaggggguguacgagcuccagacccuggagcuggacauggccagccucaacaugaccaugccgcuguccugcacgaagaacaacagccaccacuacaucauggucggcaacgagaccggccuggagcucacccugaccaacacguccaucaucaaccacaaguucugcaaccugagcgacgcccacaagaagaaccucuacgaccacgcccugauguccaucaucagcaccuuccaccuguccauccccaacuucaaccaguacgaggccaugagcugcgacuucaacgggggcaagaucuccgugcaguacaaccucagccacgcguacgccguggacgccgccaaccacugcgggaccaucgcgaacggcguccugcagaccuucaugcggauggccuggggcggguccuacaucgcccuggacagcggcaagggguccugggacugcaucaugacgagcuaccaguaccucaucauccagaacaucaccugggaggaccacugccaguucucccgccccagccccaucggcuaccuggggcugcucagccagcggacccgcgacaucuacaucucccggcgccugcugggcaccuucacguggacccucagcgacuccgagggcaacgagacccccgggggcuacugccugacccgguggaugcugaucgaggccgagcucaagugcuucgggaacacggccguggcgaagugcaacgagaagcacgacgaggaguucugcgacaugcugcgccuguucgacuucaacaagcaggccauccggcgccucaagaccgaggcccagaugagcauccagcugaucaacaaggccgugaacgcccugaucaacgaccagcucaucaugaagaaccaccuccgggacaucaugggcauccccuacugcaacuacuccaaguacugguaccugaaccacaccgucaccgggaagacgagccugccccgcugcuggcugguguccaacggcagcuaccugaacgagacccacuucuccgacgacaucgagcagcaggcggacaacaugaucaccgagcuccugcagaaggaguacaucgaccggcagggcaagaccccgcuggggcucguggaccuguucgucuucagcacguccuucuaccugaucagcaucuuccugcaccucgugaagaucccgacccaccgccacguggucggcaagcccugccccaagccccaccggcugaaccacauggggaucugcuccugcggccuguacaagcacccgggggugcccgugaaguggaagcgcuga

SEQ ID NO: 538 - RNA, 1473 nt, Artificial Sequence
  derived and/or modified protein sequence (opt1) from LASV(ISTH2016-NIG-2012;Clade II)__AIT17486__GPC
augggccagaucaucaccuucuuccaggaggugccccacgucaucgaggaggugaugaacaucgugcugaucgcccucagccugcuggccauccucaaggggaucuacaacgucgcgaccugcggccuguucgggcugguguccuuccuccugcugugcggccgcagcugcuccacgaccuacaaggggguguacgagcuccagacccuggagcuggacauggccagccucaacaugaccaugccgcuguccugcacgaagaacaacagccaccacuacaucauggucggcaacgagaccggccuggagcucacccugaccaacacguccaucaucaaccacaaguucugcaaccugagcgacgcccacaagaagaaccucuacgaccacgcccugauguccaucaucagcaccuuccaccuguccauccccaacuucaaccaguacgaggccaugagcugcgacuucaacgggggcaagaucuccgugcaguacaaccucagccacaccuacgcgguggacgccgccaaccacugcgggaccaucgccaacggcguccugcagacguucaugcggauggcguggggcggguccuacaucgcccuggacagcggcaagggguccugggacugcaucaugaccagcuaccaguaccucaucauccagaacaccaccugggaggaccacugccaguucucccgccccagccccgugggcuaccuggggcugcucagccagcggacgcgcgacaucuacaucucccggcgccugcugggcaccuucaccuggacccucagcgacuccgagggcaacgagacgcccgggggcuacugccugacccgguggaugcugaucgaggccgagcucaagugcuucgggaacaccgccguggccaagugcaacgagaagcacgacgaggaguucugcgacaugcugcgccuguucgacuucaacaagcaggcgauccggcgccucaagaccgaggcccagaugagcauccagcugaucaacaaggccgucaacgcccugaucaacgaccagcucaucaugaagaaccaccuccgggacaucaugggcauccccuacugcaacuacuccaaguacugguaccugaaccacacggugaccgggaagaccagccugccccgcugcuggcugguguccaacggcagcuaccugaacgagacccacuucuccgacgacaucgagcagcaggccgacaacaugaucacggagcuccugcagaaggaguacaucgaccggcagggcaagaccccgcuggggcucgucgaccuguucguguucagcaccuccuucuaccugaucagcaucuuccugcaccucgugaagaucccgacccaccgccacgucaucggcaagcccugccccaagccccaccggcugaaccacauggggaucugcuccugcggccuguacaagcacccgggggugcccgugaaguggaagcgcuga

SEQ ID NO: 539 - RNA, 1473 nt, Artificial Sequence
  derived and/or modified protein sequence (opt1) from LASV(ISTH2020-NIG-2012;Clade II)__AIT17490__GPC
augggccagaucaucaccuucuuccaggaggugccccacgucaucgaggaggugaugaacaucgugcugaucacccucagccugcuggccauccucaaggggaucuacaacgucgccacgugcggccuguucgggcugguguccuuccuccugcugugcggccgcagcugcuccaccaccuacaaggggguguacgagcuccagacccuggagcuggacauggcgaaccucaacaugacgaugccgcugagcugcaccaagaacaacucccaccacuacaucauggucggcaacgagaccggccuggagcucacccugacgaacaccagcaucaucaaccacaaguucugcaaccuguccgacgcccacaagaagaaccucuacgaccacgcccugaugagcaucaucuccaccuuccaccugagcauccccaacuucaaccaguacgaggccauguccugcgacuucaacgggggcaagaucagcgugcaguacaaccucucccacaccuucgccguggacgcggccaaccacugcgggacgaucgccaacggcguccugcagaccuucaugcggauggccuggggcgggagcuacaucgcgcuggacuccggcaaggggagcugggacugcaucaugaccuccuaccaguaccucaucauccagaacaccacgugggaggaccacugccaguucagccgccccucccccaucggcuaccuggggcugcucagccagcggacccgcgacaucuacaucagccggcgccugcugggcaccuucaccuggacgcucuccgacagcgagggcaacgagacccccgggggcuacugccugacccgguggaugcugaucgaggccgagcucaagugcuucgggaacaccgccguggccaagugcaacgagaagcacgacgaggaguucugcgacaugcugcgccuguucgacuucaacaagcaggccauccggcgccucaagacggaggcgcagauguccauccagcugaucaacaaggccgugaacgcccugaucaacgaccagcucaucaugaagaaccaccuccgggacaucaugggcauccccuacugcaacuacagcaaguacugguaccugaaccacaccgucaccgggaagaccucccugccccgcugcuggcuggugagcaacggcuccuaccugaacgagacgcacuucagcgacgacaucgagcagcaggccgacaacaugaucaccgagcuccugcagaaggaguacauggaccggcagggcaagaccccgcuggggcucguggaccuguucgucuucuccaccagcuucuaccugaucuccaucuuccugcaccucgugaagaucccgacgcaccgccacaucaucggcaagcccugccccaagccccaccggcugaaccacauggggaucugcagcugcggccuguacaagcacccgggggugcccgucaaguggaagcgcuga

SEQ ID NO: 540 - RNA, 1473 nt, Artificial Sequence
  derived and/or modified protein sequence (opt1) from LASV(ISTH2025-NIG-2012;Clade II)__AIT17494__GPC
augggccagaucaucaccuucuuccaggaggugccccacgucaucgaggaggugaugaacaucgugcugaucgcccucagccugcuggccauccucaagggggucuacaacguggcgaccugcggccuguucgggcugguguccuuccuccugcugugcggccgcagcugcuccacgaucuacaagggggucuacgagcuccagacccuggagcuggacauggccagccucaacaugaccaugccgcuguccugcaccaagaacaacagccaccacuacaucauggugggcaacgagacgggccuggagcucacccugaccaacaccuccaucaucaaccacaaguucugcaaccugagcgacgcccacaagaagaaccucuacgaccacgcccugauguccaucaucagcacguuccaccuguccauccccaacuucaaccaguacgaggccaugagcugcgacuucaacgggggcaagaucuccgugcaguacaaccucagccacaccuacgcggucgacgccgccaaccacugcgggaccaucgccaacggcgugcugcagaccuucaugcggauggcguggggcggguccuacaucgcccuggacagcggcaagggguccugggacugcaucaugacgagcuaccaguaccucaucauccagaacaccuccugggaggaccacugccaguucagccgccccagccccaucggcuaccuggggcugcucucccagcggacccgcgacaucuacaucagccggcgccugcugggcaccuucacguggacccucuccgacagcgagggcaacgagacccccgggggcuacugccugacccgguggaugcugaucgaggccgagcucaagugcuucgggaacacggccguggccaagugcaacgagaagcacgacgaggaguucugcgacaugcugcgccuguucgacuucaacaagcaggcgauccggcgccucaagaccgaggcccagauguccauccagcugaucaacaaggccgucaacgcccugaucaacgaccagcucaucaugaagaaccaccuccgggacaucaugggcauccccuacugcaacuacagcaaguacugguaccugaaccacaccgugaccgggaagacgucccugccccgcugcuggcuggugagcaacggcuccuaccugaacgagacccacuucagcgacgacaucgagcagcaggccgacaacaugaucaccgagcuccugcagaaggaguacaucgaccggcagggcaagaccccgcuggggcucgucgaccuguucguguucuccacgagcuucuaccugaucuccaucuuccugcaccucgugaagaucccgacccaccgccacgucaucggcaagcccugccccaagccccaccggcugaaccacauggggaucugcagcugcggccuguacaagcacccgggggugcccgugaaguggaagcgcuga

SEQ ID NO: 541 - RNA, 1473 nt, Artificial Sequence
  derived and/or modified protein sequence (opt1) from LASV(ISTH2031-NIG-2012;Clade II)__AIT17498__GPC
augggccagaucaucaccuucuuccaggaggugccccacgucaucgaggaggugaugaacaucgugcugaucgcccucagccugcuggccauccucaaggggaucuacaacgucgcgaccugcggccuguucgggcugguguccuuccuccugcugugcggccgcagcugcuccacgaccuacaaggggguguacgagcuccagacccuggagcuggacauggccagccucaacaugaccaugccgcuguccugcacgaagaacaacagccaccacuacaucauggucggcaacgagaccggccuggagcucacccugaccaacacguccaucaucaaccacaaguucugcaaccugagcgacgcccacaagaagaaccucuacgaccacgcccugauguccaucaucagcaccuuccaccuguccauccccaacuucaaccaguacgaggccaugagcugcgacuucaacgggggcaagaucuccgugcaguacaaccucagccacaccuacgcgguggacgccgccaaccacugcgggaccaucgccaacggcguccugcagacguucaugcggauggcguggggcggguccuacaucgcccuggacagcggcaaggggaacugggacugcaucaugaccuccuaccaguaccucaucauccagaacaccaccugggaggaccacugccaguucagccgccccucccccaucggcuaccuggggcugcucagccagcggacgcgcgacaucuacaucagccggcgccugcugggcaccuucaccuggacccucuccgacagcgagggcaacgagacgcccgggggcuacugccugacccgguggaugcugaucgagaccgagcucaagugcuucgggaacaccgccguggccaagugcaacgagaagcacgacgaggaguucugcgacaugcugcgccuguucgacuucaacaagcaggccaucucccggcuccgcagcgaggcgcagauguccauccagcugaucaacaaggccgugaacgcccugaucaacgaccagcucaucaugaagaaccaccuccgggacaucaugggcauccccuacugcaacuacagcaaguacugguaccugaaccacacggucaccgggaagaccucccugcccaagugcuggcuggugagcaacggcuccuaccugaacgagacccacuucagcgacgacaucgagcagcaggccgacaacaugaucacggagaugcuccagaaggaguacaucgaccgccagggcaagaccccgcuggggcugguggaccucuucgucuucuccaccagcuucuaccugaucuccaucuuccugcaccuggugaagaucccgacccaccggcacaucacgggcaagcccugccccaagccccaccgccucaaccacauggggaucugcagcugcggccuguacaagcacccgggggugcccgucaaguggaagcgguga

SEQ ID NO: 542 - RNA, 1473 nt, Artificial Sequence
  derived and/or modified protein sequence (opt1) from LASV(ISTH2037-NIG-2012;Clade II)__AIT17502__GPC
augggccagaucaucaccuucuuccaggagaucccccacgugaucgaggaggucaugaacaucgugcugaucacccucagccugcuggccauccucaaggggaucuacaacguggccacgugcggccuguucgggcuggucuccuuccuccugcugugcggcaagagcugcuccaccaccuacaaggggguguacgagcuccagacccuggagcuggacauggcgagccucaacaugacgaugccgcuguccugcaccaagaacaacagccaccacuacaucauggugggcaacgagaccggccuggagcucacccugacgaacaccuccaucaucaaccacaaguucugcaaccugagcgacgcccaccgcaagaaccucuacgaccacacccugauguccaucaucagcaccuuccaccuguccauccccaacuucaaccaguacgaggccaugagcugcgacuucaacgggggcaagaucuccguccaguacaaccucagccacgccuacgccaucgacgcggccacgcacugcgggaccaucgccaacggcgugcugcagaccuucaugcggauggccuggggcggguccuacaucgcgcuggacagcggcaagggcgggugggacugcaucaugaccuccuaccaguaccucaucauccagaacacgaccugggaggaccacugccaguucagccgccccucccccaucggguaccugggccugcucagccagcggacccgcgacaucuacaucagccggcgccugcugggcaccuucacguggacccucuccgacagcgaggggaacgagaccccgggcggguacugccugacccgguggaugcugaucgaggccgagcucaagugcuucggcaacacggccguggccaagugcaacgagaagcacgacgaggaguucugcgacaugcugcgccuguucgacuucaacaagcaggccauccggcgccucaagaccgaggcgcagauguccauccagcugaucaacaaggccgucaacgcccugaucaacgaccagcucaucaugcggaaccaccuccgcgacaucauggggauccccuacugcaacuacagcaaguacugguaccugaaccacaccgugaccggcaagacgucccugcccaagugcuggcuggugagcaacggcuccuaccugaacgagacccacuucagcgacgacaucgagcagcaggccgacaacaugaucaccgagcuccugcagaaggaguacauggaccggcaggggaagacgccccugggccucgucgaccuguucguguucuccaccagcuucuaccugaucuccaucuuccugcaccucgugaagaucccgacccaccgccacgucaucgggaagcccugccccaagccccaccggcugaaccacaugggcgugugcagcugcgggcuguacaagcacccgggcgugcccgucaaguggaagcgcuga

SEQ ID NO: 543 - RNA, 1473 nt, Artificial Sequence
  derived and/or modified protein sequence (opt1) from LASV(ISTH2042-NIG-2012;Clade II)__AIT17506__GPC
augggccagaucaucaccuucuuccaggaggugccccacgucaucgaggaggugaugaacaucgugcugaucgcccucagccugcuggccauccucaaggggaucuacaacgucgcgaccugcggccuguucgggcugguguccuuccuccugcugugcggccgcagcugcuccacgaccuacaaggggguguacgagcuccagacccuggagcuggacauggccagccucaacaugaccaugccgcuguccugcacgaagaacaacagccaccacuacaucauggucggcaacgagaccggccuggagcucacccugaccaacacguccaucaucaaccacaaguucugcaaccugagcgacgcccacaagaagaaccucuacgaccacgcccugauguccaucaucagcaccuuccaccuguccauccccaacuucaaccaguacgaggccaugagcugcgacuucaacgggggcaagaucuccgugcaguacaaccucagccacgcguacgccguggacgccgccgagcacugcgggaccaucgcgaacggcguccugcagaccuucaugcggauggccuggggcggguccuacaucgcccuggacagcggcaagggguccugggacugcgugaugacgagcuaccaguaccucaucauccagaacaccaccugggaggaccacugccaguucucccgccccagccccaucggcuaccuggggcugcucagccagcggacccgcgacaucuacaucucccggcgccugcugggcacguucaccuggacccucagcgacuccgagggcaacgagacccccgggggcuacugccugacgcgguggaugcugaucgaggccgagcucaagugcuucgggaacaccgccguggcgaagugcaacgagaagcacgacgaggaguucugcgacaugcugcgccuguucgacuucaacaagcaggccaucgagcggcucaagaccgaggcccagaugagcauccagcugaucaacaaggccgucaacgcccugaucaacgaccagcucaucaugaagaaccaccuccgcgacaucaugggcaucccguacugcaacuacuccaaguacugguaccugaaccacaccgugacggggaagaccagccugccccggugcuggcugguguccaacggcagcuaccugaacgagacccacuucuccgacgacaucgagcagcaggcggacaacaugaucaccgagaugcuccagaaggaguacaucgaccgccagggcaagacgccccuggggcuggucgaccucuucguguucagcaccuccuucuaccugaucagcaucuuccugcaccuggugaagaucccgacccaccggcacgucaucggcaagcccugccccaagccccaccgccucaaccacauggggaucugcuccugcggccuguacaagcacccgggggugcccgugaaguggaagcgguga

SEQ ID NO: 544 - RNA, 1473 nt, Artificial Sequence
  derived and/or modified protein sequence (opt1) from LASV(ISTH2046-NIG-2012;Clade II)__AIT17510__GPC
augggccagaucaucaccuucuuccaggaggugccccacgucaucgaggaggugaugaacaucgugcugaucgcccucagccugcuggccauccucaaggggaucuacaacgucgcgaccugcggccuguucgggcugguguccuuccuccugcugugcggccgcagcugcuccacgaccuacaaggggguguacgagcuccagacccuggagcuggacauggccagccucaacaugaccaugccgcuguccugcacgaagaacaacagccaccacuacaucauggucggcaacgagaccggccuggagcucacccugaccaacacguccaucaucaaccacaaguucugcaaccugagcgacgcccacaagaagaaccucuacgaccacgcccugauguccaucaucagcaccuuccaccuguccauccccaacuucaaccaguacgaggccaugagcugcgacuucaacgggggcaagaucuccgugcaguacaaccucagccacaccuacgcgguggacgccgccaaccacugcgggaccaucgccaacggcguccugcagacguucaugcggauggcguggggcggguccuacaucgcccuggacagcggcaagggguccugggacugcaucaugaccagcuaccaguaccucaucauccagaacaccaccugggaggaccacugccaguucucccgccccagccccaucggcuaccuggggcugcucagccagcggacgaaggacaucuacaucucccgccggcugcugggcaccuucaccuggacccucagcgacuccgagggcaacgagacgcccgggggcuacugccugacccgcuggaugcugaucgaggccgagcucaagugcuucgggaacaccgccguggccaagugcaacgagaagcacgacgaggaguucugcgacaugcugcggcuguucgacuucaacaagcaggcgauccgccggcucaagaccgaggcccagaugagcauccagcugaucaacaaggccgugaacgcccugaucaacgaccagcucaucaugaagaaccaccuccgcgacaucaugggcauccccuacugcaacuacuccaaguacugguaccugaaccacacggucaccgggaagaccagccugccccggugcuggcugguguccaacggcagcuaccugaacgagacccacuucuccgacgacaucgagcagcaggccgacaacaugaucacggagcuccugcagaaggaguacaucgaccgccagggcaagaccccgcuggggcucguggaccuguucgucuucagcaccuccuucuaccugaucagcaucuuccugcaccucgugaagaucccgacccaccggcacgugaucggcaagcccugccccaagccccaccgccugaaccacauggggaucugcuccugcggccuguacaagcacccggggguccccgugaaguggaagcgguga

SEQ ID NO: 545 - RNA, 1473 nt, Artificial Sequence
  derived and/or modified protein sequence (opt1) from LASV(ISTH2050-NIG-2012;Clade II)__AIT17514__GPC
augggccagaucaucaccuucuuccaggaggugccccacgucaucgaggaggugaugaacaucgugcugaucgcccucagccugcuggccguccucaaggggaucuacaacguggcgaccugcggccuguucgggcugguguccuuccuccugcugugcggccgcagcugcuccacgaccuacaagggggucuacgagcuccagacccuggagcuggacauggccagccucaacaugaccaugccgcuguccugcacgaagaacaacagccaccacuacaucauggugggcaacgagaccggccuggagcucacccugaccaacacguccaucaucaaccacaaguucugcaaccugagcgacgcccacaagaagaaccucuacgaccacgcccugauguccaucaucagcaccuuccaccuguccauccccaacuucaaccaguacgaggccaugagcugcgacuucaacgggggcaagaucuccgugcaguacaaccucagccacaccuacgcggucgacgccgccaaccacugcgggaccaucgccaacggcgugcugcagacguucaugcggauggcguggggcggguccuacaucgcccuggacagcggcaagggguccugggacugcaucaugaccagcuaccaguaccucaucauccagaacaccaccugggaggaccacugccaguucucccgccccagccccaucggcuaccuggggcugcucagccagcggacgcgcgacaucuacaucucccggcgccugcugggcaccuucaccuggacccucagcgacuccgagggcaacgagacgcccgggggcuacugccugacccgguggaugcugaucgaggccgagcucaagugcuucgggaacaccgccguggccaagugcaacgagaagcacgacgaggaguucugcgacaugcugcgccuguucgacuucaacaagcaggcgauccggcgccucaagaccgaggcccagaugagcauccagcugaucaacaaggccgucaacgcccugaucaacgaccagcucaucaugaagaaccaccuccgggacaucaugggcauccccuacugcaacuacuccaaguacugguaccugaaccacacggugaccgggaagaccagccugccccgcugcuggcugguguccaacggcagcuaccugaacgagacccacuucuccgacgacaucgagcagcaggccgacaacaugaucacggagcuccugcagaaggaguacaucgaccggcagggcaagaccccgcuggggcucgucgaccuguucguguucagcaccuccuucuaccugaucagcaucuuccugcaccucgugaagaucccgacccaccgccacgucaucggcaagcccugccccaagccccaccggcugaaccacauggggaucugcuccugcggccuguaccgccacccgggggugcccgugaaguggaagcgguga

SEQ ID NO: 546 - RNA, 1473 nt, Artificial Sequence
  derived and/or modified protein sequence (opt1) from LASV(ISTH2057-NIG-2012;Clade II)__AIT17518__GPC
augggccagaucaucaccuucuuccaggaggugccccacgucaucgaggaggugaugaacaucgugcugaucgcccucagccugcuggccauccucaaggggaucuacaacgucgcgaccugcggccuguucgggcugguguccuuccuccugcugugcggccgcagcugcuccacgaccuacaaggggguguacgagcuccagacccuggagcuggacauggccagccucaacaugaccaugccgcuguccugcacgaagaacaacagccaccacuacaucauggucggcaacgagaccggccuggagcucacccugaccaacacguccaucaucaaccacaaguucugcaaccugagcgacgcccacaagaagaaccucuacgaccacgcccugauguccaucaucagcaccuuccaccuguccauccccaacuucaaccaguacgaggccaugagcugcgacuucaacgggggcaagaucuccgugcaguacaaccucagccacgcguacgccguggacgccgccaaccacugcgggaccaucgcgaacggcguccugcagaccuucaugcggauggccuggggcggguccuacaucgcccuggacagcggcaagggguccugggacugcaucaugacgagcuaccaguaccucaucauccagaacaccaccugggaggaccacugccaguucucccgccccagccccaucggcuaccuggggcugcucagccagcggacccgcgacaucuacaucucccggcgccugcugggcacguucaccuggacccucagcgacuccgagggcaacgagacccccgggggcuacugccugacgcgguggaugcugaucgaggccgagcucaagugcuucgggaacaccgccguggcgaagugcaacgagaagcacgacgaggaguucugcgacaugcugcgccuguucgacuucaacaagcaggccauccggcgccucaagaccgaggcccagaugagcauccagcugaucaacaaggccgugaacgcccugaucaacgaccagcucaucaugaagaaccaccuccgggacaucaugggcaucccguacugcaacuacuccaaguacugguaccugaaccacaccgucacggggaagaccagccugccccgcugcuggcugguguccaacggcagcuaccugaacgagacccacuucuccgacgacaucgagcagcaggcggacaacaugaucaccgagcuccugcagaaggaguacauggaccggcagggcaagacgccccuggggcucguggaccuguucgucuucagcaccuccuucuaccugaucagcaucuuccugcaccucgugaagaucccgacccaccgccacgugaucggcaagcccugccccaagccccaccggcugaaccacauggggaucugcuccugcggccuguacaagcacccggggguccccgugaaguggaagcgcuga

SEQ ID NO: 547 - RNA, 1473 nt, Artificial Sequence
  derived and/or modified protein sequence (opt1) from LASV(ISTH2064-NIG-2012;Clade II)__AIT17524__GPC
augggccagaucaucaccuucuuccaggaggugccccacgucaucgaggaggugaugaacaucgugcugaucgcccucagccugcuggccauccucaaggggaucuacaacgucgcgaccugcggccuguucgggcugguguccuuccuccugcugugcggccgcagcugcuccacgaccuacaaggggguguacgagcuccagacccuggagcuggacauggccagccucaacaugaccaugccgcuguccugcacgaagaacaacagccaccacuacaucauggucggcaacgagaccggccuggagcucacccugaccaacacguccaucaucaaccacaaguucugcaaccugagcgacgcccacaagaagaaccucuacgaccacgcccugauguccaucaucagcaccuuccaccuguccauccccaacuucaaccaguacgaggccaugagcugcgacuucaacgggggcaagaucuccgugcaguacaaccucagccacaccuacgcgaucgacgccgccaaccacugcgggaccaucgccaacggcgugcugcagacguucaugcggauggcguggggcggguccuacaucgcccuggacagcggcaagggguccugggacugcaucaugaccagcuaccaguaccucaucauccagaacaccaccugggaggaccacugccaguucucccgccccagccccaucggcuaccuggggcugcucagccagcggacgcgcgacaucuacaucucccggcgccugcugggcaccuucaccuggacccucagcgacuccgagggcaacgagacgcccgggggcuacugccugacccgguggaugcugaucgaggccgagcucaagugcuucgggaacaccgccgucgccaagugcaacgagaagcacgacgaggaguucugcgacaugcugcgccuguucgacuucaacaagcaggcgauccggcgccucaagaccgaggcccagaugagcauccagcugaucaacaaggccgugaacgcccugaucaacgaccagcucaucaugaagaaccaccuccgggacaucaugggcauccccuacugcaacuacuccaaguacugguaccugaaccacacggugaccgggaagaccagccugccccgcugcuggcuggucuccaacggcagcuaccugaacgagacccacuucuccgacgacaucgagcagcaggccgacaacaugaucacggagaugcuccagaaggaguacauggaccggcagggcaagaccccgcuggggcugguggaccucuucguguucagcaccuccuucuaccugaucagcaucuuccugcaccuggucaagaucccgacccaccgccacgugaucggcaagcccugccccaagccccaccggcucaaccacauggggaucugcuccugcggccuguacaagcacccgggggugcccgucaaguggaagcgcuga

SEQ ID NO: 548 - RNA, 1473 nt, Artificial Sequence
  derived and/or modified protein sequence (opt1) from LASV(ISTH2065-NIG-2012;Clade II)__AIT17528__GPC
augggccagaucaucaccuucuuccaggaggugccccacgucaucgaggaggugaugaacaucgugcugaucgcccucagccugcuggccaugcucaaggggaucuacaacaucgcgaccugcggccuguucgggcugaucuccuuccuccugcugugcggccgcagcugcuccacgaccuacaagggggucuacgagcuccaggcccuggagcuggacauggccaaccucaacaugaccaugccgcugagcugcaccaagaacaacucccaccacuacaucauggugggcaacgagacgggccuggagcucacccugaccaacaccagcaucaucaaccacaaguucugcaaccuguccgacgcccacaagaagaaccucuacgaccacgcccugaugagcaucaucuccacguuccaccugagcauccccaacuucaaccaguacgaggcgauguccugcgacuucaacgggggcaagaucagcgugcaguacaaccucucccacaccuacgccggggacgccgccaagcacugcggcaccaucgcgaacgggguccugcagaccuucaugcggauggccuggggcggcagcuacaucgcccuggacuccgggaagggcaacugggacugcaucaugacgagcuaccaguaccucaucauccagaacaccaccugggaggaccacugccaguucucccgccccagccccaucggguaccugggccugcucucccagcggacccgcgacaucuacaucagccggcgccugcugggcacguucaccuggacccucagcgacuccgaggggaacgagaccccgggcggguacugccugacgcgguggaugcugaucgaggccgagcucaagugcuucggcaacaccgccguggcgaagugcaacgagaagcacgacgaggaguucugcgacaugcugcgccuguucgacuucaacaagcaggccauccggcgccucaagaccgaggcccagaugagcauccagcugaucaacaaggccgugaacgcccugaucaacgaccagcucaucaugaagaaccaccuccgggacaucauggggauccccuacugcaacuacuccaaguacugguaccugaaccacagcgucaccggccgcacgucccugccccggugcuggcuggugagcaacggcuccuaccugaacgagacccaguucagcgacgacaucgagcagcaggcggacaacaugaucaccgagaugcuccagaaggaguacaucgaccgccaggggaagacgccccugggccugguggaccucuucgucuucuccaccagcuucuaccugaucuccaucuuccugcaccugaucaagaucccgacccaccggcacaucguggggaagcccugccccaagccccaccgccucaaccacaugggcaucugcagcugcgggcuguacaagcacccgggcauccccgugaaguggaagcgguga

SEQ ID NO: 549 - RNA, 1473 nt, Artificial Sequence
  derived and/or modified protein sequence (opt1) from LASV(ISTH2094-NIG-2012;Clade II)__AIT17538__GPC
augggccagaucaucaccuucuuccaggaggugccccacgucaucgaggaggugaugaacaucgugcugaucgcccucagccugcuggccauccucaaggggaucuacaacaucgcgaccugcggccuguucgggcugaucuccuuccuccugcugugcggccgcagcugcuccacgaccuacaagggggucuacgagcuccagacccuggagcuggacauggccaaccucaacaugaccaugccgcugagcugcacgaagaacaacucccaccacuacaucauggugggcaacgagaccggccuggagcucacccugaccaacacgagcaucaucaaccacaaguucugcaaccuguccgacgcccacaagaagaaccucuacgaccacgcccugaugagcaucaucuccaccuuccaccugagcauccccaacuucaaccaguacgaggccauguccugcgacuucaacgaggggaagaucagcgugcaguacaaccucucccacagcuacgcgaucgacgccgccggccacugcgggaccaucgccaacggcguccugcagaccuucaugcggauggcguggggcggguccuacaucgcccuggacagcggcaaggggaacugggacugcaucaugacguccuaccaguaccucaucauccagaacaccaccugggaggaccacugccaguucagccgccccucccccaucggcuaccuggggcugcucagccagcggacccgcgacaucuacaucagccggcgccugcugggcacguucaccuggacccucuccgacagcgagggcaacgaggcccccgggggcuacugccugacccgguggaugcugaucgaggccgagcucaagugcuucgggaacacggccaucgcgaagugcaacgagaagcacgacgaggaguucugcgacaugcugcgccuguucgacuucaacaagcaggccaucaagcggcucaaggccgaggcccagauguccauccaccugaucaacaaggccgugaacgcgcugaucaacgaccagcucaucaugaagaaccaccuccgcgacaucaugggcauccccuacugcaacuacagcaaguacugguaccugaaccacaccgugaccgggaagaccucccugcccaagugcuggcuggucagcaacggcuccuaccugaacgagacgcacuucagcgacgacaucgagcagcaggccgacaacaugaucaccgagcuccugcagaaggaguacauggaccggcagggcaagaccccgcuggggcucguggaccuguucguguucuccaccagcuucuaccugaucuccaucuuccugcaccucgucaagaucccgacgcaccgccacaucgugggccggcccugccccaagccccaccgccugaaccacauggggaucugcagcugcggccuguacaagcacccgggggugcccgucaaguggaagcgguga

SEQ ID NO: 550 - RNA, 1473 nt, Artificial Sequence
  derived and/or modified protein sequence (opt1) from LASV(ISTH2129-NIG-2012;Clade II)__AIT17544__GPC
augggccagaucaucaccuucuuccaggaggugccccacgucaucgaggaggugaugaacaucgugcugaucgcccucagccugcuggccauccucaaggggaucuacaacgucgcgaccugcggccuguucgggcugguguccuuccuccugcugugcggccgcagcugcuccacgaccuacaaggggguguacgagcuccagacccuggagcuggacaugggcagccucaacaugaccaugccgcuguccugcacgaagaacaacagccaccacuacaucauggucggcaacgagaccgggcuggagcucacccugaccaacacguccaucaucaaccacaaguucugcaaccugagcgacgcccacaagaagaaccucuacgaccacgcccugauguccaucaucagcaccuuccaccuguccauccccaacuucaaccaguacgaggccaugagcugcgacuucaacggcgggaagaucuccgugcaguacaaccucagccacuccuacgccguggacgcggccaaccacugcggcaccaucgccaacgggguccugcagaccuucaugcggauggccuggggcggcagcuacaucgcgcuggacuccgggaagggcagcugggacugcaucaugacguccuaccaguaccucaucauccagaacaccaccugggaggaccacugccaguucagccgccccagccccaucggguaccugggccugcucucccagcggacccgcgacaucuacaucagccggcgccugcugggcacguucaccuggacccucuccgacagcgaggggaacgagaccccgggcggguacugccugacgcgguggaugcugaucgaggccgagcucaagugcuucggcaacaccgccguggccaagugcaacgagaagcacgacgaggaguucugcgacaugcugcgccuguucgacuucaacaagcaggccauccggcgccucaagaccgaggcgcagauguccauccagcugaucaacaaggccgugaacgcccugaucaacgaccagcucaucaugaagaaccaccuccgggacaucauggggauccccuacugcaacuacagcaaguacugguaccugaaccacaccgucacgggcaagaccucccugccccgcugcuggcuggugagcaacggcuccuaccugaacgagacccacuucagcgacgacaucgagcagcaggccgacaacaugaucaccgagcuccugcagaaggaguacauggaccggcaggggaagacgccccugggccucguggaccuguucgucuucuccaccagcuucuaccugaucuccaucuuccugcaccucgugaagaucccgacccaccgccacaucaucgggaagcccugccccaagccccaccggcugaaccacaugggcaucugcagcugcgggcuguacaagcacccgggcgugcccgucaaguggaagcgcuga

SEQ ID NO: 551 - RNA, 1473 nt, Artificial Sequence
  derived and/or modified protein sequence (opt1) from LASV(ISTH2217-NIG-2012;Clade II)__AIT17548__GPC
augggccagaucaucaccuucuuccaggaggugccccacgucaucgaggaggugaugaacaucgugcugaucgcccucagccugcuggccauccucaaggggaucuacaacgucgcgaccugcggccuguucgggcugguguccuuccucuuccugugcggccgcagcugcuccacgaccuacaaggggguguacgagcugcagacccucgagcuggacauggccagccugaacaugaccaugccgcucuccugcacgaagaacaacagccaccacuacaucauggucggcaacgagaccggccuggagcugacccucaccaacacguccaucaucaaccacaaguucugcaaccugagcgacgcccacaagcggaaccuguacgaccacgcccucauguccaucaucagcaccuuccaccuguccauccccaacuucaaccaguacgaggccaugagcugcgacuucaacgggggcaagaucuccgugcaguacaaccugagccacgcguacgccggggacgccgccaagcacugcggcaccaucgcgaacggggugcuccagaccuucaugcgcauggccuggggcggcuccuacaucgcccuggacagcgggaagggcuccugggacugcaucaugacgagcuaccaguaccugaucauccagaacaccaccugggaggaccacugccaguucucccggcccagccccaucggguaccucggccugcugagccagcgcacccgggacaucuacaucucccgccggcuccugggcacguucaccuggacccugagcgacuccgaggggaacgagaccccgggcggguacugccucacgcgcuggaugcugaucgaggccgagcugaagugcuucggcaacaccgccgucgcgaagugcaacgagaagcacgacgaggaguucugcgacaugcuccggcuguucgacuucaacaagcaggccauccgccggcugcgcaccgaggcccagaugagcauccagcucaucaacaaggccgugaacgcccugaucaacgaccagcugaucaugaagaaccaccuccgggacaucauggggauccccuacugcaacuacuccaaguacugguaccugaaccacaccgugacgggcaagaccagccugcccaagugcuggcucgucuccaacggcagcuaccugaacgagacccacuucuccgacgacaucgagcagcaggcggacaacaugaucaccgagaugcugcagaaggaguacaucgaccgccaggggaagacgccccucggccugguggaccuguucguguucagcaccuccuucuaccucaucagcaucuuccugcaccuggucaagaucccgacccaccggcacgugaucgggaagcccugccccaagccccaccgccugaaccacaugggcaucugcuccugcgggcucuacaagcacccgggcgugcccgucaaguggaagcgguga

SEQ ID NO: 552 - RNA, 1473 nt, Artificial Sequence
  derived and/or modified protein sequence (opt1) from LASV(ISTH2271-NIG-2012;Clade II)__AIT17552__GPC
augggccagaucaucaccuucuuccaggaggugccccacgucaucgaggaggugaugaacaucgugcugaucgcccucagccugcuggccauccucaaggggaucuacaacgucgcgaccugcggccuguucgggcugguguccuuccuccugcugugcggccgcagcugcuccacgaccuacaaggggguguacgagcuccagacccuggagcuggacauggccagccucaacaugaccaugccgcuguccugcacgaagaacaacagccaccacuacaucauggucggcaacgagaccggccuggagcucacccugaccaacacguccaucaucaaccacaaguucugcaaccugagcgacgcccacaagaagaaccucuacgaccacgcccugauguccaucaucagcaccuuccaccuguccauccccaacuucaaccaguacgaggccaugagcugcgacuucaacgggggcaagaucuccgugcaguacaaccucagccacgcguacgccgugaacgccgccaaccacugcgggaccaucgcgaacggcguccugcagaccuucaugcggauggccuggggcggguccuacaucgcccuggacagcggcaagggguccugggacugcaucaugacgagcuaccaguaccucaucauccagaacaccaccugggaggaccacugccaguucucccgccccagccccaucggcuaccuggggcugcucagccagcggacccgcgacaucuacaucucccggcgccugcugggcacguucaccuggacccucagcgacuccgagggcaacgagacccccgggggcuacugccugacgcgguggaugcugaucgaggccgagcucaagugcuucgggaacaccgccguggcgaagugcaacgagaagcacgacgaggaguucugcgacaugcugcgccuguucgacuucaacaagcaggccauccggcgccucaagaccgaggcccagaugagcauccagcugaucaacaaggccgugaacgcccugaucaacgaccagcucaucaugaagaaccaccuccgggacaucaugggcaucccguacugcaacuacuccaaguacugguaccugaaccacaccgucacggggaagaccagccugccccgcugcuggcugguguccaacggcagcuaccugaacgagacccacuucuccgacgacaucgagcagcaggcggacaacaugaucaccgagcuccugcagaaggaguacauggaccggcagggcaagacgccccuggggcucguggaccuguucgucuucagcaccuccuucuaccugaucagcaucuuccugcaccucgugaagaucccgacccaccgccacgugaucggcaagcccugccccaagccccaccggcugaaccacauggggaucugcuccugcggccuguacaagcacccggggguccccgugaaguggaagaaguga

SEQ ID NO: 553 - RNA, 1473 nt, Artificial Sequence
  derived and/or modified protein sequence (opt1) from LASV(ISTH2304-NIG-2012;Clade II)__AIT17556__GPC
augggccagaucaucaccuucuuccaggaggugccccacgucaucgaggaggugaugaacaucgugcugaucgcccucagccugcuggccauccucaaggggaucuacaacgucgcgaccugcggccuguucgggcugguguccuuccuccugcugugcggccgcagcugcuccacgaccuacaaggggguguacgagcuccagacccuggagcuggacauggccagccucaacaugaccaugccgcuguccugcacgaagaacaacagccaccacuacaucauggucggcaacgagaccggccuggagcucacccugaccaacacguccaucaucaaccacaaguucugcaaccugagcgacgcccacaagaagaaccucuacgaccacgcccugauguccaucaucagcaccuuccaccuguccauccccaacuucaaccaguacgaggccaugagcugcgacuucaacgggggcaagaucuccgugcaguacaaccucagccacaccuacgcgguggacgccgccaaccacugcgggaccaucgccaacggcguccugcagacguucaugcggauggcguggggcggguccuacaucgcccuggacagcggccgcggguccugggacugcaucaugaccagcuaccaguaccucaucauccagaacaccaccugggaggaccacugccaguucucccggcccagccccaucggcuaccuggggcugcucagccagcgcacgcgggacaucuacaucucccgccggcugcugggcaccuucaccuggacccucagcgacuccgagggcaacgagacgcccgggggcuacugccugacccgcuggaugcugaucgaggccgagcucaagugcuucgggaacaccgccguggccaagugcaacgagaagcacgacgaggaguucugcgacaugcugcggcuguucgacuucaacaagcaggcgauccgccggcucaagaccgaggcccagaugagcauccagcugaucaacaaggccgugaacgcccugaucaacgaccagcucaucaugaagaaccaccuccgcgacaucaugggcauccccuacugcaacuacuccaaguacugguaccugaaccacacgaucaccgggaagaccagccugccccggugcuggcuggucuccaacggcagcuaccugaacgagacccacuucuccgacgacaucgagcagcaggccgacaacaugaucacggagcuccugcagaaggaguacaucgaccgccagggcaagaccccgcuggggcucguggaccuguucguguucagcaccuccuucuaccugaucagcaucuuccugcaccucgucaagaucccgacccaccggcacaucacgggcaagcccugccccaagccccaccgccugaaccacauggggaucugcuccugcggccuguacaagcacccgggggugcccgugcgguggaagcgcuga

SEQ ID NO: 554 - RNA, 1473 nt, Artificial Sequence
  derived and/or modified protein sequence (opt1) from LASV(ISTH2312-NIG-2012;Clade II)__AIT17560__GPC
augggccagaucaucaccuucuuccaggaggugccccacgucaucgaggaggugaugaacaucgugcugaucgcccucagccugcuggccguccucaaggggaucuacaacguggcgaccugcggccuguucgggcugguguccuuccuccugcugugcggccgcagcugcuccacgaccuacaagggggucuacgagcuccagacccuggagcuggacauggccagccucaacaugaccaugccgcuguccugcacgaccaacaacagccaccacuacaucauggugggcaacgagaccggccuggagcucacccugacgaacaccuccaucaucaaccacaaguucugcaaccugagcgacgcccacaagaagaaccucuacgaccacgcccugauguccaucaucagcaccuuccaccuguccauccccaacuucaaccaguacgaggccaugagcugcgacuucaacgggggcaagaucuccgugcaguacaaccucagccacgcguacgccggggaggccgccaaccacugcggcaccaucgcgaacgggguccugcagacguucaugcggauggccuggggcggcuccuacaucgcccuggacagcgggaagggcuccugggacugcaucaugaccagcuacaaguaccucaucauccagaacaccaccuggggcgaccacugccaguucucccgccccagccccaucggguaccugggccugcucagccagcggacgcgcgacaucuacaucucccggcgccugcuggggaccuucaccuggacccucagcgacuccgagggcaacgagacgcccgggggcuacugccugacccgguggaugcugaucgaggccgagcucaagugcuucgggaacaccgccguggcgaagugcaacgagaagcacgacgaggaguucugcgacaugcugcgccuguucgacuucaacaagcaggccauccggaagcucaagaccgaggcccagaugagcauccagcugaucaacaaggccgugaacgcccugaucaacgaccagcucaucaugaagaaccaccuccgcgacaucaugggcauccccuacugcaacuacucccgguacugguaccugaaccacacggucaccggccgcaccagccugccccggugcuggcugguguccaacgggagcuaccugaacgagacccacuucuccgacgacaucgagcagcaggcggacaacaugaucacggagcuccugcagaaggaguacaucgaccgccagggcaagaccccgcuggggcucguggaccuguucgucuucagcaccuccuucuaccugaucagcaucuuccugcaccucgugaagaucccgacccaccggcacaucaucggcaagcccugccccaagccccaccgccugaaccacauggggaucugcuccugcggccuguacaagcacccgggcgugcccgucaaguggaagcgguga

SEQ ID NO: 555 - RNA, 1473 nt, Artificial Sequence
  derived and/or modified protein sequence (opt1) from LASV(ISTH2316-NIG-2012;Clade II)__AIT17564__GPC
augggccagaucaucaccuucuuccaggaggugccccacgucaucgaggaggugaugaacaucgugcugaucgcccucagccugcuggccauccucaaggggaucuacaacgucgcgaccugcggccuguucgggcugcucuccuuccugcugcucugcggccgcagcugcuccacgaccuacaaggggguguacgagcugcagacccuggagcucgacauggccagccugaacaugaccaugccgcuguccugcacgaagaacaacagccaccacuacaucauggugggcaacgagaccggccucgagcugacccugaccaacacguccaucaucaaccacaaguucugcaaccucagcgacgcccacaagaaggaccuguacgaccacgcccugauguccaucaucagcaccuuccaccucuccauccccaacuucaaccaguacgaggccaugagcugcgacuucaacgggggcaagaucuccguccaguacaaccugagccacgcguacgccguggacgccgccaagcacugcgggaccaucgcgaacggcgugcugcagaccuucaugcggauggccuggggcggguccuacaucgcccucgacagcggcaagggguccugggacugcaucaugacgagcuaccaguaccugaucauccagaacaccuccugggaggaccacugccaguucagccgccccagccccaucggcuaccuggggcuccugucccagcggacccgcgacaucuacaucagccggcgccugcucggcaccuucacguggacccuguccgacagcgagggcaacgagacccccgggggcuacugccugacccgguggaugcucaucgaggccgagcugaagugcuucgggaacacggccgucgcgaagugcaacgagaagcacgacgaggaguucugcgacaugcugcgccucuucgacuucaacaagcaggccaucaagcggcugaagaccgaggcccagauguccauccagcugaucaacaaggccgugaacgcccucaucaacgaccagcugaucaugaagaaccaccuccgcgacaucaugggcauccccuacugcaacuacagcaaguacugguaccugaaccacaccgugaccgggaagacgucccugccccggugcuggcuggucagcaacggcuccuaccucaacgagacccacuucagcgacgacaucgagcagcaggcggacaacaugaucaccgagcugcugcagaaggaguacaucgaccgccagggcaagaccccgcucgggcugguggaccuguucguguucuccacgagcuucuaccugaucuccaucuuccuccaccuggucaagaucccgacccaccggcacgugaucggcaagcccugccccaagccccaccgccugaaccacauggggaucugcagcugcggccucuacaagcacccgggggugcccgucaaguggaagcgguga

SEQ ID NO: 556 - RNA, 1473 nt, Artificial Sequence
  derived and/or modified protein sequence (opt1) from LASV(ISTH2358-NIG-2012;Clade II)__AIT17572__GPC
augggccagaucaucaccuucuuccaggaggugccccacgucaucgaggaggugaugaacaucgugcugaucgcccucagccugcuggccauccucaaggggaucuacaacgucgcgaccugcggccuguucgggcugguguccuuccuccugcugugcggccgcagcugcuccacgaccuacaaggggguguacgagcuccagacccuggagcuggacauggccaaccucaacaugaccaugccgcugagcugcacgaagaacaacucccaccacuacaucauggucggcaacgagaccggccuggagcucacccugaccaacacgagcaucaucaaccacaaguucugcaaccuguccgacgcccacaagaagaaccucuacgaccacgcccugaugagcaucaucuccaccuuccaccugagcauccccaacuucaaccaguacgaggccauguccugcgacuucaacgggggcaagaucagcgugcaguacaaccucucccacaacuacgcgguggacgccgccaaccacugcgggaccaucgccaacggcguccugcagaccuucaugcggauggcguggggcgggagcuacaucgcccuggacuccggcaaggggaacugggacugcaucaugacgagcuaccaguaccucaucauccagaacaccaccugggaggaccacugccaguucucccgccccagccccaucggcuaccuggggcugcucucccagcggacccgcgacaucuacaucagccggcgccugcugggcacguucaccuggacccucagcgacuccgagggcaacgacaugcccgggggcuacugccugacccgguggaugcugaucgaggccgagcucaagugcuucgggaacacggccguggccaagugcaacgagaagcacgacgaggaguucugcgacaugcugcgccuguucgacuucaacaagcaggcgauccggcgccucaagaccgaggcccagaugaacauccagcugaucaacaaggccgugaacgcccugaucaacgaccagcucaucaugaagaaccaccuccgggacaucaugggcauccccuacugcaacuacagcaaguacugguaccugaaccacaccgucaccgggaagacgucccugccccgcugcuggcuggugagcaacggcuccuaccugaacgagacccacuucagcgacgacaucgagcagcaggccgacaacaugaucaccgagcuccugcagaaggaguacauggaccggcagggcaagaccccgcuggggcucguggaccuguucgucuucuccacgagcuucuaccugaucuccaucuuccugcaccucgugaagaucccgacccaccgccacaucaucggcaagcccugccccaagccccaccggcugaaccacauggggaucugcagcugcggccuguacaagcacccgggggugcccgucaaguggaagcgcuga

SEQ ID NO: 557 - RNA, 1473 nt, Artificial Sequence
  derived and/or modified protein sequence (opt1) from LASV(ISTH2376-NIG-2012;Clade II)__AIT17576__GPC
augggccagaucaucaccuucuuccaggaggugccccacgucaucgaggaggugaugaacaucgugcugaucgcccucagccugcuggccauccucaaggggaucuacaacgucgcgaccugcggccuguucgggcugguguccuuccuccugcugugcggccgcagcugcuccacgaccuacaaggggguguacgagcuccagacccuggagcuggacauggccagccucaacaugaccaugccgcuguccugcacgaagaacaacagccaccacuacaucauggucggcaacgagaccggccuggagcucacccugaccaacacguccaucaucaaccacaaguucugcaaccugagcgacgcccacaagaagaaccucuacgaccacgcccugauguccaucaucagcaccuuccaccuguccauccccaacuucaaccaguacgaggccaugagcugcgacuucaacgggggcaagaucuccgugcaguacaaccucagccacaccuacgcgguggacgccgccaaccacugcgggaccaucgccaacggcguccugcagacguucaugcggauggcguggggcggguccuacaucgcccuggacagcggcaaggggaacugggacugcaucaugaccuccuaccaguaccucaucauccagaacaccaccugggaggaccacugccaguucagccgccccucccccaucggcuaccuggggcugcucagccagcggacgcgcgacaucuacaucagccggcgccugcugggcaccuucaccuggacccucuccgacagcgagggcaacgagacgcccgggggcuacugccugacccgguggaugcugaucgaggccgagcucaagugcuucgggaacaccgccguggccaagugcaacgagaagcacgacgaggaguucugcgacaugcugcgccuguucgacuucaacaagcaggcgaucucccggcucaagaccgaggcccagaugagcauccagcugaucaacaaggccgugaacgcccugaucaacgaccagcucaucaugaagaaccaccuccgcgacaucaugggcauccccuacugcaacuacuccaaguacugguaccugaaccacacggucaccgggaagaccagccugccccggugcuggcugguguccaacggcagcuaccugaacgagacccacuucuccgacgacaucgagcagcaggccgacaacaugaucacggagaugcuccagaaggaguacaucgaccgccagggcaagaccccgcuggggcugguggaccucuucgucuucagcaccuccuucuaccugaucagcaucuuccugcaccuggugaagaucccgacccaccggcacaucacgggcaagcccugccccaagccccaccgccucaaccacauggggaucugcuccugcggccuguacaagcacccgggggugcccgucaaguggaagcgguga

SEQ ID NO: 558 - RNA, 1473 nt, Artificial Sequence
  derived and/or modified protein sequence (opt1) from LASV(Lassa virus/H.sapiens-wt/NGA/2015/ISTH_0543;Clade II)__AVO03639__GPC
augggccagaucaucaccuucuuccaggaggugccccacgucaucgaggaggugaugaacaucgugcugaucgcccucagccugcuggccauccucaaggggaucuacaacgucgcgaccugcggccuguucgggcugguguccuuccuccugcugugcggccgcagcugcuccacgaccuacaaggggguguacgagcuccagacccuggagcuggacauggccaaccucaacaugaccaugccgcugagcugcacgaagaacaacucccaccacuacaucauggucggcaacgagaccggccuggagcucacccugaccaacacgagcaucaucaaccacaaguucugcaaccuguccgacgcccacaagaagaaccucuacgaccacgcccugaugagcaucaucuccaccuuccaccugagcauccccaacuucaaccaguacgaggccauguccugcgacuucaacgggggcaagaucagcgugcaguacaaccucucccacaccuacgcgguggacgccgccaaccacugcgggaccaucgccaacggcguccugcagacguucaugcggauggcguggggcgggagcuacaucgcccuggacuccggcaaggggagcugggacugcaucaugaccuccuaccaguaccucgugauccagaacaccaccugggaggaccacugccaguucagccgccccucccccaucggcuaccuggggcugcucagccagcggacgcgcgacaucuacaucagccggcgccugcugggcaccuucaccuggacccucuccgacagcgagggcaacgagacgcccgggggcuacugccugacccgguggaugcugaucgaggccgagcucaagugcuucgggaacaccgccguggccaagugcaacgagaagcacgacgaggaguucugcgacaugcugcgccuguucgacuucaacaagcaggcgauccggcgccucaagaccgaggcccagauguccauccagcugaucaacaaggccgucaacgcccugaucaacgaccagcucaucaugaagaaccaccuccgggacaucaugggcauccccuacugcaacuacagcaaguacugguaccugaaccacacggugaccgggaagaccucccugccccgcugcuggcuggugagcaacggcuccuaccugaacgagacccacuucagcgacgacaucgagcagcaggccgacaacaugaucacggagcuccugcagaaggaguacaucgaccggcagggcaagaccccgcuggggcucgucgaccuguucguguucuccaccagcuucuaccugaucuccaucuuccugcaccucgugaagaucccgacccaccgccacaucacgggcaagcccugccccaagccccaccggcugaaccacauggggaucugcagcugcggccuguacaagcacccggggguccccgugaaguggaagcgcuga

SEQ ID NO: 559 - RNA, 1473 nt, Artificial Sequence
  derived and/or modified protein sequence (opt1) from LASV(Lassa virus/H.sapiens-wt/NGA/2015/ISTH_0547;Clade II)__AVO03583__GPC
augggccagaucaucaccuucuuccaggaggugccccacgucaucgaggaggugaugaacaucgugcugaucgcccucagccugcuggccauccucaaggggaucuacaacgucgcgaccugcggccuguucgggcugguguccuuccuccugcugugcggccgcagcugcuccacgaccuacaaggggguguacgagcuccagacccuggagcuggacauggccagccucaacaugaccaugccgcuguccugcacgaagaacaacagccaccacuacaucauggucggcaacgagaccggccuggagcucacccugaccaacacguccaucaucaaccacaaguucugcaaccugagcgacgcccacaagaagaaccucuacgaccacgcccugauguccaucaucagcaccuuccaccuguccauccccaacuucaaccaguacgaggccaugagcugcgacuucaacgggggcaagaucuccgugcaguacaaccucagccacaccuacgcgguggacgccgccaaccacugcgggaccaucgccaacggcguccugcagacguucaugcggauggcguggggcggguccuacaucgcccuggacagcggcaagggguccugggacugcaucaugaccagcuaccaguaccucaucauccagaacaccaccugggaggaccacugccaguucucccgccccagccccaucggcuaccuggggcugcucagccagcggacgcgcgacaucuacaucucccggcgccugcugggcaccuucaccuggacccucagcgacuccgagggcaacgagacgcccgggggcuacugccugacccgguggaugcugaucgaggccgagcucaagugcuucgggaacaccgccguggccaagugcaacgagaagcacgacgaggaguucugcgacaugcugcgccuguucgacuucaacaagcaggcgauccggcgccucaagaccgaggcccagaugagcauccagcugaucaacaaggccgugaacgcccugaucaacgaccagcucaucaugaagaaccaccuccgggacaucaugggcauccccuacugcaacuacuccaaguacugguaccugaaccacacggucaccgggaagaccagccugccccgcugcuggcugguguccaacggcagcuaccugaacgagacccacuucuccgacgacaucgagcagcaggccgacaacaugaucacggagcuccugcagaaggaguacaucgagcggcagggcaagaccccgcuggggcucguggaccuguucgucuucagcaccuccuucuaccugaucagcaucuuccugcaccucgugaagaucccgacccaccgccacaucacgggcaagcccugccccaagccccaccggcugaaccacauggggaucugcuccugcggccuguacaagcacccgggggugcccgucaaguggaagcgcuga

SEQ ID NO: 560 - RNA, 1473 nt, Artificial Sequence
  derived and/or modified protein sequence (opt1) from LASV(Lassa virus/H.sapiens-wt/NGA/2015/ISTH_0574;Clade II)__AVO03657__GPC
augggccagaucaucaccuucuuccaggaggugccccacgucaucgaggaggugaugaacaucgugcugaucgcccucagccugcuggccauccucaaggggaucuacaacgucgcgaccugcggccuguucgggcugguggccuuccuccugcugugcggccgcuccugcagcacgaccuacaaggggguguacgagcuccagacccuggagcuggacauggccucccucaacaugaccaugccgcugagcugcacgaagaacaacucccaccacuacaucauggucggcaacgagaccggccuggagcucacccugaccaacacgagcaucaucaaccacaaguucugcaaccuguccgacgcccacaagaagaaccucuacgaccacgcccugaugagcaucaucuccaccuuccaccugagcauccccaacuucaaccaguacgaggcgauguccugcgacuucaacgggggcaagaucagcgugcaguacaaccucucccacaccuacgccguggacgccgccaaccacugcgggaccaucacgaacggcguccugcagaccuucaugcggauggcguggggcgggagcuacaucgcccuggacuccggcaaggggagcugggacugcaucaugaccuccuaccaguaccucaucauccagaacaccacgugggaggaccacugccaguucagccgccccucccccaucggcuaccuggggcugcucagccagcggacccgcgacaucuacaucagccggcgccugcugggcaccuucaccuggacgcucuccgacagcgagggcaacgagacccccgggggcuacugccugacccgguggaugcugaucgaggccgagcucaagugcuucgggaacaccgccguggccaagugcaacgagaagcacgacgaggaguucugcgacaugcugcgccuguucgacuucaacaagcaggcgauccggcgccucaagacggaggcccagauguccauccagcugaucaacaaggccgugaacgcccugaucaacgaccagcucaucaugaagaaccaccuccgggacaucaugggcauccccuacugcaacuacagcaaguacugguaccugaaccacaccgucaccgggcgcaccucccugccccggugcuggcuggugagcaacggcuccuaccugaacgagacgcacuucagcgacgacaucgagcagcaggccgacaacaugaucaccgagcuccugcagaaggaguacauggaccgccagggcaagaccccgcuggggcucguggaccuguucgucuucuccaccagcuucuaccugaucuccaucuuccugcaccucaucaagaucccgacgcaccggcacgugaucggcaagcccugccccaagccccaccgccugaaccacauggggaucugcagcugcggccuguacaagcacccgggggugcccgucaaguggaagcgguga

SEQ ID NO: 561 - RNA, 1473 nt, Artificial Sequence
  derived and/or modified protein sequence (opt1) from LASV(Lassa virus/H.sapiens-wt/NGA/2015/ISTH_0681;Clade II)__AVO03617__GPC
augggccagaucaucaccuucuuccaggaggugccccacgucaucgaggaggugaugaacaucgugcugaucgcccucagccugcuggccauccucaaggggaucuacaacgucgcgaccugcggccuguucgggcugguguccuuccuccugcugugcggccgcagcugcuccaccaccuacaaggggguguacgagcuccagacccuggagcuggacauggccagccucaacaugaccaugccgcuguccugcacgaagaacaacagccaccacuacaucauggucggcaacgagaccggccuggagcucacccugaccaacacguccaucaucaaccacaaguucugcaaccugagcgacgcccacaagaagaaccucuacgaccacgcccugauguccaucaucagcaccuuccaccuguccauccccaacuucaaccaguacgaggccaugagcugcgacuucaacgggggcaagaucuccgugcaguacaaccucagccacaccuacgcggagggggccgccaaccacugcggcaccaucgccaacggggugcugcagacguucaugcggauggcguggggcggcuccuacaucgcccuggacagcgggaagggcuccugggacugcaucaugaccagcuaccaguaccucaucauccagaacaccaccugggaggaccacugccaguucucccgccccagccccaucggguaccugggccugcucagccagcggacgcgcgacaucuacaucucccggcgccugcugggcaccuucaccuggacccucagcgacuccgaggggaacgagacgccgggcggguacugccugacccgguggaugcugaucgaggccgagcucaagugcuucggcaacaccgccgucgccaagugcaacgagaagcacgacgaggaguucugcgacaugcugcgccuguucgacuucaacaagcaggcgaucaugcggcucaagaccgaggcccagaugagcauccagcugaucaacaaggccgugaacgcccugaucaacgaccagcucaucaugaagaaccaccuccgcgacaucauggggauccccuacugcaacuacuccaaguacugguaccugaaccacacggugaccggcaagaccagccugccccggugcuggcuggucuccaacggcagcuaccugaacgagacccacuucuccgacgacaucgagcagcaggccgacaacaugaucacggagaugcuccagaaggaguacauggaccgccaggggaagacgccccugggccugguggaccucuucguguucagcaccuccuucuaccugaucagcaucuuccugcaccuggucaagaucccgacccaccggcacgugaucgggaagcccugccccaagccccaccgccucaaccacaugggcaucugcuccugcgggcuguacaagcacccgggcgugcccgucaaguggaagcgguga

SEQ ID NO: 562 - RNA, 1473 nt, Artificial Sequence
  derived and/or modified protein sequence (opt1) from LASV(Lassa virus/H.sapiens-wt/NGA/2015/ISTH_0682;Clade II)__AVO03625__GPC
augggccagaucaucaccuucuuccaggaggugccccacgucaucgaggaggugaugaacaucgugcugaucgcccucagccugcuggccauccucaaggggaucuacaacgucgcgaccugcggccuguucgggcugguguccuuccuccugcugugcggccgcagcugcuccacgaccuacaaggggguguacgagcuccagacccuggagcuggacauggccagccucaacaugaccaugccgcuguccugcacgaagaacaacagccaccacuacaucauggucggcaacgagaccggccuggagcucacccugaccaacacguccaucaucaaccacaaguucugcaaccugagcgacgcccacaagaagaaccucuacgaccacgcccugauguccaucaucagcaccuuccaccuguccauccccaacuucaaccaguacgaggccaugagcugcgacuucaacgggggcaagaucuccgugcaguacaaccucagccacgcguacgccguggacgccgccaaccacugcgggaccaucgcgaacggcguccugcagaccuucaugcggauggccuggggcggguccuacaucgcccuggacagcggcaagggguccugggacugcaucaugacgagcuaccacuaccucaucauccagaacaccaccugggaggaccacugccaguucucccgccccagccccaucggcuaccuggggcugcucagccagcggacccgcgacaucuacaucucccggcgccugcugggcacguucaccuggacccucagcgacuccgagggcaacgagacccccgggggcuacugccugacgcgguggaugcugaucgaggccgagcucaagugcuucgggaacaccgccguggcgaagugcaacgagaagcacgacgaggaguucugcgacaugcugcgccuguucgacuucaacaagcaggccauccggcgccucaagaccgaggcccagaugagcauccagcugaucaacaaggccgugaacgcccugaucaacgaccagcucaucaugaagaaccaccuccgggacaucaugggcaucccguacugcaacuacuccaaguacugguaccugaaccacaccgucacggggaagaccagccugccccgcugcuggcugguguccaacggcagcuaccugaacgagacccacuucuccgacgacaucgagcagcaggcggacaacaugaucaccgagcuccugcagaaggaguacaucgaccggcagggcaagacgccccuggggcucguggaccuguucgucuucagcaccuccuucuaccugaucagcaucuuccugcaccucgugaagaucccgacccaccgccacgugaucggcaagcccugccccaagccccaccggcugaaccacauggggaucugcuccugcggccuguacaagcacccggggguccccgugaaguggaagcgcuga

SEQ ID NO: 563 - RNA, 1473 nt, Artificial Sequence
  derived and/or modified protein sequence (opt1) from LASV(Lassa virus/H.sapiens-wt/NGA/2015/ISTH_0687;Clade II)__AVO03581__GPC
augggccagaucaucaccuucuuccaggaggugccccacgucaucgaggaggugaugaacaucgugcugaucgcccucagccugcuggccauccucaaggggaucuacaacgucgcgaccugcggccuguucgggcugguguccuuccuccugcugugcggccgcagcugcuccaccaccuacaaggggguguacgagcuccagacccuggagcuggacaugaccaaccucaacaugacgaugccgcugagcugcaccaagaacaacucccaccacuacaucauggucggcaacgagaccggccuggagcucacccugacgaacaccagcaucaucaaccacaaguucugcaaccuguccgacgcccacaagaagaaccucuacaaccacgcccugaugagcaucaucuccaccuuccaccugagcauccccaacuucaaccaguacgaggccauguccugcgacuucaacgggggcaagaucagcgugcaguacaaccucucccacaccuacgccguggacgcggccaaccacugcgggacggucgccaacggcgugcugcagaccuucaugcggauggccuggggcgggagcuacaucgcgcuggacuccggcaagggcgggugggacugcaucaugaccagcuaccaguaccucaucauccagaacaccacgugggaggaccacugccaguucucccgccccagccccaucggguaccugggccugcucucccagcggacccgcgacaucuacaucagccggcgccugcugggcaccuucaccuggacgcucagcgacuccgaggggaacgagaccccgggcggguacugccugacccgguggaugcugaucgaggccgagcucaagugcuucggcaacaccgccguggccaagugcaacgagaagcacgacgaggaguucugcgacaugcugcgccuguucgacuucaacaagcaggccauccggaagcucaaggcggaggcccagaugagcauccagcugaucaacaaggccgucaacgcccugaucaacgaccagcucaucaugaagaaccaccuccgcgacaucauggggauccccuacugcaacuacuccaaguacugguaccugaaccacacggugaccggcaagaccagccugcccaagugcuggcugguguccaacggcagcuaccugaacgagacccacuucuccgacgacaucgagcagcaggccgacaacaugaucacggagcuccugcagaaggaguacauggaccggcaggggaagacgccccugggccucgucgaccuguucguguucagcaccuccuucuaccugaucagcaucuuccugcaccucgugaagaucccgacccaccgccacaucaucgggaagcccugccccaagccccaccggcugaaccacaugggcaucugcuccugcgggcuguacaagcacccgggcguccccgugaaguggaagcgcuga

SEQ ID NO: 564 - RNA, 1473 nt, Artificial Sequence
  derived and/or modified protein sequence (opt1) from LASV(Lassa virus/H.sapiens-wt/NGA/2015/ISTH_0736;Clade II)__AVO03573__GPC
augggccagaucaucaccuucuuccaggaggugccccacgucaucgaggaggugaugaacaucgugcugaucgcccucagccugcuggccguccucaaggggaucuacaacguggcgaccugcggccuguucgggcugguguccuuccuccugcugugcggccgcagcugcuccacgaccuacaagggggucuacgagcuccagacccuggagcuggacauggccagccucaacaugaccaugccgcuguccugcacgaagaacaacagccaccacuacaucauggugggcaacgagaccggccuggagcucacccugaccaacacguccaucaucaaccacaaguucugcaaccugagcgacgcccacaagaagaaccucuacgaccacgcccugauguccaucaucagcaccuuccaccuguccauccccaacuucaaccaguacgaggccaugagcugcgacuucaacgggggcaagaucuccgugcaguacaaccucagccacacccacgcggucgacgccgccaaccacugcgggaccaucgccaacggcgugcugcagacguucaugcggauggcguggggcggguccuacaucgcccuggacagcggcaagggguccugggacugcaucaugaccagcuaccaguaccucaucauccagaacaccaccugggaggaccacugccaguucucccgccccagccccaucggcuaccuggggcugcucagccagcggacgcgcgacaucuacaucucccggcgccugcugggcaccuucaccuggacccucagcgacuccgagggcaacgagacgcccgggggcuacugccugacccgguggaugcugaucgaggccgagcucaagugcuucgggaacaccgccguggccaagugcaacgagaagcacgacgaggaguucugcgacaugcugcgccuguucgacuucaacaagcaggcgauccggcgccucaagaccgaggcccagaugagcauccagcugaucaacaaggccgucaacgcccugaucaacgaccagcucaucaugaagaaccaccuccgggacaucaugggcauccccuacugcaacuacucccgcuacugguaccugaaccacacggugaccgggaagaccagccugccccggugcuggcugguguccaacggcagcuaccugaacgagacccacuucuccgacgacaucgagcagcaggccgacaacaugaucacggagcuccugcagaaggaguacaucgaccgccagggccggaccccgcuggggcucgucgaccuguucguguucagcaccuccuucuaccugaucagcaucuuccugcaccucgugaagaucccgacccaccgccacgucaucggcaagcccugccccaagccccaccggcugaaccacauggggaucugcuccugcggccuguacaagcacccgggggugcccgugaaguggaagcgcuga

SEQ ID NO: 565 - RNA, 1473 nt, Artificial Sequence
  derived and/or modified protein sequence (opt1) from LASV(Lassa virus/H.sapiens-wt/NGA/2015/ISTH_0789;Clade II)__AVO03551__GPC
augggccagaucgugaccuucuuccaggaggucccccacgugaucgaggagaucaugaacaucgugcugaucacccucagccugcuggccauccucaagggggucuacaaccuggccacgugcggccugaucgggcucaucaccuuccuguuccugugcggccgcuccugcagcaccaucuacaagggguccuaccaguuccagacccucgagcugaacauggagacgcugaacaugaccaugccgcucagcugcaccaagaacuccagccaccacuacauccggguguccaacgagaccggccuggagcugacgcucaccaacaccagcaucaucaaccacaaguucugcaaccuguccgacgcgcacaagaagaaccuguacgaccacacccucaugagcaucaucuccacguuccaccugagcauccccaacuucaaccaguacgaggccauguccugcgacuucaacggcgggaagaucagcgugcaguacaaccugucccacagcuacgccgucgacgccgccaaccacugcggcaccguggcgaacggggugcuccagaccuucaugcgcauggccuggggcggguccuacaucgcccuggacagcggccggggcaacugggacugcaucaugaccuccuaccaguaccugaucauccagaacacgaccugggaggaccacugccaguucagccgccccagccccaucggguaccucggccugcugucccagcggacccgcgacaucuacaucagccggcgccuccuggggaccuucacguggacccuguccgacagcgagggcaaggagaccccgggcggguacugccucacccgguggaugcugaucgaggccgagcugaagugcuucggcaacacggcggucgccaagugcaacgagaagcacgacgaggaguucugcgacaugcuccgccuguucgacuucaacaagcaggccauccagcggcugaaggccgaggcccagauguccauccagcucaucaacaaggcggugaacgcccugaucaacgaccagcugaucaugaagaaccaccuccgcgacaucauggggauccccuacugcaacuacagcaaguacugguaccugaaccacaccuccaccggccggaccagccugcccaagugcuggcucguguccaacgggagcuaccugaacgagacgcacuucuccgacgacaucgagcagcaggccgacaacaugaucaccgagaugcugcagaaggaguacaucgaccgccagggcaagacgccccucggccuggucgaccuguucguguucagcaccuccuucuaccucaucagcaucuuccugcaccuggugaagaucccgacccaccggcacaucgucgggaaguccugccccaagccccaccgccugaaccacaugggcaucugcagcugcgggcucuacaagcggcccggcgugccggugaaguggaagcgcuga

SEQ ID NO: 566 - RNA, 1473 nt, Artificial Sequence
  derived and/or modified protein sequence (opt1) from LASV(Lassa virus/H.sapiens-wt/NGA/2015/ISTH_0821;Clade II)__AVO03641__GPC
augggccagaucaucaccuucuuccaggaggugccccacgucaucgaggaggugaugaacaucgugcugaucgcccucagccugcuggccauccucaaggggaucuacaacgucgcgaccugcggccuguucgggcugguguccuuccuccugcugugcggccgcagcugcuccacgaccuacaaggggguguacgagcuccagacccuggagcuggacauggccagccucaacaugaccaugccgcuguccugcacgaagaacaacagccaccacuacaucauggucggcaacgagaccggccuggagcucacccugaccaacacguccaucaucaaccacaaguucugcaaccugagcgacgcccacaagaagaaccucuacgaccacacccugauguccaucaucagcaccuuccaccuguccauccccaacuucaaccaguacgaggccaugagcugcgacuucaacgggggcaagaucuccgugcaguacaaccucagccacaccuacgccguggacgcggccaaccacugcgggacgaucgccaacggcguccugcagaccuucaugcggauggccuggggcggguccuacaucgcgcuggacagcggcaaggggaacugggacugcaucaugaccuccuaccaguaccucaucauccagaacaccacgugggaggaccacugccaguucagccgccccucccccaucggcuaccuggggcugcucagccagcggacccgcgacaucuacaucagccggcgccugcugggcaccuucaccuggacgcucuccgacagcgagggcaacgagacccccgggggcuacugccugacccgguggaugcugaucgaggccgagcucaagugcuucgggaacaccgccguggccaagugcaacgagaagcacgacgaggaguucugcgacaugcugcgccuguucgacuucaacaagcaggccaucucccggcucaagacggaggcgcagaugagcauccagcugaucaacaaggccgugaacgcccugaucaacgaccagcucaucaugaagaaccaccuccgcgacaucaugggcauccccuacugcaacuacuccaaguacugguaccugaaccacaccgucaccgggaagaccagccugccccggugcuggcugguguccaacggcagcuaccugaacgagacgcacuucuccgacgacaucgagcagcaggccgacaacaugaucaccgagaugcuccagaaggaguacaucgaccgccagggcaagaccccgcuggggcugguggaccucuucgucuucagcaccuccuucuaccugaucagcaucuuccugcaccuggugaagaucccgacgcaccggcacgugaucggcaagcccugccccaagccccaccgccucaaccacauggggaucugcuccugcggccuguacaagcacccggggguccccgugaaguggaagcgguga

SEQ ID NO: 567 - RNA, 1473 nt, Artificial Sequence
  derived and/or modified protein sequence (opt1) from LASV(Lassa virus/H.sapiens-wt/NGA/2015/ISTH_0831;Clade II)__AVO03545__GPC
augggccagaucgugaccuucuuccaggaggucccccacgugaucgaggagaucaugaacaucgugcugaucacccucagccugcuggccauccucaagggggucuacaaccuggccacgugcggccugaucgggcucaucaccuuccuguuccugugcggccgcuccugcagcaugaccuacaagggguccuaccagcucgagacccuggagcugaacauggagacgcucaacaugaccaugccgcugagcugcaccaagaacaccucccaccacuacauccgggugggcaacgagacgggccuggagcucacccugaccaacaccagcaucaucaaccacaaguucugcaaccuguccgacgcgcacaagaagaaccucuacgaccacagccugauguccaucgugagcacguuccaccuguccauccccaacuucaaccaguacgaggccaugagcugcgacuucaacgggggcaagaucuccauccaguacaaccucagccacgccuacgccggggacgccgcgaagcacugcggcacccuggccaacgggguccugcagaccuucaugcgcauggccuggggcggcuccuacaucgcccucgacagcgggcggggcaacugggacugcaucaugaccuccuaccaguaccugaucauccagaacacgaccugggacgaccacugccaguucagccgccccucccccaucggguaccugggccuccugagccagcggacccgcgagaucuacaucagccggcgccugcucggcaccuucacguggacccuguccgacagcgaggggaacgaggcgccgggcggguacugccugacccgguggaugcucaucgaggccgagcugaagugcuucggcaacaccgccguggccaagugcaacgagaagcacgacgaggaguucugcgacaugcugcgccucuucgacuucaacaagcaggccauccagcggcugaagacggaggcgcagauguccauccagcugaucaacaaggccgugaacgcccucaucaacgaccagcugaucaugaagaaccaccuccgcgacaucauggggauccccuacugcaacuacagcaaguacugguaccugaaccacaccaccaccggccggacgucccugccccgcugcuggcuggucagcaacggcuccuaccucaacgagacccacuucagcgacgacaucgagcagcaggccgacaacaugaucaccgagaugcugcagaaggaguacaucgaccggcaggggaagacgccccugggccucguggaccuguucguguucuccaccagcuucuaccugaucuccaucuuccugcaccucgucaagaucccgacccaccgccacaucgugggcaagagcugccccaagccccaccggcugaaccacauggggaucugcuccugcgggcuguacaagcagcccggcgugccgguccgcuggaagcgguga

SEQ ID NO: 568 - RNA, 1473 nt, Artificial Sequence
  derived and/or modified protein sequence (opt1) from LASV(Lassa virus/H.sapiens-wt/NGA/2016/ISTH_0009;Clade II)__AVO03571__GPC
augggccagaucaucaccuucuuccaggaggugccccacgucaucgaggaggugaugaacaucgugcugaucgcccucagccugcuggccauccucaaggggaucuacaacgucgcgaccugcggccugcuggggcucguguccuuccugcugcucugcggccgcagcugcuccacgaccuacaaggggguguacgagcugcagacccuggagcucgacauggccagccugaacaugaccaugccgcuguccugcacgaagaacaacagccaccacuacaucauggucggcaacgagaccggccucgagcugacccugaccaacacguccaucaucaaccacaaguucugcaaccucagcgacgcccacaagaagaaccuguacgaccacgcccugauguccaucaucagcaccuuccaccucuccauccccaacuucaaccaguacgaggccaugagcugcgacuucaacgggggccggaucuccgugcaguacaaccugagccacuccuacgcgguggacgccgccaaccacugcgggaccaucgccaacggcguccugcagaccuucaugcgcauggcguggggcgggagcuacaucgcccucgacuccggcaaggggagcugggacugcaucaugacguccuaccaguaccugaucauccagaacaccaccugggaggaccacugccaguucagccggcccagccccaucggcuaccuggggcuccugucccagcgcacccgggacaucuacaucagccgccggcugcucggcacguucaccuggacccuguccgacagcgagggcaacgagacccccgggggcuacugccugacgcgcuggaugcucaucgaggccgagcugaagugcuucgggaacaccgccguggccaagugcaacgagaagcacgacgaggaguucugcgacaugcugcggcuguucgacuucaacaagcaggcgauccgccggcugaagaccgaggcccagauguccauccagcugaucaacaaggccgugaacgcccucaucaacgaccagcugaucaugaagaaccaccuccgcgacaucaugggcaucccguacugcaacuacagcaaguacugguaccucaaccacaccgucacggggaagaccucccugccccggugcuggcuggugagcaacggcuccuaccucaacgagacccacuucagcgacgacaucgagcagcaggccgacaacaugaucaccgagcugcugcagaaggaguacaucgaccgccagggcaagacgccccucgggcugguggaccuguucgucuucuccaccagcuucuaccugaucuccaucuuccuccaccuggugaagaucccgacccaccggcacaucaccggcaagcccugccccaagccccaccgccugaaccacauggggaucugcagcugcggccucuacaaccacccgggggugcccgucaaguggaagcgguga

SEQ ID NO: 569 - RNA, 1473 nt, Artificial Sequence
  derived and/or modified protein sequence (opt1) from LASV(Lassa virus/H.sapiens-wt/NGA/2016/ISTH_0017;Clade II)__AVO03567__GPC
augggccagaucaucaccuucuuccaggaggugccccacgucaucgaggaggugaugaacaucgugcugaucgcccucagccugcuggccauccucaaggggaucuacaacgucgcgaccugcggccuguucgggcugguguccuuccuccugcugugcggccgcagcugcuccacgaccuacaaggggguguacgagcuccagacccuggagcuggacauggccagccucaacaugaccaugccgcuguccugcacgaagaacaacagccaccacuacaucauggucggcaacgagaccggccuggagcucacccugaccaacacguccaucaucaaccacaaguucugcaaccugagcgacgcccacaagaagaaccucuacgaccacgcccugauguccaucaucagcaccuuccaccuguccauccccaacuucaaccaguacgaggccaugagcugcgacuucaacgggggcaagaucuccgugcaguacaaccucagccacaccuacgcgaucgacgccgccaaccacugcgggaccaucgccaacggcgugcugcagacguucaugcggauggcguggggcggguccuacaucgcccuggacagcggcaagggguccugggacugcaucaugaccagcuaccaguaccucaucauccagaacaccaccugggaggaccacugccaguucucccgccccagccccaucggcuaccuggggcugcucagccagcggacgcgcgacaucuacaucucccggcgccugcugggcaccuucaccuggacccucagcgacuccgagggcaacgagacgcccgggggcuacugccugacccgguggaugcugaucgaggccgagcucaagugcuucgggaacaccgccgucgccaagugcaacgagaagcacgacgaggaguucugcgacaugcugcgccuguucgacuucaacaagcaggcgauccggcgccucaagaccgaggcccagaugagcauccagcugaucaacaaggccgugaacgcccugaucaacgaccagcucaucaugaagaaccaccuccgggacaucaugggcauccccuacugcaacuacuccaaguacugguaccugaaccacacggugaccgggaagaccagccugccccgcugcuggcuggucuccaacggcagcuaccugaacgagacccacuucuccgacgacaucgagcagcaggccgacaacaugaucacggagcuccugcagaaggaguacauggaccggcagggcaagaccccgcuggggcucguggaccuguucguguucagcaccuccuucuaccugaucagcaucuuccugcaccucguccgcaucccgacccaccggcacgugaucggcaagcccugccccaagccccaccgccugaaccacauggggaucugcuccugcggccuguacaagcacccgggggugcccgucaaguggaagcgguga

SEQ ID NO: 570 - RNA, 1473 nt, Artificial Sequence
  derived and/or modified protein sequence (opt1) from LASV(Lassa virus/H.sapiens-wt/NGA/2016/ISTH_0035;Clade II)__AVO03619__GPC
augggccagaucaucaccuucuuccaggaggugccccacgucaucgaggaggugaugaacaucgugcugaucgcccucagccugcuggccauccucaaggggaucuacaacgucgcgaccugcggccuguucgggcugguguccuuccuccugcugugcggccgcagcugcuccaugacguacaaggggguguacgagcuccagacccuggagcuggacauggccagccucaacaugaccaugccgcuguccugcaccaagaacaacagccaccacuacaucauggucggcaacgagacgggccuggagcucacccugaccaacaccuccaucaucaaccacaaguucugcaaccugagcgacgcccacaagaagaaccucuacgaccacgcccugauguccaucaucagcacguuccaccuguccauccccaacuucaaccaguacgaggccaugagcugcgacuucaacgggggcaagaucuccgugcaguacaaccucagccacaccuacgcgguggacgccgccaaccacugcgggaccaucgccaacggcguccugcagaccuucaugcggauggcguggggcggguccuacaucgcccuggacagcggcaagggguccugggacugcaucaugacgagcuaccaguaccucaucauccagaacaccaccugggaggaccacugccaguucucccgccccagccccaucggcuaccuggggcugcucagccagcggacccgcgacaucuacaucucccggcgccugcugggcacguucaccuggacccucagcgacuccgagggcaacgagacccccgggggcuacugccugacgcgguggaugcugaucgaggccgagcucaagugcuucgggaacaccgccguggccaagugcaacgagaagcacgacgaggaguucugcgacaugcugcgccuguucgacuucaacaagcaggcgauccggcgccucaagaccgaggcccagaugagcauccagcugaucaacaaggccgugaacgcccugaucaacgaccagcucaucaugaagaaccaccuccgggacaucaugggcaucccguacugcaacuacuccaaguacugguaccugaaccacaccaucacggggaagaccagccugccccgcugcuggcuggucuccaacggcagcuaccugaacgagacccacuucuccgacgacaucgagcagcaggccgacaacaugaucaccgagcuccugcagaaggaguacauggaccggcagggcaagacgccccuggggcucguggaccuguucguguucagcaccuccuucuaccugaucagcaucuuccugcaccucgucaagaucccgacccaccgccacgugaucggcaagcccugccccaagccccaccggcugaaccacauggggaucugcuccugcggccuguacaagcacccgggggugcccgucaaguggaagcgcuga

SEQ ID NO: 571 - RNA, 1473 nt, Artificial Sequence
  derived and/or modified protein sequence (opt1) from LASV(Lassa virus/H.sapiens-wt/NGA/2016/ISTH_0104;Clade II)__AVO03631__GPC
augggccaggugaucaccuucuuccaggaggucccccacgugaucgaggaggugaugaacaucguccugaucgcccucagccugcuggccauccucaaggggaucuacaacguggcgaccugcggccuguucgggcugaucuccuuccuccugcugugcggccgcagcugcuccacgaccuacaaggggguguacgagcuccagacccuggagcugaacaugcagaaccucaacaugaccaugccgcugagcugcacgaagaacuccagccaccacuacaucauggucggcaacgagaccggccuggagcucacccugaccaacacguccaucaucaaccacaaguucugcaaccugagcgacgcccacaagaagaaccucuacgaccacgcccugauguccaucaucagcaccuuccaccuguccauccccaacuucaaccaguacgaggccaugagcugcgacuucaacgggggcaagaucuccgugcaguacaaccucagccacaccuacgccaucgacgcggccaaccacugcgggaccguggccaacggcguccugcagacguucaugcggauggccuggggcggguccuacaucgcgcuggacagcggccgcgggaacugggacugcaucaugaccuccuaccaguaccucaucauccagaacaccaccugggaggaccacugccaguucagccggcccucccccaucggcuaccuggggcugcucagccagcgcacgcgggacaucuacaucagccgccggcugcugggcaccuucaccuggacccucuccgacagcgagggcaacgaggcccccgggggcuacugccugacgcgcuggaugcugaucgaggccgagcucaagugcuucgggaacaccgccguggccaagugcaacgagaagcacgacgaggaguucugcgacaugcugcggcuguucgacuucaacaagcaggcgaucaagcgccucaagaccgaggcccagauguccauccagcugaucaacaaggccgugaacgcccugaucaacgaccagcucaucaugaagaaccaccuccgggacaucaugggcaucccguacugcaacuacagcaaguacugguaccugaaccacaccgucacggggcgcaccucccugccccggugcuggcuggugagcaacggcuccuaccugaacgacacccaguucagcgacgacaucgagcagcaggccgacaacaugaucaccgagaugcuccagaaggaguacauggaccgccagggcaagacgccccuggggcugguggaccucuucgucuucuccaccagcuucuaccugaucuccaucuuccugcaccuggugaagaucccgacccaccggcacaucgugggccgccccugccccaagccccaccggcucaaccacauggggaucugcagcugcggccuguacaagcacccggggguccccgugaaguggaagcgcuga

SEQ ID NO: 572 - RNA, 1476 nt, Artificial Sequence
  derived and/or modified protein sequence (opt1) from LASV(Lassa virus/H.sapiens-wt/NGA/2016/ISTH_0133;Clade II)__AVO03635__GPC
augggccagaucaucaccuucuuccaggaggugccccacgucaucgaggaggugaugaacaucgugcugaucgcccucagccugcuggccguccucaaggcgaucuacaacguggcgaccugcgggguguucggccugaucuccuuccugcuccugugcgggcgcagcugcuccacgaccuacaagggcgucuacgagcugcagacccucgagcuggacauggccaaccugaacaugaccaugccgcucagcugcacgaagaacaacucccaccacuacaucaugguggggaacgagaccggccuggagcugacccucaccaacacgagcaucaucaaccacaaguucugcaaccuguccgacgcccacaagaagaaccuguacgaccacagccucauguccaucaucagcaccuuccaccuguccauccccaacuucaaccaguacgaggccaugagcugcgacuucaacggcgggaagaucuccgugcaguacaaccugagccacuccuacgccgucgacgccgccaagcacugcggcaccaucgccaacggggugcuccagaccuucaugcggauggcguggggcgggagcuacaucgcccuggacuccggcaagggcgggugggacugcaucaugacgagcuaccaguaccugaucauccagaacaccaccugggaggaccacugccaguucucccgccccagccccaucggcuaccucgggcugcugagccagcggacccgcgacaucuacaucucccggcgccuccugggcacguucaccuggacccugagcgacuccgagggcaacgacgcccccgggggcuacugccucacccgguggaugcugaucgaggccgagcugaagugcuucgggaacacggccaucgcgaagugcaacgagaagcacgacgaggaguucugcgacaugcuccgccuguucgacuucaaccggcaggccaucaagcgccugaagaccgaggcccagaugagcauccagcucaucaacaaggccgugaacgcccugaucaacgaccagcugaucaugaagaaccaccuccgggacaucaugggcauccccuacugcaacuacuccaaguacugguaccugaaccacaccaucaccgggaagacgagccugccccgcugcuggcucgucuccaacggcagcuaccugaacgagacccacuucuccgacgacaucgagcagcaggcggacaacaugaucaccgagcugcuccagaaggaguacauggaccggcagggcaagaccccgcuggggcugguggaccucuucguguucagcacguccuucuaccugaucagcaucuuccugcaccuggucaagaucccgacccaccgccacaucgugggcaagcccugccccaagccccaccggcucaaccacauggggaucugcuccugcggccuguacaagcacccgggggugcccgucaaguggaagcgccaguga

SEQ ID NO: 573 - RNA, 1473 nt, Artificial Sequence
  derived and/or modified protein sequence (opt1) from LASV(Lassa virus/H.sapiens-wt/NGA/2016/ISTH_0141;Clade II)__AVO03649__GPC
augggccagaucaucaccuucuuccaggaggugccccacgucaucgaggaggugaugaacaucgugcugaucacccucagccugcuggccauccucaaggggaucuacaacgucgccacgugcggccuguucgggcugguguccuuccuccugcugugcggccgcagcugcuccaccaucuacaaggggguguacgagcuccagacccuggagcuggacauggcgagccucaacaugaccaugccgcuguccugcacgaagaacaacagccaccacuacaucauggucggcaacgagaccggccuggagcucacccugaccaacacguccaucaucaaccacaaguucugcaaccugagcgacgcccacaagaagaaccucuacgaccacgcccugauguccaucaucagcaccuuccaccuguccauccccaacuucaaccaguacgaggccaugagcugcgacuucaacgggggcaagaucuccgugcaguacaaccucagccacaccuacgccguggacgcggccgagcacugcgggaccaucgccaacggcguccugcagacguucaugcggauggccuggggcggguccuacaucgcgcuggacagcggcaagggguccugggacugcaucaugaccagcuaccaguaccucaucauccagaacaccaccugggaggaccacugccaguucucccgccccagccccaucggcuaccuggggcugcucagccagcggacgcgcgacaucuacaucucccggcgccugcugggcaccuucaccuggacccucagcgacuccgagggcaacgagacgcccgggggcuacugccugacccgguggaugcugaucgaggccgagcucaagugcuucgggaacaccgccguggccaagugcaacgagaagcacgacgaggaguucugcgacaugcugcgccuguucgacuucaacaagcaggccauccggcgccucaagaccgaggcgcagaugagcauccagcugaucaacaaggccgugaacgcccugaucaacgaccagcucaucaugaagaaccaccuccgggacaucaugggcauccccuacugcaacuacuccaaguacugguaccugaaccacacggucaccgggaagaccagccugccccgcugcuggcugguguccaacggcagcuaccugaacgagacccgguucuccgacgacaucgagcagcaggccgacaacaugaucacggagcuccugcagaaggaguacaucgaccgccagggcaagaccccgcuggggcucguggaccuguucgucuucagcaccuccuucuaccugaucagcaucuuccugcaccucgugaagaucccgacccaccggcacaucaucggcaagcccugccccaagccccaccgccugaaccacauggggaucugcuccugcggccuguacaagcacccggggauccccgugaaguggaagcgguga

SEQ ID NO: 574 - RNA, 1473 nt, Artificial Sequence
  derived and/or modified protein sequence (opt1) from LASV(Lassa virus/H.sapiens-wt/NGA/2016/ISTH_0146;Clade II)__AVO03633__GPC
augggccagaucaucaccuucuuccaggaggugccccacgucaucgaggaggugaugaacaucgugcugaucgcccucagccugcuggccauccucaaggggaucuacaacgucgcgaccugcggccuguucgggcugguguccuuccuccugcugugcggccgcagcugcuccacgaccuacaaggggguguacgagcuccagacccuggagcuggacauggccagccucaacaugaccaugccgcuguccugcacgaagaacaacagccaccacuacaucauggucggcaacgagaccggccuggagcucacccugaccaacacguccaucaucaaccacaaguucugcaaccugagcgacgcccacaagaagaaccucuacgaccacgcccugauguccaucaucagcaccuuccaccuguccauccccaacuucaaccaguacgaggccaugagcugcgacuucaacgggggcaagaucuccgugcaguacaaccucagccacaccuacgcgguggacgccgccaaccacugcgggaccaucgccaacggcguccugcagacguucaugcggauggcguggggcggguccuacaucgcccuggacagcggcaagggguccugggacugcaucaugaccagcuaccaguaccucaucauccagaacaccaccugggaggaccacugccaguucucccgccccagccccaucggcuaccuggggcugcucagccagcggacgcgcgacaucuacaucucccggcgccugcugggcaccuucaccuggacccucagcgacuccgagggcaacgagacgcccgggggcuacugccugacccgguggaugcugaucgaggccgagcucaagugcuucgggaacaccgccguggccaagugcaacgagaagcacgacgaggaguucugcgacaugcugcgccuguucgacuucaacaagcaggcgauccggcgccucaagaccgaggcccagaugagcauccagcugaucaacaaggccgugaacgcccugaucaacgaccagcucaucaugaagaaccaccuccgggacaucaugggcauccccuacugcaacuacuccaaguacugguaccugaaccacacggucaccgggaagaccagccugccccgcugcuggcugguguccaacggcagcuaccugaacgagacccacuucuccgacgacaucgagcagcaggccgacaacaugaucacggagcuccugcagaaggaguacauggaccggcagggcaagaccccgcuggggcucguggaccuguucgucuucagcaccuccuucuaccugaucagcaucuuccugcaccucgugaagaucccgacccaccgccacgugaucggcaagcccugccccaagccccaccggcugaaccacauggggaucugcuccugcggccuguacaagcacccggggguccccgugaaguggaagcgcuga

SEQ ID NO: 575 - RNA, 1473 nt, Artificial Sequence
  derived and/or modified protein sequence (opt1) from LASV(Lassa virus/H.sapiens-wt/NGA/2016/ISTH_0187;Clade II)__AVO03549__GPC
augggccagaucgugaccuucuuccaggaggucccccacgugaucgaggaggugaugaacaucguccugaucgcccucagcgugcuggccauccugaaggggcucuacaacuucgcgaccugcggccugaucgggcuggugacguuccuccugcuguccggccgcagcugcuccauggucuacaaggggguguacgagcuccagacccuggagcugaacauggagacccucaacaugaccaugccgcugagcugcacgaagaacaacucccaccacuacauccgggugggcaacgacaccggccuggagcucacccugaccaacaacacgcugcucaaccacaaguucugcaaccugagcgacgcccacaagaagaaccuguacgaccacgcccucauguccaucaucagcaccuuccaccuguccauccccaacuucaaccaguacgaggccaugagcugcgacuucaacgggggccgcaucaccguccaguacaaccugucccacagcuacgccguggacgcggccaaccacugcgggaccguggccaacggcguccuccagacguucaugcggauggccuggggcggguccuacaucgcgcuggacagccgccacggcaacugggacugcaucaugaccuccuaccaguaccugaucauccagaacaccaccugggaggaccacugccaguucagccggcccucccccaucggguaccucggccugcugagccagcgcacgcgggacaucuacaucucccgccggcuccuggggaccuucaccuggacccugagcgacagcgagggcaacgagacgccgggcggguacugccucacccgcuggaugcugaucgaggccgagcugaagugcuucggcaacaccgccguggccaagugcaacgagaagcacgacgaggaguucugcgacaugcuccggcuguucgacuucaacaagcaggccauccgccggcugaaggcggaggcccagauguccauccagcucaucaacaaggccgugaacgcccugaucaacgaccagcugaucaugaagaaccaccuccgcgacaucauggggauccccuacugcaacuacagcaaguacugguaccugaaccacaccuccacgggcaagaccagccugccccggugcuggcucgucuccaacgggagcuaccugaacgagacccacuucuccgacgacaucgagcagcaggccgacaacaugaucaccgagaugcugcagaaggaguaccucgaccgccagggcaagacgccccugggccugguggacaucuucguguucagcaccuccuucuaccugaucagcaucuuccuccaccugaucaagaucccgacccaccggcacaucgucgggaagcccugccccaagccccaccgccugaaccacaugggcaucugcuccugcgggcucuacaagcagccgggcgugcccgugcgguggaagcgcuga

SEQ ID NO: 576 - RNA, 1473 nt, Artificial Sequence
  derived and/or modified protein sequence (opt1) from LASV(Lassa virus/H.sapiens-wt/NGA/2016/ISTH_0199;Clade II)__AVO03653__GPC
augggccagaucaucaccuucuuccaggaggugccccacgucaucgaggaggugaugaacaucgugcugaucgcccucagccugcuggccauccucaaggggaucuacaacgucgcgaccugcggccuguucgggcugguguccuuccuccugcugugcggccgcagcugcuccacgaccuacaaggggguguacgagcuccagacccuggagcuggacauggccagccucaacaugaccaugccgcuguccugcacgaagaacaacagccaccacuacaucauggucggcaacgagaccggccuggagcucacccugaccaacacguccaucaucaaccacaaguucugcaaccugagcgacgcccacaagaagaaccucuacgaccacgcccugauguccaucaucagcaccuuccaccuguccauccccaacuucaaccaguacgaggccaugagcugcgacuucaacgggggcaagaucuccgugcaguacaaccucagccacaccuacgcgguggacgccgccaaccacugcgggaccaucgccaacggcguccugcagacguucaugcggauggcguggggcggguccuacaucgcccuggacagcggcaaggggaacugggacugcaucaugaccuccuaccaguaccucaucauccagaacaccaccugggaggaccacugccaguucagccgccccucccccaucggcuaccuggggcugcucagccagcggacgcgcgacaucuacaucagccggcgccugcugggcaccuucaccuggacccucuccgacagcgagggcaacgagacgcccgggggcuacugccugacccgguggaugcugaucgaggccgagcucaagugcuucgggaacaccgccguggccaagugcaacgagaagcacgacgaggaguucugcgacaugcugcgccuguucgacuucaacaagcaggcgaucucccggcucaagaccgaggcccagaugagcauccagcugaucaacaaggccgugaacgcccugaucaacgaccagcucaucaugaagaaccaccuccgcgacaucaugggcauccccuacugcaacuacuccaaguacugguaccugaaccacacggucaccgggaagaccagccugccccggugcuggcugguguccaacggcagcuaccugaacgagacccacuucuccgacgacaucgagcagcaggccgacaacaugaucacggagaugcuccagaaggaguacaucgaccgccagggcaagaccccgcuggggcugguggaccucuucgucuucagcaccuccuucuaccugaucagcaucuuccugcaccuggugaagaucccgacccaccggcacgugaucggcaagcccugccccaagccccaccgccucaaccacauggggaucugcuccugcggccuguacaagcacccggggguccccgugaaguggaagcgguga

SEQ ID NO: 577 - RNA, 1473 nt, Artificial Sequence
  derived and/or modified protein sequence (opt1) from LASV(Lassa virus/H.sapiens-wt/NGA/2016/ISTH_0419;Clade II)__AVO03539__GPC
augggccagaucgugaccuucuuccaggaggucccccacgugaucgaggaggugaugaacaucguccugaucgcccucagccugcuggccauccucaaggggaucuacaacuucgcgaccugcggccugaucgggcugaucacguuccucuuccugugcggccgcuccugcagcgccaucuacaagggguccuaccagcugcagaccaucgagcucaacauggagacccugaacaugaccaugccgcugagcugcacgaagaacuccagccaccacuacauccgggugggcaacgagaccggccucgagcugacccugaccaacaucuccaucaucgaccacaaguucugcaaccucagcgacgcccacaagaagaaccuguacgaccacgcccugauguccaucaucagcacguuccaccucuccauccccaacuucaaccaguacgaggccaugagcugcgacuucaacgggggcaagaucuccgugcaguacaaccugagccacaccuacgcggucgacgccgccaaccacugcgggaccguggccaacggcgugcugcagaccuucaugcgcauggcguggggcggguccuacaucgcccucgacagcggccgggggaacugggacugcaucaugacguccuaccaguaccugaucauccagaacaccaccugggaggaccacugccaguucagccgccccucccccaucggcuaccuggggcuccugagccagcggacccgcgacaucuacaucagccggcgccugcucggcacguucaccuggacccuguccgacagcgagggcaaggagacccccgggggcuacugccugacgcgguggaugcucaucgaggccgagcugaagugcuucgggaacaccgccgucgccaagugcaacgagaagcacgacgaggaguucugcgacaugcugcgccucuucgacuucaacaagcaggcgauccagcggcugaaggccgaggcccagauguccauccagcugaucaacaaggccgugaacgcccucaucaacgaccagcugaucaugaagaaccaccuccgcgacaucaugggcauccccuacugcaacuacagcaaguacugguaccugaaccacaccuccaccgggcggacgagccugccccgcugcuggcugguguccaacggcagcuaccucaacgagacccacuucuccgacgacaucgagcagcaggcggacaacaugaucaccgagaugcugcagaaggaguacaucgaccggcagggcaagaccccgcuggggcucgucgaccuguucguguucagcacguccuucuaccugaucagcaucuuccuccaccugaucaagaucccgacccaccgccacaucgugggcaaguccugccccaagccccaccggcugaaccacauggggaucugcagcugcggccuguacaagcagcccggggucccggugaaguggaagcgcuga

SEQ ID NO: 578 - RNA, 1473 nt, Artificial Sequence
  derived and/or modified protein sequence (opt1) from LASV(Lassa virus/H.sapiens-wt/NGA/2016/ISTH_0447;Clade II)__AVO03559__GPC
augggccagaucaucaccuucuuccaggaggugccccacgucaucgaggaggugaugaacaucgugcugaucgcccucagccugcuggccauccucaaggggaucuacaacaucgcgaccugcggccuguucgggcuggucuccuuccuccugcugugcggccgcagcugcuccacgaccuacaaggggguguacgagcuccagacccuggagcuggacauggccagccucaacaugaccaugccgcuguccugcacgaagaacaacagccaccacuacaucauggugggcaacgagaccggccuggagcucacccugaccaacacguccaucaucaaccacaaguucugcaaccugagcgacgcccacaagaagaaccucuacgaccacacccugauguccaucaucagcaccuuccaccuguccauccccaacuucaaccaguacgaggccaugagcugcgacuucaacgggggcaagaucuccguccaguacaaccucagccacgccuacgcgguggacgccgccaaccacugcgggaccaucgccaacggcgugcugcagacguucaugcggauggcguggggcggguccuacaucgcccuggacagcggcaaggggaacugggacugcaucaugaccuccuaccaguaccucaucauccagaacaccaccugggaggaccacugccaguucagccgccccucccccaucggcuaccuggggcugcucagccagcggacgcgcgacaucuacaucagccggcgccugcugggcaccuucaccuggacccucuccgacagcgagggcaacgagacgcccgggggcuacugccugacccgguggaugcugaucgaggccgagcucaagugcuucgggaacaccgccgucgccaagugcaacgagaagcacgacgaggaguucugcgacaugcugcgccuguucgacuucaacaagcaggcgauccggcgccucaagaccgaggcccagauguccauccagcugaucaacaaggccgugaacgcccugaucaacgaccagcucaucaugaagaaccaccuccgggacaucaugggcauccccuacugcaacuacagcaaguacugguaccugaaccacacggugaccgggaagaccucccugccccgcugcuggcuggucagcaacggcuccuaccugaacgagacccacuucagcgacgacaucgagcagcaggccgacaacaugaucacggagcuccugcagaaggaguacaucgaccggcagggcaagaccccgcuggggcucguggaccuguucguguucuccaccagcuucuaccugaucuccaucuuccugcaccucgucaagaucccgacccaccgccacguggugggcaagcccugccccaagccccaccggcugaaccacauggggaucugcagcugcggccuguacaagcacccggggguccccgugaaguggaagcgcuga

SEQ ID NO: 579 - RNA, 1473 nt, Artificial Sequence
  derived and/or modified protein sequence (opt1) from LASV(Lassa virus/H.sapiens-wt/NGA/2016/ISTH_0543;Clade II)__AVO03595__GPC
augggccagaucaucaccuucuuccaggaggugccccacgucaucgaggaggugaugaacaucgugcugaucgcccucagccugcuggccauccucaaggggaucuacaacaucgcgaccugcggccuguucgggcugaucuccuuccuccugcugugcggccgcagcugcuccacgaccuacaagggggucuacgagcuccagacccuggagcuggacauggccaaccucaacaugaccaugccgcugagcugcacgaagaacaacucccaccacuacaucauggugggcaacgagaccggccuggagcucacccugaccaacacgagcaucaucaaccacaaguucugcaaccuguccgacgcccacaagaagaaccucuacgaccacgcccugaugagcaucaucuccaccuuccaccugagcauccccaacuucaaccaguacgaggccauguccugcgacuucaacgggggcaagaucagcgugcaguacaaccucucccacagcuacgcggucgacgccgccgggcacugcggcaccaucgccaacggggugcugcagaccuucaugcggauggcguggggcggcuccuacaucgcccuggacagcgggaagggcaacugggacugcaucaugacguccuaccaguaccucgugauccagaacaccaccugggaggaccacugccaguucagccgccccucccccaucggguaccugggccugcucagccagcggacccgcgacaucuacaucagccggcgccugcugggcacguucaccuggacccucuccgacagcgaggggaacgaggccccgggcggguacugccugacccgguggaugcugaucgaggccgagcucaagugcuucggcaacacggccaucgcgaagugcaacgagaagcacgacgaggaguucugcgacaugcugcgccuguucgacuucaacaagcaggccauccggcgccucaaggccgaggcccagauguccauccagcugaucaacaaggccgucaacgcgcugaucaacgaccagcucaucaugaagaaccaccuccgggacaucauggggauccccuacugcaacuacagcaaguacugguaccugaaccacaccgugaccggcaagaccucccugcccaagugcuggcuggugagcaacggcuccuaccugaacgagacgcacuucagcgacgacaucgagcagcaggccgacaacaugaucaccgagcuccugcagaaggaguacauggaccgccaggggaagacgccccugggccucgucgaccuguucguguucuccaccagcuucuaccugaucuccaucuuccugcaccucgugaagaucccgacccaccggcacaucgucgggcgccccugccccaagccccaccggcugaaccacaugggcaucugcagcugcgggcuguacaagcacccgggcgugcccgugaaguggaagcgcuga

SEQ ID NO: 580 - RNA, 1473 nt, Artificial Sequence
  derived and/or modified protein sequence (opt1) from LASV(Lassa virus/H.sapiens-wt/NGA/2016/ISTH_0565;Clade II)__AVO03637__GPC
augggccagaucgugaccuucuuccaggaggucccccacgugaucgaggaggugaugaacaucguccugaucgcccucagccugcuggccauccucaaggggaucuacaacguggcgaccugcggccuguucgggcugaucuccuuccuccugcugugcggccgcagcugcuccacgaccuacaaggggguguacgagcuccagacccuggagcuggacauggccaaccucaacaugaccaugccgcugagcugcacgaagaacuccagccaccacuacaucauggucggcaacgagaccggccuggagcucacccugaccaacacguccaucaucaaccacaaguucugcaaccugagcgacgcccacaagaagaaccucuacgaccacgcccugauguccaucaucagcaccuuccaccuguccauccccaacuucaaccaguacgaggccaugagcugcgacuucaacgggggcaagaucuccgugcaguacaaccucagccacaccuacgcgguggacgccgccaaccacugcgggaccaucgccaacggcguccugcagacguucaugcggauggcguggggcggguccuacaucgcccuggacagcggcaaggggaacugggacugcaucaugaccuccuaccaguaccucaucauccagaacaccaccugggaggaccacugccaguucagccgccccucccccaucggcuaccuggggcugcucagccagcggacgcgcgacaucuacaucagccggcgccugcugggcaccuucaccuggacccucuccgacagcgagggcaacgaggcccccgggggcuacugccugacgcgguggaugcugaucgaggccgagcucaagugcuucgggaacaccgccaucgcgaagugcaacgagaagcacgacgaggaguucugcgacaugcugcgccuguucgacuucaacaagcaggccaucaagcggcucaaguccgaggcccagaugagcauccagcugaucaacaaggccgugaacgcccugaucaacgaccagcucaucaugaagaaccaccuccgcgacaucaugggcauccccuacugcaacuacucccgguacugguaccugaaccacaccgugaccgggaagacgagccugccccgcugcuggcugaucuccaacggcagcuaccugaacgagacccacuucuccgacgacaucgagcagcaggcggacaacaugaucaccgagcuccugcagaaggaguacauggaccggcagggcaagaccccgcuggggcucgucgaccuguucguguucagcacguccuucuaccugaucagcaucuuccugcaccucgugaagaucccgacccaccgccacaucgucggccggcccugccccaagccccaccgccugaaccacauggggaucugcuccugcggccuguacaagcacccgggggugcccgugaaguggaagcgguga

SEQ ID NO: 581 - RNA, 1473 nt, Artificial Sequence
  derived and/or modified protein sequence (opt1) from LASV(Lassa virus/H.sapiens-wt/NGA/2016/ISTH_0572;Clade II)__AVO03611__GPC
augggccagaucaucaccuucuuccaggaggugccccacgucaucgaggaggugaugaacaucgugcugaucgcccucagccugcuggccauccucaaggggaucuacaacgucgcgaccugcggccuguucgggcugguggccuuccuccugcugugcggccgcuccugcagcacgaccuacaaggggguguacgagcuccagacccuggagcuggacauggccucccucaacaugaccaugccgcugagcugcacgaagaacaacucccaccacuacaucauggucggcaacgagaccggccuggagcucacccugaccaacacgagcaucaucaaccacaaguucugcaaccuguccgacgcccacaagaagaaccucuacgaccacgcccugaugagcaucaucuccaccuuccaccugagcauccccaacuucaaccagcacgaggcgauguccugcgacuucaacgggggcaagaucagcgugcaguacaaccucucccacaccuacgccguggacgccgccaaccacugcgggaccaucgcgaacggcguccugcagacguucaugcggauggccuggggcgggagcuacaucgcccuggacuccggcaaggggagcugggacugcaucaugaccuccuaccaguaccucaucauccagaacaccaccugggaggaccacugccaguucagccgccccucccccaucggcuaccuggggcugcucagccagcggacgcgcgacaucuacaucagccggcgccugcugggcaccuucaccuggacccucuccgacagcgagggcaacgagacgcccgggggcuacugccugacccgguggaugcugaucgaggccgagcucaagugcuucgggaacaccgccguggcgaagugcaacgagaagcacgacgaggaguucugcgacaugcugcgccuguucgacuucaacaagcaggccauccggcgccucaagaccgaggcccagauguccauccagcugaucaacaaggccgugaacgcccugaucaacgaccagcucaucaugaagaaccaccuccgggacaucaugggcauccccuacugcaacuacagcaaguacugguaccugaaccacacggucaccgggcgcaccucccugccccggugcuggcuggugagcaacggcuccuaccugaacgagacccacuucagcgacgacaucgagcagcaggcggacaacaugaucacggagcuccugcagaaggaguacauggaccgccagggcaagaccccgcuggggcucguggaccuguucgucuucuccaccagcuucuaccugaucuccaucuuccugcaccucaucaagaucccgacccaccggcacgugaucggcaagcccugccccaagccccaccgccugaaccacauggggaucugcagcugcggccuguacaagcacccgggggugcccgucaaguggaagcgguga

SEQ ID NO: 582 - RNA, 1473 nt, Artificial Sequence
  derived and/or modified protein sequence (opt1) from LASV(Lassa virus/H.sapiens-wt/NGA/2016/ISTH_0610;Clade II)__AVO03585__GPC
augggccagaucaucaccuucuuccaggaggugccccacgucaucgaggaggugaugaacaucgugcugaucgcccucagccugcuggccauccucaagggggucuacaacguggcgaccugcggccuguucgggcugguguccuuccuccugcugugcggccgcagcugcuccacgaccuacaagggggucuacgagcuccagacccuggagcuggacauggccagccucaacaugaccaugccgcuguccugcacgaagaacaacagccaccacuacaucauggugggcaacgagaccggccuggagcucacccugaccaacacguccaucaucaaccacaaguucugcaaccugagcgacgcccacaagaagaaccucuacgaccacgcccugauguccaucaucagcaccuuccaccuguccauccccaacuucaaccaguacgaggccaugagcugcgacuucaacgggggcaagaucuccgugcaguacaaccucagccacaccuacgcggucgacgccgccaaccacugcgggaccaucgccaacggcgugcugcagacguucaugcggauggcguggggcggguccuacaucgcccuggacagcggccgcggguccugggacugcaucaugaccagcuaccaguaccucaucauccagaacaccaccugggaggaccacugccaguucucccggcccagccccaucggcuaccuggggcugcucagccagcgcacgcgggacaucuacaucucccgccggcugcugggcaccuucaccuggacccucagcgacuccgagggcaacgagacgcccgggggcuacugccugacccgcuggaugcugaucgaggccgagcucaagugcuucgggaacaccgccguggccaagugcaacgagaagcacgacgaggaguucugcgacaugcugcggcuguucgacuucaacaagcaggcgauccgccggcucaaggccgaggcccagaugagcauccagcugaucaacaaggccgucaacgcccugaucaacgaccagcucaucaugaagaaccaccuccgcgacaucaugggcaucccguacugcaacuacuccaaguacugguaccugaaccacaccgugacggggcggaccagccugccccgcugcuggcugguguccaacggcagcuaccugaacgagacccacuucuccgacgacaucgagcagcaggcggacaacaugaucaccgagcuccugcagaaggaguacaucgaccggcagggcaagacgccccuggggcucgucgaccuguucguguucagcaccuccuucuaccugaucagcaucuuccugcaccucgugaagaucccgacccaccgccacaucaucggcaagcccugccccaagccccaccggcugaaccacauggggaucugcuccugcggccuguacaagcacccggggguccccgugaaguggaagcgcuga

SEQ ID NO: 583 - RNA, 1473 nt, Artificial Sequence
  derived and/or modified protein sequence (opt1) from LASV(Lassa virus/H.sapiens-wt/NGA/2016/ISTH_0621;Clade II)__AVO03543__GPC
augggccagaucgugaccuucuuccaggagaucccccacgucguggaggagaucaugaacaucgugcugaucacccucagccugcuggccauccucaaggggcuguacaacuucgccacgugcggccugaucgggcucaucaccuuccuguuccugugcggccgcuccugcagcaccaucuacaagggguccuaccagcuccaggcgcuggagcugaacauggagacccucaacaugacgaugccgcugagcugcaccaagaacaacucccaccacuacauccgggucggcaacgagaccggccuggagcucacccugacgaacaccagcaucaucgaccacaaguucugcaaccuguccgacgcccacaagcgcaaccucuacgaccacacccugaugagcaucaucuccaccuuccaccugagcauccccaacuucaaccaguacgaggccauguccugcgacuucaacgggggcaagaucagcgugcaguacaaccucucccacagcuacgccggggacgccgcgcggcacugcggcacgguggccaacgggguccugcagaccuucaugcgcauggccuggggcggcuccuacaucgcccuggacagcgggaagggcaacugggacugcaucaugaccuccuaccaguaccucaucauccagaacaccacgugggagaaccacugccaguucagccggcccucccccaucggguaccugggccugcucagccagcgcacccgggacaucuacaucagccgccggcugcugggcaccuucaccuggacgcucuccgacagcgaggggaaggagaccccgggcggguacugccugacccgcuggaugcugaucgaggcggagcucaagugcuucggcaacaccgccguggccaagugcaacgagaagcacgacgaggaguucugcgacaugcugcggcuguucgacuucaacaagcaggccauccagcgccucaagacggaggcccagauguccauccagcugaucaacaaggcggugaacgcccugaucaacgaccagcucaucaugaagaaccaccuccgggacaucauggggauccccuacugcaacuacagcaaguacugguaccugaaccacaccaccaccggcaagacgucccugcccaagugcuggcuggucagcaacggcuccuaccugaacgagacccacuucagcgacgacaucgagcagcaggccgacaacaugaucaccgagaugcuccagaaggaguacaucgaccgccaggggaagacgccccugggccugguggaccucuucguguucuccaccagcuucuaccugaucuccaucuuccugcaccugaucaagaucccgacccaccggcacaucgucggcaagagcugccccaagccccaccgccucaaccacauggggaucugcuccugcgggcuguacaagcagcccggcgugcuggugaaguggaagcgguga

SEQ ID NO: 584 - RNA, 1473 nt, Artificial Sequence
  derived and/or modified protein sequence (opt1) from LASV(Lassa virus/H.sapiens-wt/NGA/2016/ISTH_0701;Clade II)__AVO03629__GPC
augggccagaucaucaccuucuuccaggaggugccccacgucaucgaggaggugaugaacaucgugcugaucgcccucagccugcuggccauccucaaggggaucuacaacgucgcgaccugcggccuguucgggcugguguccuuccuccugcugugcggccgcagcugcuccacgaccuacaaggggguguacgagcuccagacccuggagcuggacauggccagccucaacaugaccaugccgcuguccugcacgaagaacaacagccaccacuacaucauggucggcaacgagaccggccuggagcucacccugaccaacacguccaucaucgggcacaaguucugcaaccugagcgacgcccacaagaagaaccucuacgaccacgcccugauguccaucaucagcaccuuccaccuguccauccccaacuucaaccaguacgaggccaugagcugcgacuucaacggcgggaagaucuccgugcaguacaaccucagccacgcguacgccguggacgccgccaaccacugcggcaccaucgcgaacgggguccugcagaccuucaugcggauggccuggggcggcuccuacaucgcccuggacagcgggaagggcuccugggacugcaucaugacgagcuaccaguaccucaucauccagaacaccaccugggaggaccacugccaguucucccgccccagccccaucggguaccugggccugcucagccagcggacccgcgacaucuacaucucccggcgccugcugggcacguucaccuggacccucagcgacuccgaggggaacgagaccccgggcggguacugccugacgcgguggaugcugaucgaggccgagcucaagugcuucggcaacaccgccguggcgaagugcaacgagaagcacgacgaggaguucugcgacaugcugcgccuguucgacuucaacaagcaggccauccggcgccucaagaccgaggcccagaugagcauccagcugaucaacaaggccgugaacgcccugaucaacgaccagcucaucaugaagaaccaccuccgggacaucauggggauccccuacugcaacuacuccaaguacugguaccugaaccacaccgucacgggcaagaccagccugccccgcugcuggcugguguccaacggcagcuaccugaacgagacccacuucuccgacgacaucgagcagcaggcggacaacaugaucaccgagcuccugcagaaggaguacaucgaccggcaggggaagacgccccugggccucguggaccuguucgucuucagcaccuccuucuaccugaucagcaucuuccugcaccucgugaagaucccgacccaccgccacgugaucgggaagcccugccccaagccccaccggcugaaccacaugggcaucugcuccugcgggcuguacaagcacccgggcguccccgugaaguggaagcgcuga

SEQ ID NO: 585 - RNA, 1473 nt, Artificial Sequence
  derived and/or modified protein sequence (opt1) from LASV(Lassa virus/H.sapiens-wt/NGA/2016/ISTH_0702;Clade II)__AVO03557__GPC
augggccagaucaucaccuucuuccaggaggugccccacgucaucgaggaggugaugaacaucgugcugaucgcccucagccugcuggccguccucaaggggaucuacaacguggcgaccugcggccuguucgggcugguggccuuccuccugcugugcggccgcuccugcagcacgaccuacaagggggucuacgagcuccagacccuggagcuggacauggccaaccucaacaugaccaugccgcuguccugcacgaagaacaacagccaccacuacaucauggugggcaacgagaccggccuggagcucacccugaccaacacguccaucaucaaccacaaguucugcaaccugagcgacgcccacaagaagaaccucuacgaccacgcccugauguccaucaucagcaccuuccaccuguccauccccaacuucaaccaguacgaggcgaugagcugcgacuucaacgggggcaagaucuccgugcaguacaaccucagccacaccuacgccgucgacgccgccaaccacugcgggaccaucgcgaacggcgugcugcagacguucaugcggauggccuggggcggguccuacaucgcccuggacagcggcaagggguccugggacugcaucaugaccagcuaccaguaccucaucauccagaacaccaccugggaggaccacugccaguucucccgccccagccccaucggcuaccuggggcugcucucccagcggacgcgcgacaucuacaucagccggcgccugcugggcaccuucaccuggacccucagcgacuccgagggcaacgagacgcccgggggcuacugccugacccgguggaugcugaucgaggccgagcucaagugcuucgggaacaccgccguggcgaagugcaacgagaagcacgacgaggaguucugcgacaugcugcgccuguucgacuucaacaagcaggccauccggcgccucaagaccgaggcccagaugagcauccagcugaucaacaaggccgucaacgcccugaucaacgaccagcucaucaugaagaaccaccuccgggacaucaugggcauccccuacugcaacuacuccaaguacugguaccugaaccacacggugaccgggcgcaccagccugccccggugcuggcugguguccaacggcagcuaccugaacgagacccacuucuccgacgacaucgagcagcaggcggacaacaugaucacggagcuccugcagaaggaguacauggaccgccagggcaagaccccgcuggggcucgucgaccuguucguguucagcaccuccuucuaccugaucagcaucuuccugcaccucaucaagaucccgacccaccggcacgugaucggcaagcccugccccaagccccaccgccugaaccacauggggaucugcuccugcggccuguacaagcacccggggguccccgugaaguggaagcgguga

SEQ ID NO: 586 - RNA, 1473 nt, Artificial Sequence
  derived and/or modified protein sequence (opt1) from LASV(Lassa virus/H.sapiens-wt/NGA/2016/ISTH_0703;Clade II)__AVO03597__GPC
augggccagaucaucaccuucuuccaggaggugccccacgucaucgaggaggugaugaacaucgugcugaucgcccucagccugcuggccauccucaaggggaucuacaacgucgcgaccugcggccuguucgggcugguguccuuccuccugcugugcggccgcagcugcuccacgaccuacaaggggguguacgagcuccagacccuggagcuggacauggccagccucaacaugaccaugccgcuguccugcacgaagaacaacagccaccacuacaucauggucggcaacgagaccggccuggagcucacccugaccaacacguccaucaucaaccacaaguucugcaaccugagcgacgcccacaagaagaaccucuacgaccacgcccugauguccaucaucagcaccuuccaccuguccauccccaacuucaaccaguacgaggccaugagcugcgacuucaacgggggcaagaucuccgugcaguacaaccucagccacaccuacgcgguggacgccgccucccacugcgggaccaucgccaacggcguccugcagacguucaugcggauggcguggggcgggagcuacaucgcccuggacuccggcaaggggagcugggacugcaucaugaccuccuaccaguaccucaucauccagaacaccaccugggaggaccacugccaguucagccgccccagccccaucggcuaccuggggcugcucucccagcggacgcgcgacaucuacaucagccggcgccugcugggcaccuucaccuggacccucuccgacagcgagggcaacgagacgcccgggggcuacugccugacccgguggaugcugaucgaggccgagcucaagugcuucgggaacaccgccguggccaagugcaacgagaagcacgacgaggaguucugcgacaugcugcgccuguucgacuucaacaagcaggcgauccggcgccucaagaccgaggcccagauguccauccagcugaucaacaaggccgugaacgcccugaucaacgaccagcucaucaugaagaaccaccuccgggacaucaugggcauccccuacugcaacuacagcaaguacugguaccugaaccacacggucaccgggcgcaccucccugccccggugcuggcuggugagcaacggcuccuaccugaacgagacccacuucagcgacgacaucgagcagcaggccgacaacaugaucacggagcuccugcagaaggaguacaucgagcgccagggcaagaccccgcuggggcucguggaccuguucgucuucuccaccagcuucuaccugaucuccaucuuccugcaccucaucaagaucccgacccaccggcacgugaucggcaagcccugccccaagccccaccgccugaaccacauggggaucugcagcugcggccuguacaagcacccgggggugcccgucaaguggaagcgguga

SEQ ID NO: 587 - RNA, 1473 nt, Artificial Sequence
  derived and/or modified protein sequence (opt1) from LASV(Lassa virus/H.sapiens-wt/NGA/2016/ISTH_0717;Clade II)__AVO03547__GPC
augggccagaucgugaccuucuuccaggaggucccccacgugaucgaggaggugaugaacaucguccugaucgcccucagcauccuggccauccugaaggggcucuacaacguggcgaccugcggccugaucgggcuggugacguuccuccugcuguccggccgcagcugcuccaugaucuacaagggggucuacgagcuccagacccuggagcugaacauggagacccucaacaugaccaugccgcugagcugcacgaagaacaacucccaccacuacaucauggugggcaacgagaccggccuggagcucacccugaccaacacgagccugcucaaccacaaguucugcaaccuguccgacgcccacaagaagaaccuguacgaccacacccucaugagcaucaucuccaccuuccaccugagcauccccaacuucaaccaguacgaggccauguccugcgacuucaacgggggcaagaucaccgugcaguacaaccugagccacacguacgccgucgacgccgugaaccacugcgggacccucgcgaacggcauccugcagaccuucaugcggauggccuggggcggguccuacaucgcccuggacagccgccacggcuccugggacugcaucaugaccagcuaccaguaccucaucauccagaacacgaccugggaggaccacugccaguucucccggcccagccccaucggguaccugggccugcucucccagcgcacccgggacaucuacaucagccgccggcugcuggggaccuucacguggacccucagcgacuccgagggcaacgagaccccgggcggguacugccugacccgcuggaugcugaucgaggccgagcucaagugcuucggcaacacggcgguggccaagugcaacgagaagcacgacgaggaguucugcgacaugcugcggcuguucgacuucaacaagcaggccauccgccggcucaaggccgaggcccagaugagcauccagcugaucaacaaggcggucaacgcccugaucaacgaccagcucaucaugaagaaccaccuccgcgacaucauggggauccccuacugcaacuacuccaaguacugguaccugaaccacaccagcaccggccggaccucccugccccgcugcuggcuggugagcaacggguccuaccugaacgagacgcacuucagcgacgacaucgagcagcaggccgacaacaugaucaccgagaugcuccagaaggaguaccuggaccggcagggcaagacgccccugggccugguggaccucuucgucuucuccaccagcuucuaccugaucuccaucuuccugcaccucaucaagaucccgacccaccgccacaucguggggaagcccugccccaagccccaccggcugaaccacaugggcaucugcagcugcgggcuguacaagcagccgggcgugcccguccgcuggaagcgguga

SEQ ID NO: 588 - RNA, 1473 nt, Artificial Sequence
  derived and/or modified protein sequence (opt1) from LASV(Lassa virus/H.sapiens-wt/NGA/2016/ISTH_0753;Clade II)__AVO03609__GPC
augggccagaucaucaccuucuuccaggaggugccccacgucaucgaggaggugaugaacaucgugcugaucgcccucagccugcuggccauccucaaggggaucuacaacgucgcgaccugcggccuguucgggcugguguccuuccuccugcugugcggccgcagcugcuccacgaccuacaaggggguguacgagcuccagacccuggagcuggacauggccagccucaacaugaccaugccgcuguccugcacgaagaacaacagccaccacuacaucauggucggcaacgagaccggccuggagcucacccugaccaacacguccaucaucaaccacaaguucugcaaccugagcgacgcccacaagaagaaccucuacgaccacgcccugauguccaucaucagcaccuuccaccuguccauccccaacuucaaccaguacgaggccaugagcugcgacuucaacgggggcaagaucuccgugcaguacaaccucagccacaccuacgcgguggacgccgccaaccacugcgggaccaucgccaacggcguccugcagacguucaugcggauggcguggggcggguccuacaucgcccuggacagcggcaaggggaacugggacugcaucaugaccuccuaccaguaccucaucauccagaacaccaccugggaggaccacugccaguucagccgccccucccccaucggcuaccuggggcugcucagccagcggacgcgcgacaucuacaucagccggcgccugcugggcaccuucaccuggacccucuccgacagcgagggcaacgagacgcccgggggcuacugccugacccgguggaugcugaucgaggccgagcucaagugcuucgggaacaccgccguggccaagugcaacgagaagcacgacgaggaguucugcgacaugcugcgccuguucgacuucaacaagcaggcgaucucccggcucaagaccgaggcccagaugagcauccagcugaucaacaaggccgugaacgcccugaucaacgaccagcucaucaugaagaaccaccuccgcgacaucaugggcauccccuacugcaacuacuccaaguacugguaccugaaccacacggucaccgggcggaccagccugccccgcugcuggcugguguccaacggcagcuaccugaacgagacccacuucuccgacgacaucgagcagcaggccgacaacaugaucacggagcuccugcagaaggaguacauggaccggcagggcaagaccccgcuggggcucguggaccuguucgucuucagcaccuccuucuaccugaucagcaucuuccugcaccucgugaagaucccgacccaccgccacgugaucggcaagcccugccccaagccccaccggcugaaccacauggggaucugcuccugcggccuguacaagcacccggggguccccgugaaguggaagcgcuga

SEQ ID NO: 589 - RNA, 1473 nt, Artificial Sequence
  derived and/or modified protein sequence (opt1) from LASV(Lassa virus/H.sapiens-wt/NGA/2016/ISTH_0759;Clade II)__AVO03593__GPC
augggccagaucaucaccuucuuccaggaggugccccacgucaucgaggaggugaugaacaucgugcugaucgcccucagccugcuggccauccucaaggggaucuacaacgucgcgaccugcggccuguucgggcugguguccuuccuccugcugugcggccgcagcugcuccacgaccuacaaggggguguacgagcuccagacccuggagcuggacauggccagccucaacaugaccaugccgcuguccugcacgaagaacaacagccaccacuacaucauggucggcaacgagaccggccuggagcucacccugaccaacacguccaucaucaaccacaaguucugcaaccugagcgacgcccacaagaagaaccucuacgaccacacccugauguccaucaucagcaccuuccaccuguccauccccaacuucaaccaguacgaggccaugagcugcgacuucaacgggggcaagaucuccgugcaguacaaccucagccacaccuacgccguggacgcggccaaccacugcgggacgaucgccaacggcguccugcagaccuucaugcggauggccuggggcggguccuacaucgcgcuggacagcggcaagggguccugggacugcaucaugaccagcuaccaguaccucaucauccagaacaccuccugggaggaccacugccaguucagccgccccagccccaucggcuaccuggggcugcucucccagcggacgcgcgacaucuacaucagccggcgccugcugggcaccuucaccuggacccucuccgacagcgagggcaacgagacgcccgggggcuacugccugacccgguggaugcugaucgaggccgagcucaagugcuucgggaacaccgccguggccaagugcaacgagaagcacgacgaggaguucugcgacaugcugcgccuguucgacuucaacaagcaggccauccggcgccucaagaccgaggcgcagauguccauccagcugaucaacaaggccgugaacgcccugaucaacgaccagcucaucaugaagaaccaccuccgggacaucaugggcauccccuacugcaacuacagcaaguacugguaccugaaccacacggucaccgggaagaccucccugccccgcugcuggcuggugagcaacggcuccuaccugaacgagacccacuucagcgacgacaucgagcagcaggccgacaacaugaucacggagcuccugcagaaggaguacaucgaccggcagggcaagaccccgcuggggcucguggaccuguucgucuucuccaccagcuucuaccugaucuccaucuuccugcaccucgugaagaucccgacccaccgccacgugaucggcaagcccugccccaagccccaccggcugaaccacauggggaucugcagcugcggccuguacaagcacccggggguccccgugaaguggaagcgcuga

SEQ ID NO: 590 - RNA, 1473 nt, Artificial Sequence
  derived and/or modified protein sequence (opt1) from LASV(Lassa virus/H.sapiens-wt/NGA/2016/ISTH_0777;Clade II)__AVO03615__GPC
augggccagaucaucaccuucuuccaggaggugccccacgucaucgaggaggugaugaacaucgugcugaucgcccucagccugcuggccauccucaaggggaucuacaacgucgcgaccugcggccugcuggggcucaucuccuuccugcugcucugcggccgcagcugcuccacgaccuacaaggggguguacgagcugcagacccuggagcucgacauggccaaccugaacaugaccaugccgcugagcugcacgaagaacuccagccaccacuacaucauggugggcaacgagaccggccucgagcugacccugaccaacacguccaucaucaaccacaaguucugcaaccucagcgacgcccacaagaagaaccuguacgaccacgcccugauguccaucaucagcaccuuccaccucuccauccccaacuucaaccaguacgaggccaugagcugcgacuucaacgggggcaagaucuccguccaguacaaccugagccacgcguacgccguggacgccgccaaccacugcgggaccaucgcgaacggcgugcugcagaccuucaugcggauggccuggggcggguccuacaucgcccucgacagcggcaaggggaacugggacugcaucaugacguccuaccaguaccugaucauccagaacaccaccugggaggaccacugccaguucagccgccccucccccaucggcuaccuggggcuccugagccagcggacccgcgacaucuacaucagccggcgccugcucggcacguucaccuggacccuguccgacagcgagggcaacgaggcccccgggggcuacugccugacccgguggaugcucaucgaggccgagcugaagugcuucgggaacacggcgaucgccaagugcaacgagaagcacgacgaggaguucugcgacaugcugcgccucuucgacuucaacaagcaggccauccggcgccugaagaccgaggcccagauguccauccagcugaucaacaaggccgucaacgcgcucaucaacgaccagcugaucaugaagaaccaccuccgggacaucaugggcauccccuacugcaacuacagcaaguacugguaccugaaccacaccgugaccgggaagacgucccugccccgcugcuggcugaucagcaacggcuccuaccucaacgagacccacuucagcgacgacaucgagcagcaggccgacaacaugaucaccgagcugcugcagaaggaguacauggaccggcagggcaagaccccgcucgggcugguggaccuguucgucuucuccacgagcuucuaccugaucuccaucuuccuccaccuggugaagaucccgacccaccgccacaucgugggcaagcccugccccaagccccaccggcugaaccacauggggaucugcagcugcggccucuacaagcacccggggguccccgugaaguggaagcgcuga

SEQ ID NO: 591 - RNA, 1473 nt, Artificial Sequence
  derived and/or modified protein sequence (opt1) from LASV(Lassa virus/H.sapiens-wt/NGA/2016/ISTH_0779;Clade II)__AVO03655__GPC
augggccagaucaucaccuucuuccaggaggugccccacgucguggaggaggugaugaacgucgugcugaucgcccucagccugcuggccauccucaaggggaucuacaacaucgcgaccugcggccuguucgggcugaucuccuuccuccugcugugcggccgcagcugcuccacgaccuacaaggggguguacgagcuccagacccuggagcuggacauggccaaccucaacaugaccaugccgcugagcugcacgaagaacaacucccaccacuacaucauggucggcaacgagaccggccuggagcucacccugaccaacacgagcaucaucaaccacaaguucugcaaccuguccgacgcccacaagaagaaccucuacgaccacacccugaugagcaucaucuccaccuuccaccugagcauccccaacuucaaccaguacgaggccauguccugcgacuucaacgggggcaagaucagcgugcaguacaaccucucccacggguacgccguggacgcggccaaccacugcggcaccaucgccaacgggguccugcagacguucaugcggauggccuggggcggcagcuacaucgcgcuggacuccgggaagggcaacugggacugcaucaugaccagcuaccaguaccucgugauccagaacaccaccugggaggaccacugccaguucucccgccccagccccaucggguaccugggccugcucucccagcggacgcgcgacaucuacaucagccggcgccugcugggcaccuucaccuggacccucagcgacuccgaggggaacgacgccccgggcggguacugccugacgcgguggaugcugaucgaggccgagcucaagugcuucggcaacaccgccaucgccaagugcaacgagaagcacgacgaggaguucugcgacaugcugcgccuguucgacuucaaccggcaggcgaucaagcgccucaagaccgaggcccagaugagcauccagcugaucaacaaggccgugaacgcccugaucaacgaccagcucaucaugaagaaccaccuccgggacaucauggggauccccuacugcaacuacuccaaguacugguaccugaacaacaccgucacgggcaagagcucccugcccaagugcuggcuggugagcaacggcuccuaccugaacgagacccacuucagcgacgacaucgagcagcaggccgacaacaugaucaccgagaugcuccagaaggaguacaucgaccgccaggggaagacgccccugggccugguggaccucuucgucuucuccaccagcuucuaccugaucuccaucuuccugcaccuggugcggaucccgacccaccgccacaucaccgggaagcccugccccaagccccaccggcucaaccacaugggcaucugcagcugcgggcuguacaagcagccgggcgugcccgucaaguggaagcgcuga

SEQ ID NO: 592 - RNA, 1473 nt, Artificial Sequence
  derived and/or modified protein sequence (opt1) from LASV(Lassa virus/H.sapiens-wt/NGA/2016/ISTH_0917;Clade II)__AVO03535__GPC
augggccagaucgugaccuucuuccaggaggucccccacgugaucgaggagaucaugaacaucgugcugaucacccucagccugcuggccauccucaagggggucuacaaccuggccacgugcggccugaucgggcucaucaccuuccuguuccugugcggccgcuccugcagcaugaccuacaaggggaacuaccagcucgagacccuggagcugaacauggagaugcucaacaugacgaugccgcuguccugcaccaagaacaacagccaccacuacauccgggugggcaacgagaccggccuggagcucacccugacgaacaccuccaucauccagcacaaguucugcaaccugagcgacgcgcacaagcgcaaccucuacgaccacucccugaugagcaucguguccaccuuccaccugagcauccccaacuucaaccaguacgaggccauguccugcgacuucaacgggggcaagaucagcauccaguacaaccucucccacaccuacgccggggacgccgccaagcacugcggcacgcuggcgaacgggauccugcagaccuucaugcggauggccuggggcggcagcuacaucgcccucgacuccgggcgcggcgggugggacugcaucaugaccaacuaccaguaccugaucauccagaacgucaccugggaggaccacugccaguucagccggcccucccccaucggcuaccugggccuccugagccagcgcacgcgggagguguacaucucccgccggcugcucgggaccuucaccuggacccugagcgacagcgagggcaacgaggcccccgggggcuacugccugacgcgcuggaugcucaucgaggcggagcugaagugcuucgggaacaccgccguggccaagugcaacgagaagcacgacgaggaguucugcgacaugcugcggcuguucgacuucaacaagcaggccauccgccggcugaaggccgagacccagauguccauccagcugaucaacaaggcggucaacgcccucaucaacgaccagcugaucaugaagaaccaccuccgcgacaucaugggcaucccguacugcaacuacagcaaguacugguaccucaaccacaccaucacgggccggaccucccugccccgcugcuggcuggugagcaacggguccuaccucaacgagacccacuucagcgacgacaucgagcagcaggccgacaacaugaucaccgagaugcugcagaaggaguacaucgaccggcagggcaagacgccccuggggcucguggaccuguucgucuucuccaccagcuucuaccugaucuccaucuuccugcaccucgugaagaucccgacccaccgccacaucgugggcaagagcugccccaagccccaccggcugaaccacauggggaucugcuccugcggccuguacaagcgccccggcgucagcgugcgguggaagcgcuga

SEQ ID NO: 593 - RNA, 1473 nt, Artificial Sequence
  derived and/or modified protein sequence (opt1) from LASV(Lassa virus/H.sapiens-wt/NGA/2016/ISTH_1006;Clade II)__AVO03643__GPC
augggccagaucaucaccuucuuccaggaggugccccacgucaucgaggaggugaugaacaucgugcugaucgcccucagccugcuggccauccucaaggggaucuacaacgucgcgaccugcggccuguucgggcugguggccuuccuccugcugugcggccgcuccugcagcacgaccuacaaggggguguacgagcuccagacccuggagcuggacauggccucccucaacaugaccaugccgcugagcugcacgaagaacaacucccaccacuacaucauggucggcaacgagaccggccuggagcucacccugaccaacacgagcaucaucaaccacaaguucugcaaccuguccgacgcccacaagaagaaccucuacgaccacgcccugaugagcaucaucuccaccuuccaccugagcauccccaacuucaaccaguacgaggcgauggggugcgacuucaacggcgggaagaucuccgugcaguacaaccucagccacuccuacgccguggacgccgccaaccacugcggcaccaucgcgaacgggguccugcagaccuucaugcggauggccuggggcggcagcuacaucgcccuggacuccgggaagggcagcugggacugcaucaugacguccuaccaguaccucaucauccagaacaccaccugggaggaccacugccaguucagccgccccucccccaucggguaccugggccugcucagccagcggacccgcgacaucuacaucagccggcgccugcugggcacguucaccuggacccucuccgacagcgaggggaacgagaccccgggcggguacugccugacgcgguggaugcugaucgaggccgagcucaagugcuucggcaacaccgccguggcgaagugcaacgagaagcacgacgaggaguucugcgacaugcugcgccuguucgacuucaacaagcaggccauccggcgccucaagaccgaggcccagauguccauccagcugaucaacaaggccgugaacgcccugaucaacgaccagcucaucaugaagaaccaccuccgggacaucauggggauccccuacugcaacuacagcaaguacugguaccugaaccacaccgucacgggccgcaccucccugccccggugcuggcuggugagcaacggcuccuaccugaacgagacccacuucagcgacgacaucgagcagcaggcggacaacaugaucaccgagcuccugcagaaggaguacauggaccgccaggggaagacgccccugggccucguggaccuguucgucuucuccaccagcuucuaccugaucuccaucuuccugcaccucaucaagaucccgacccaccggcacgugaucgggaagcccugccccaagccccaccgccugaaccacaugggcaucugcagcugcgggcuguacaagcacccgggcgugcccgucaaguggaagcgguga

SEQ ID NO: 594 - RNA, 1473 nt, Artificial Sequence
  derived and/or modified protein sequence (opt1) from LASV(Lassa virus/H.sapiens-wt/NGA/2016/ISTH_1026;Clade II)__AVO03589__GPC
augggccagaucaucaccuucuuccaggaggugccccacgucaucgaggaggugaugaacaucgugcugaucgcccucagccugcuggccauccucaaggggaucuacaacgucgcgaccugcggccuguucgggcugguguccuuccuccugcugugcggccgcagcugcuccacgaccuacaaggggguguacgagcuccagacccuggagcuggacauggccagccucaacaugaccaugccgcuguccugcacgaagaacaacagccaccacuacaucauggucggcaacgagaccggccuggagcucacccugaccaacacguccaucaucaaccacaaguucugcaaccugagcgacgcccacaagaagaaccucuacgaccacgcccugauguccaucaucagcaccuuccaccuguccauccccaacuucaaccaguacgaggccaugagcugcgacuucaacgggggcaagaucuccgugcaguacaaccucagccacgcguacgccaucgacgccgccucccacugcgggaccaucgcgaacggcgugcugcagaccuucaugcggauggccuggggcgggagcuacaucgcccuggacuccggcaaggggagcugggacugcaucaugacguccuaccaguaccucaucauccagaacaccaccugggaggaccacugccaguucagccgccccagccccaucggcuaccuggggcugcucucccagcggacccgcgacaucuacaucagccggcgccugcugggcacguucaccuggacccucuccgacagcgagggcaacgagacccccgggggcuacugccugacgcgguggaugcugaucgaggccgagcucaagugcuucgggaacaccgccgucgcgaagugcaacgagaagcacgacgaggaguucugcgacaugcugcgccuguucgacuucaacaagcaggccauccggcgccucaagaccgaggcccagauguccauccagcugaucaacaaggccgugaacgcccugaucaacgaccagcucaucaugaagaaccaccuccgggacaucaugggcaucccguacugcaacuacagcaaguacugguaccugaaccacaccgugacggggaagaccucccugccccgcugcuggcuggucagcaacggcuccuaccugaacgagacccacuucagcgacgacaucgagcagcaggcggacaacaugaucaccgagcuccugcagaaggaguaccuggaccggcagggcaagacgccccucgggcugguggaccuguucguguucuccaccagcuucuaccugaucuccaucuuccuccaccuggucaagaucccgacccaccgccacgugaucggccggcccugccccaagccccaccgccugaaccacauggggaucugcagcugcggccucuacaagcacccgggggugcccgucaaguggaagcgguga

SEQ ID NO: 595 - RNA, 1473 nt, Artificial Sequence
  derived and/or modified protein sequence (opt1) from LASV(Lassa virus/H.sapiens-wt/NGA/2016/ISTH_1070;Clade II)__AVO03651__GPC
augggccagaucaucaccuucuuccaggaggugccccacgucaucgaggaggugaugaacaucgugcugaucgcccucagccugcuggccauccucaaggggaucuacaacgucgcgaccugcggccuguucgggcugguguccuuccuccugcugugcggccgcagcugcuccacgaccuacaaggggguguacgagcuccagacccuggagcuggacauggccagccucaacaugaccaugccgcuguccugcacgaagaacaacagccaccacuacaucauggucggcaacgagaccggccuggagcucacccugaccaacacguccaucaucaaccacaaguucugcaaccugagcgacgcccacaagaagaaccucuacgaccacgcccugauguccaucaucagcaccuuccaccuguccauccccaacuucaaccaguacgaggccaugagcugcgacuucaacgggggcaagaucuccgugcaguacaaccucagccacaccuucgcgguggacgccgccaaccacugcgggaccaucgccaacggcguccugcagacguucaugcggauggcguggggcggguccuacaucgcccuggacagcggcaagggguccugggacugcaucaugaccagcuaccaguaccucaucauccagaacaccaccugggaggaccacugccaguucucccgccccagccccaucggcuaccuggggcugcucagccagcggacgcgcgacaucuacaucucccggcgccugcugggcaccuucaccuggacccucagcgacuccgagggcaacgagacgcccgggggcuacugccugacccgguggaugcugaucgaggccgagcucaagugcuucgggaacaccgccguggccaagugcaacgagaagcacgacgaggaguucugcgacaugcugcgccuguucgacuucaacaagcaggcgauccggcgccucaagaccgaggcccagaugagcauccagcugaucaacaaggccgugaacgcccugaucaacgaccagcucaucaugaagaaccaccuccgggacaucaugggcauccccuacugcaacuacuccaaguacugguaccugaaccacacggucaccgggaagaccagccugccccgcugcuggcugguguccaacggcagcuaccugaacgagacccacuucuccgacgacaucgagcagcaggccgacaacaugaucacggagcuccugcagaaggaguacauggaccggcagggcaagaccccgcuggggcucguggaccuguucgucuucagcaccuccuucuaccugaucagcaucuuccugcaccucgugaagaucccgacccaccgccacaucaucggcaagcccugccccaagccccaccggcugaaccacauggggaucugcuccugcggccuguacaagcacccgggggugcccgucaaguggaagcgcuga

SEQ ID NO: 596 - RNA, 1473 nt, Artificial Sequence
  derived and/or modified protein sequence (opt1) from LASV(Lassa virus/H.sapiens-wt/NGA/2016/ISTH_1123;Clade II)__AVO03645__GPC
augggccagaucaucaccuucuuccaggaggugccccacgucaucgaggaggugaugaacaucgugcugaucgcccucagccugcuggccauccucaaggggaucuacaacgucgcgaccugcggccuguucgggcugguguccuuccuccugcugugcggccgcagcugcuccacgaccuacaaggggguguacgagcuccagacccuggagcuggacaugggcagccucaacaugaccaugccgcuguccugcacgaagaacaacagccaccacuacaucauggucggcaacgagaccgggcuggagcucacccugaccaacacguccaucaucaaccacaaguucugcaaccugagcgacgcccacaagaagaaccucuacgaccacgcccugauguccaucaucagcaccuuccaccuguccauccccaacuucaaccaguacgaggccaugagcugcgacuucaacggcgggaagaucuccgugcaguacaaccucagccacgccuacgcgguggacgccgccaaccacugcggcaccaucgccaacgggguccugcagaccuucaugcggauggcguggggcggcuccuacaucgcccuggacagcgggaagggcuccugggacugcaucaugacgagcuaccaguaccucaucauccagaacaccuccugggaggaccacugccaguucagccgccccagccccaucggguaccugggccugcucucccagcggacccgcgacaucuacaucagccggcgccugcugggcaccuucacguggacccucuccgacagcgaggggaacgagaccccgggcggguacugccugacccgguggaugcugaucgaggccgagcucaagugcuucggcaacacggccguggccaagugcaacgagaagcacgacgaggaguucugcgacaugcugcgccuguucgacuucaacaagcaggcgauccggcgccucaagaccgaggcccagauguccauccagcugaucaacaaggccgugaacgcccugaucaacgaccagcucaucaugaagaaccaccuccgggacaucauggggauccccuacugcaacuacagcaaguacugguaccugaaccacaccgucaccggcaagacgucccugccccgcugcuggcuggugagcaacggcuccuaccugaacgagacccacuucagcgacgacaucgagcagcaggccgacaacaugaucaccgagcuccugcagaaggaguacaucgaccggcaggggaagacgccccugggccucguggaccuguucgucuucuccaccagcuucuaccugaucuccaucuuccugcaccucgugaagaucccgacccaccgccacgugaucgggaagcccugccccaagccccaccggcugaaccacaugggcaucugcagcugcgggcuguacaagcacccgggcguccccgugaaguggaagcgcuga

SEQ ID NO: 597 - RNA, 1473 nt, Artificial Sequence
  derived and/or modified protein sequence (opt1) from LASV(Lassa virus/H.sapiens-wt/NGA/2016/ISTH_1150;Clade II)__AVO03627__GPC
augggccaggugaucaccuucuuccaggagaucccccacgucaucgaggaggugaugaacaucgugcugaucacccucagccugcuggccauccucaaggggaucuacaacgucgccacgugcggccuguucgggcugaucuccuuccuccugcugugcggccgcagcugcuccaccaccuacaaggggguguacgagcuccagacccuggagcuggacauggcgaaccucaacaugacgaugccgcugagcugcaccaagaacuccagccaccacuacaucauggugggcaacgagaccggccuggagcucacccugacgaacaccuccaucaucaaccacaaguucugcaaccugagcgacgcccacaagaagaaccucuacgaccacgcccugauguccaucaucagcaccuuccaccuguccauccccaacuucaaccaguacgaggccaugagcugcgacuucaacgggggcaagaucuccguccaguacaaccucagccacgccuacgcgguggacgccgccaaccacugcgggaccaucgccaacggcgugcugcagacguucaugcggauggcguggggcggguccuacaucgcccuggacagcggcaaggggaacugggacugcaucaugaccuccuaccaguaccucaucauccagaacaccaccugggaggaccacugccaguucagccgccccucccccaucggcuaccuggggcugcucagccagcggacgcgcgacaucuacaucagccggcgccugcugggcaccuucaccuggacccucuccgacagcgagggcaacgaggcccccgggggcuacugccugacgcgguggaugcugaucgaggccgagcucaagugcuucgggaacaccgccaucgcgaagugcaacgagaagcacgacgaggaguucugcgacaugcugcgccuguucgacuucaacaagcaggccauccggcgccucaagaccgaggcccagaaguccauccagcugaucaacaaggccgucaacgcccugaucaacgaccagcucaucaugaagaaccaccuccgggacaucaugggcaucccguacugcaacuacagcaaguacugguaccugaaccacaccgugacggggaagaccucccugcccaagugcuggcugaucagcaacggcuccuaccugaacgagacccacuucagcgacgacaucgagcagcaggcggacaacaugaucaccgagcuccugcagaaggaguacauggaccgccagggcaagacgccccuggggcucguggaccuguucgucuucuccaccagcuucuaccugaucuccaucuuccugcaccucgugaagaucccgacccaccggcacaucgugggccgccccugccccaagccccaccggcugaaccacauggggaucugcagcugcggccuguacaagcacccggggguccccgugaaguggaagcgcuga

SEQ ID NO: 598 - RNA, 1473 nt, Artificial Sequence
  derived and/or modified protein sequence (opt1) from LASV(Lassa virus/H.sapiens-wt/NGA/2016/ISTH_1174;Clade II)__AVO03555__GPC
augggccagaucaucaccuucuuccaggaggugccccacgucaucgaggaggugaugaacaucgugcugaucgcccucagccugcuggccauccucaaggggaucuacaacgucgcgaccugcggcuucuucgggcugguguccuuccugcuccugugcggccgcagcugcuccacgaucuacaaggggguguacgagcugcagacccucgagcuggacauggccagccugaacaugaccaugccgcucuccugcaccaagaacaacagccaccacuacaucauggucggcaacgagacgggccuggagcugacccucaccaacaccuccaucaucaaccacaaguucugcaaccugagcgacgcccacaagaagaaccuguacgaccacgcccucauguccaucaucagcacguuccaccuguccaucccccacuucaaccaguacgaggccaugagcugcgacuucaacgggggcaagaucuccgugcaguacaaccugagccacaccuacgcgguggacgccgccaaccacugcgggaccaucgccaacggcguccuccagaccuucaugcggauggcguggggcggguccuacaucgcccuggacagcggcaagggguccugggacugcaucaugacgagcuaccaguaccugaucauccagaacaccaccugggaggaccacugccaguucucccgccccagccccaucggcuaccucgggcugcugagccagcggacccgcgacaucuacaucucccggcgccuccugggcacguucaccuggacccugagcgacuccgagggcaacgagacccccgggggcuacugccucacgcgguggaugcugaucgaggccgagcugaagugcuucgggaacaccgccguggccaagugcaacgagaagcacgacgaggaguucugcgacaugcuccgccuguucgacuucaacaagcaggcgauccggaagcugaagaccgaggcccagaugagcauccagcucaucaacaaggccgugaacgcccugaucaacgaccagcugaucaugaagaaccaccuccgcgacaucaugggcaucccguacugcaacuacuccaaguacugguaccugaaccacaccgucacggggaagaccagccugccccggugcuggcucguguccaacggcagcuaccugaacgagacccacuucuccgacgacaucgagcagcaggccgacaacaugaucaccgagcugcuccagaaggaguacauggaccgccagggcaagacgccccuggggcugguggaccucuucgucuucagcaccuccuucuaccugaucagcaucuuccugcaccuggugaagaucccgacccaccggcacgugaucggcaagcccugccccaagccccaccgccucaaccacauggggaucugcuccugcggccuguacaagcacccggggguccccgugaaguggaagcgguga

SEQ ID NO: 599 - RNA, 1473 nt, Artificial Sequence
  derived and/or modified protein sequence (opt1) from LASV(Lassa virus/H.sapiens-wt/NGA/2016/ISTH_1207;Clade II)__AVO03599__GPC
augggccagaucaucaccuucuuccaggaggugccccacgucaucgaggaggugaugaacaucgugcugaucgcccucagccugcuggccauccucaaggggaucuacaacgucgcgaccugcggccuguucgggcugguguccuuccuccugcugugcggccgcagcugcuccacgaccuacaaggggguguacgagcuccagacccuggagcuggacaugaccagccucaacaugacgaugccgcuguccugcaccaagaacaacagccaccacuacaucauggucggcaacgagaccggccuggagcucacccugacgaacaccuccaucaucaaccacaaguucugcaaccugagcgacgcccacaagaagaaccucuacgaccacgcccugauguccaucaucagcaccuuccaccuguccauccccaacuucaaccaguacgaggccaugagcugcgacuucaacgggggcaagaucuccgugcaguacaaccucagccacaccuacgccguggacgcggccaaccacugcgggacgaucgccaacggcguccugcagaccuucaugcggauggccuggggcggguccuacaucgcgcuggacagcggcaagggguccugggacugcaucaugaccagcuaccaguaccucaucauccagaacaccacgugggaggaccacugccaguucucccgccccagccccaucggcuaccuggggcugcucagccagcggacccgcgacaucuacaucucccggcgccugcugggcaccuucaccuggacgcucagcgacuccgagggcaacgacacccccgggggcuacugccugacccgguggaugcugaucgaggccgagcucaagugcuucgggaacaccgccguggccaagugcaacgagaagcacgacgaggaguucugcgacaugcugcgccuguucgacuucaacaagcaggccauccggcgccucaagacggaggcgcagaugagcauccagcugaucaacaaggccgugaacgcccugaucaacgaccagcucaucaugaagaaccaccuccgggacaucaugggcauccccuacugcaacuacuccaaguacugguaccugaaccacaccgucaccgggaagaccagccugccccgcugcuggcugguguccaacggcagcuaccugaacgagacgcacuucuccgacgacaucgagcagcaggccgacaacaugaucaccgagcuccugcagaaggaguacaucgaccggcagggcaagaccccgcuggggcucguggaccuguucgucuucagcaccuccuucuaccugaucagcaucuuccugcaccucgugaagaucccgacgcaccgccacgugaucggcaagcccugccccaagccccaccggcugaaccacauggggaucugcuccugcggccuguacaagcacccggggguccccgugaaguggaagcgcuga

SEQ ID NO: 600 - RNA, 1473 nt, Artificial Sequence
  derived and/or modified protein sequence (opt1) from LASV(Lassa virus/H.sapiens-wt/NGA/2016/ISTH_1306;Clade II)__AVO03623__GPC
augggccagaucaucaccuucuuccaggaggugccccacgucaucgaggaggugaugaacaucgugcugaucgcccucagccugcuggccauccucaaggggaucuacaacgucgcgaccugcggccuguucgggcugguguccuuccuccugcugugcggccgcagcugcuccacgaccuacaaggggguguacgagcuccagacccuggagcuggacauggccagccucaacaugaccaugccgcuguccugcacgaagaacaacagccaccacuacaucauggucggcaacgagaccggccuggagcucacccugaccaacacguccaucaucaaccacaaguucugcaaccugagcgacgcccacaagaagaaccucuacgaccacgcccugauguccaucaucagcaccuuccaccuguccauccccaacuucaaccaguacgaggccaugagcugcgacuucaacgggggcaagaucuccgugcaguacaaccucagccacaccuacgcgguggacgccgccaaccacugcgggaccgucgccaacggcgugcugcagacguucaugcggauggcguggggcggguccuacaucgcccuggacagcggcaagggguccugggacugcaucaugaccagcuaccaguaccucaucauccagaacaccaccugggaggaccacugccaguucucccgccccagccccaucggcuaccuggggcugcucagccagcggacgcgcgacaucuacaucucccggcgccugcugggcaccuucaccuggacccucagcgacuccgagggcaacgagacgcccgggggcuacugccugacccgguggaugcugaucgaggccgagcucaagugcuucgggaacaccgccguggccaagugcaacgagaagcacgacgaggaguucugcgacaugcugcgccuguucgacuucaacaagcaggcgauccggcgccucaagaccgaggcccagaugagcauccagcugaucaacaaggccgucaacgcccugaucaacgaccagcucaucaugaagaaccaccuccgggacaucaugggcauccccuacugcaacuacuccaaguacugguaccugaaccacacggugaccgggcgcaccagccugccccggugcuggcugguguccaacggcagcuaccugaacgagacccacuucuccgacgacaucgagcagcaggccgacaacaugaucacggagcuccugcagaaggaguacaucgaccgccagggcaagaccccgcuggggcucgucgaccuguucguguucagcaccuccuucuaccugaucagcaucuuccugcaccucgugaagaucccgacccaccggcacgucaucggcaagcccugccccaagccccaccgccugaaccacauggggaucugcuccugcggccuguacaagcacccgggggugcccgugaaguggaagcgguga

SEQ ID NO: 601 - RNA, 1473 nt, Artificial Sequence
  derived and/or modified protein sequence (opt1) from LASV(Lassa virus/H.sapiens-wt/NGA/2016/ISTH_1311;Clade II)__AVO03575__GPC
augggccagaucgugaccuucuuccaggaggucccccacgugaucgaggaggugaugaacaucguccugaucgcccucagccugcuggccauccucaaggggaucuacaacguggcgaccugcggccuguucgggcugaucuccuuccuccugcugugcggccgcagcugcuccacgaccuacaaggggguguacgagcuccagacccuggagcuggacauggccaaccucaacaugaccaugccgcugagcugcacgaagaacaacucccaccacuacaucauggucggcaacgagaccggccuggagcucacccugaccaacacgagcaucaucaaccacaaguucugcaaccuguccgacgcccacaagaagaaccucuacgaccacgcccugaugagcaucaucuccaccuuccaccugagcauccccaacuucaaccaguacgaggccauguccugcgacuucaacgggggcaagaucagcgugcaguacaaccucucccacgcguacgccggggacgccgccagccacugcggcaccaucgcgaacggggugcugcagaccuucaugcggauggccuggggcggcuccuacaucgcccuggacagcgggaagggcaacugggacugcaucaugacguccuaccaguaccucaucauccagaacaccaccugggaggaccacugccaguucagccgccccucccccaucggguaccugggccugcucagccagcggacccgcgacaucuacaucagccggcgccugcugggcacguucaccuggacccucuccgacagcgaggggaacgacgccccgggcggguacugccugacccgguggaugcugaucgaggccgagcucaagugcuucggcaacacggcgaucgccaagugcaacgagaagcacgacgaggaguucugcgacaugcugcgccuguucgacuucaacaagcaggccaucaagcggcucaagaccgaggcccagauguccauccagcugaucaacaaggccgucaacgcgcugaucaacgaccagcucaucaugaagaaccaccuccgcgacaucauggggauccccuacugcaacuacagcaaguacugguaccugaaccacaccaccacgggcaagaccucccugcccaagugcuggcugaucagcaacggcuccuaccugaacgagacccacuucagcgacgacaucgagcagcaggccgacaacaugaucaccgagcuccugcagaaggaguaccuggaccggcaggggaagacgccccucggccugguggaccuguucguguucuccaccagcuucuaccugaucuccaucuuccuccaccugaucaagaucccgacccaccgccacaucgucgggcggcccugccccaagccccaccgccugaaccacaugggcaucugcagcugcgggcucuacaagcacccgggcgugcccgugaaguggaagcgguga

SEQ ID NO: 602 - RNA, 1473 nt, Artificial Sequence
  derived and/or modified protein sequence (opt1) from LASV(Lassa virus/H.sapiens-wt/NGA/2016/ISTH_1423;Clade II)__AVO03577__GPC
augggccagaucgugaccuucuuccaggaggucccccacgugaucgaggaggugaugaacaucguccugaucgcccucagccugcuggccauccucaaggggaucuacaacguggcgaccugcggccuguucgggcugguguccuuccuccugcugugcggccgcagcugcuccacgaccuacaagggggucuacgagcuccagacccuggagcuggacauggccaaccucaacaugaccaugccgcugagcugcacgaagaacaacucccaccacuacaucauggugggcaacgagaccggccuggagcucacccugaccaacacgagcaucaucaaccacaaguucugcaaccuguccgacgcccacaagaagaaccucuacgaccacgcccugaugagcaucaucuccaccuuccaccugagcauccccaacuucaaccaguacgaggccauguccugcgacuucaacgggggcaagaucagcgugcaguacaaccucucccacagcuacgcggucgacgccgccaaccacugcgggaccguggccaacggcgugcugcagaccuucaugcggauggcguggggcggguccuacaucgcccuggacagcggcaagggguccugggacugcaucaugacgagcuaccaguaccucaucauccagaacaucaccugggaggaccacugccaguucucccgccccagccccaucggcuaccuggggcugcucagccagcggacccgcgacaucuacaucucccggcgccugcugggcaccuucacguggacccucagcgacuccgagggcaaggagacccccgggggcuacugccugacccgguggaugcugaucgaggccgagcucaagugcuucgggaacacggccgucgccaagugcaacgagaagcacgacgaggaguucugcgacaugcugcgccuguucgacuucaacaagcaggcgauccggcgccucaagaccgaggcccagaugagcauccagcugaucaacaaggccgugaacgcccugaucaacgaccagcucaucaugaagaaccaccuccgggacaucaugggcauccccuacugcaacuacuccaaguacugguaccugaaccacaccgugaccgggaagacgagccugccccgcugcuggcuggucuccaacggcagcuaccugaacgagacccacuucuccgacgacaucgagcagcaggccgacaacaugaucaccgagcuccugcagaaggaguacaucgaccggcagggcaagaccccgcuggggcucguggaccuguucguguucagcacguccuucuaccugaucagcaucuuccugcaccucgucaagaucccgacccaccgccacauccugggcaagcccugccccaagccccaccggcugaaccacauggggaucugcuccugcggccucuacaagcacccgggggugcccgugaaguggaagcgcuga

SEQ ID NO: 603 - RNA, 1473 nt, Artificial Sequence
  derived and/or modified protein sequence (opt1) from LASV(Lassa virus/H.sapiens-wt/NGA/2016/ISTH_1462;Clade II)__AVO03587__GPC
augggccagaucaucaccuucuuccaggaggugccccacgucaucgaggaggugaugaacaucgugcugaucgcccucagccugcuggccauccucaaggggaucuacaacgucgcgaccugcggccuguucgggcugguguccuuccuccugcugugcggccgcagcugcuccacgaccuacaaggggguguacgagcuccagacccuggagcuggacauggccagccucaacaugaccaugccgcuguccugcacgaagaacaacagccaccacuacaucauggucggcaacgagaccggccuggagcucacccugaccaacacguccaucaucaaccacaaguucugcaaccugagcgacgcccacaagaagaaccucuacgaccacgcccugauguccaucaucagcaccuuccaccuguccauccccaacuucaaccaguacgaggccaugagcugcgacuucaacgggggcaagaucuccgugcaguacaaccucagccacaccuacgcgguggacgccgccaaccacugcgggaccaucgccaacggcguccugcagacguucaugcggauggcguggggcggguccuacaucgcccuggacagcggcaagggguccugggacugcaucaugaccagcuaccaguaccucaucauccagaacaccaccugggaggaccacugccaguucucccgccccagccccaucggcuaccuggggcugcucagccagcggacgcgcgacaucuacaucucccggcgccugcugggcaccuucaccuggacccucagcgacuccgagggcaacgagacgcccgggggcuacugccugacccgguggaugcugaucgaggccgagcucaagugcuucgggaacaccgccguggccaagugcaacgagaagcacgacgaggaguucugcgacaugcugcgccuguucgacuucaacaagcaggcgauccggcgccucaagaccgaggcccagaugagcauccagcugaucaacaaggccgugaacgcccugaucaacgaccagcucaucaugaagaaccaccuccgggacaucaugggcauccccuacugcaacuacuccaaguacugguaccugaaccacacggucaccgggcgcaccagccugccccggugcuggcugguguccaacggcagcuaccugaacgagacccacuucuccgacgacaucgagcagcaggccgacaacaugaucacggagcuccugcagaaggaguacaucgagcgccagggcaagaccccgcuggggcucguggaccuguucgucuucagcaccuccuucuaccugaucagcaucuuccugcaccucaucaagaucccgacccaccggcacgugaucggcaagcccugccccaagccccaccgccugaaccacauggggaucugcuccugcggccuguacaagcacccgggggugcccgucaaguggaagcgguga

SEQ ID NO: 604 - RNA, 1473 nt, Artificial Sequence
  derived and/or modified protein sequence (opt1) from LASV(Lassa virus/H.sapiens-wt/NGA/2016/ISTH_1472;Clade II)__AVO03605__GPC
augggccagaucaucaccuucuuccaggaggugccccacgucaucgaggaggugaugaacaucgugcugaucgcccucagccugcuggccauccucaaggggaucuacaacgucgcgaccugcggccuguucgggcugguguccuuccuccugcugugcggccgcagcugcuccacgaccuacaaggggguguacgagcuccagacccuggagcuggacauggccagccucaacaugaccaugccgcuguccugcacgaagaacaacagccaccacuacaucauggucggcaacgagaccggccuggagcucacccugaccaacacguccaucaucaaccacaaguucugcaaccugagcgacgcccacaagaagaaccucuacgaccacgcccugauguccaucaucagcaccuuccaccuguccauccccaacuucaaccaguacgaggccaugagcugcgacuucaacgggggcaagaucuccgugcaguacaaccucagccacaccuacgcgguggacgccgccaaccacugcgggaccaucgccaacggcguccugcagacguucaugcggauggcguggggcggguccuacaucgcccuggacagcggcaagggguccugggacugcaucaugaccagcuaccaguaccucaucauccagaacaccaccugggaggaccacugccaguucucccgccccagccccaucggcuaccuggggcugcucagccagcggacgcgcgacaucuacaucucccggcgccugcugggcaccuucaccuggacccucagcgacuccgagggcaacgagacgcccgggggcuacugccugacccgguggaugcugaucgaggccgagcucaagugcuucgggaacaccgccguggccaagugcaacgagaagcacgacgaggaguucugcgacaugcugcgccuguucgacuucaacaagcaggcgauccggcgccucaagaccgaggcccagaugagcauccagcugaucaacaaggccgugaacgcccugaucaacgaccagcucaucaugaagaaccaccuccgggacaucaugggcauccccuacugcaacuacuccaaguacugguaccugaaccacacggucaccgggcgcaccagccugccccggugcuggcugguguccaacggcagcuaccugaacgagacccacuucuccgacgacaucgagcagcaggccgacaacaugaucacggagcuccugcagaaggaguacaucgaccgccagggcaagaccccgcuggggcucguggaccuguucgucuucagcaccuccuucuaccugaucagcaucuuccugcaccucaucaagaucccgacccaccggcacgugaucggcaagcccugccccaagccccaccgccugaaccacauggggaucugcuccugcggccuguacaagcacccgggggugcccgucaaguggaagcgguga

SEQ ID NO: 605 - RNA, 1473 nt, Artificial Sequence
  derived and/or modified protein sequence (opt1) from LASV(Lassa virus/H.sapiens-wt/NGA/2016/ISTH_1474;Clade II)__AVO03613__GPC
augggccagaucaucaccuucuuccaggaggugccccacgucaucgaggaggugaugaacaucgugcugaucgcccucagccugcuggccauccucaaggggaucuacaacgucgcgaccugcggccuguucgggcugguguccuuccuccugcugugcggccgcagcugcuccacgaccuacaaggggguguacgagcuccagacccuggagcuggacauggccagccucaacaugaccaugccgcuguccugcacgaagaacaacagccaccacuacaucauggucggcaacgagaccggccuggagcucacccugaccaacacguccaucauccaccacaaguucugcaaccugagcgacgcccacaagaagaaccucuacgaccacgcccugauguccaucaucagcaccuuccaccuguccauccccaacuucaaccaguacgaggccaugagcugcgacuucaacgggggcaagaucuccgugcaguacaaccucagccacaccuacgcgguggacgccgccaaccacugcgggaccaucgccaacggcguccugcagacguucaugcggauggcguggggcggguccuacaucgcccuggacagcggcaagggguccugggacugcaucaugaccagcuaccaguaccucaucauccagaacaccaccugggaggaccacugccaguucucccgccccagccccaucggcuaccuggggcugcucagccagcggacgcgcgacaucuacaucucccggcgccugcugggcaccuucaccuggacccucagcgacuccgagggcaacgagacgcccgggggcuacugccugacccgguggaugcugaucgaggccgagcucaagugcuucgggaacaccgccguggccaagugcaacgagaagcacgacgaggaguucugcgacaugcugcgccuguucgacuucaacaagcaggcgauccggcgccucaagaccgaggcccagaugagcauccagcugaucaacaaggccgugaacgcccugaucaacgaccagcucaucaugaagaaccaccuccgggacaucaugggcauccccuacugcaacuacuccaaguacugguaccugaaccacacggucaccgggcgcaccagccugccccggugcuggcugguguccaacggcagcuaccugaacgagacccacuucuccgacgacaucgagcagcaggccgacaacaugaucacggagcuccugcagaaggaguacaucgaccgccagggcaagaccccgcuggggcucguggaccuguucgucuucagcaccuccuucuaccugaucagcaucuuccugcaccucaucaagaucccgacccaccggcacgugaucggcaagcccugccccaagccccaccgccugaaccacauggggaucugcuccugcggccuguacaagcacccgggggugcccgucaaguggaagcgguga

SEQ ID NO: 606 - RNA, 1476 nt, Artificial Sequence
  derived and/or modified protein sequence (opt1) from LASV(Lassa virus/H.sapiens-wt/NGA/2016/ISTH_1496;Clade II)__AVO03579__GPC
augggccagaucaucaccuucuuccaggaggugccccacgucaucgaggaggugaugaacaucgugcugaucgcccucagccugcuggccauccucaagggggucuacaacguggcgaccugcggccuguucgggcugguguccuuccuccugcugugcggccgcagcugcuccacgaccaucuacaagggggucuacgagcuccagacccuggagcuggacauggccagccucaacaugaccaugccgcuguccugcacgaagaacaacagccaccacuacaucauggugggcaacgagaccggccuggagcucacccugaccaacacguccaucaucaaccacaaguucugcaaccugagcgacgcccacaagaagaaccucuacgaccacgcccugauguccaucaucagcaccuuccaccuguccauccccaacuucaaccaguacgaggccaugagcugcgacuucaacgggggcaagaucuccgugcaguacaaccucagccacgcguacgccgucgacgccgccaaccacugcgggaccaucgcgaacggcgugcugcagaccuucaugcggauggccuggggcggguccuacaucgcccuggacagcggcaagcgcuccugggacugcaucaugacgagcuaccaguaccucaucauccagaacaccaccugggaggaccacugccaguucucccggcccagccccaucggguaccugggccugcucagccagcgcacccgggacaucuacaucucccgccggcugcuggggacguucaccuggacccucagcgacuccgagggcaacgagaccccgggcggguacugccugacgcgcuggaugcugaucgaggccgagcucaagugcuucggcaacaccgccguggcgaagugcaacgagaagcacgacgaggaguucugcgacaugcugcggcuguucgacuucaacaagcaggccauccgccggcucaagaccgaggcccagaugagcauccagcugaucaacaaggccgucaacgcccugaucaacgaccagcucaucaugaagaaccaccuccgcgacaucauggggauccccuacugcaacuacuccaaguacugguaccugaaccacaccgugacgggcaagaccagccugccccggugcuggcugguguccaacgggagcuaccugaacgagacccacuucuccgacgacaucgagcagcaggcggacaacaugaucaccgagcuccugcagaaggaguacaucgaccgccagggcaagacgccccugggccucgucgaccuguucguguucagcaccuccuucuaccugaucagcaucuuccugcaccucgugaagaucccgacccaccggcacgucaucgggaagcccugccccaagccccaccgccugaaccacaugggcaucugcuccugcgggcuguacaagcacccgggcgugcccgugaaguggaagcgguga

SEQ ID NO: 607 - RNA, 1473 nt, Artificial Sequence
  derived and/or modified protein sequence (opt1) from LASV(Lassa virus/H.sapiens-wt/NGA/2016/ISTH_1541;Clade II)__AVO03553__GPC
augggccagaucgugaccuucuuccaggaggucccccacgugaucgaggagaucaugaacaucgugcugaucacccucagccugcuggccguccucaaggggaucuacaacuucgccacgugcggccugaucgggcugaucaccuuccucuuccugugcggccgcuccugcagcaccaucuacaaggggaacuaccagcugcagacccucgagcugaacauggagacgcugaacaugaccaugccgcucuccugcaccaagaacaacagccaccacuacauccgggugggcaacgagaccggccuggagcugacgcucaccaacguguccaucaucaaccaccgcuucugcaaccugagcgacgcgcacaagcggaaccuguacgaccacacccucauguccaucaucagcaccuuccaccuguccauccccaacuucaaccaguacgaggccaugagcugcgacuucaacgggggcaagaucuccguccaguacaaccugagccacggguacgccguggacgccgccaagcacugcggcacgguggcgaacgggguccuccagaccuucaugcgcauggccuggggcggcuccuacaucgcccuggacagcgggaagggcaacugggacugcaucaugaccuccuaccaguaccugaucauccagaacaccacgugggaggaccacugccaguucagccggcccucccccaucggguaccucggccugcugagccagcgcacccgggacaucuacaucucccgccggcuccugggcaccuucaccuggacgcugagcgacagcgaggggcgcgagaccccgggcggguacugccucacccgguggaugcugaucgaggccgagcugaagugcuucggcaacaccgcgguggccaagugcaacgagaagcacgacgaggaguucugcgacaugcuccgccuguucgacuucaacaagcaggccauccagcggcugaagacggaggcccagauguccauccagcucaucaacaaggccgugaacgcgcugaucaacgaccagcugaucaugaagaaccaccuccgcgacaucauggggauccccuacugcaacuacagcaaguacugguaccugaaccacaccaccaccggcaagacgucccugcccaagugcuggcucgucaccaacggcagcuaccugaacgagacccacuucuccgacgacaucgagcagcaggccgacaacaugaucaccgagaugcugcagaaggaguacaucgaccggcaggggaagacgccccucggccugguggaccuguucguguucagcaccuccuucuaccucaucagcaucuuccugcaccugaucaagaucccgaaccaccgccacaucgucgggaagcccugccccaagccccaccggcugaaccacaugggcaucugcuccugcggguucuacaagcagccgggcgugcccgugcgcuggaagcgguga

SEQ ID NO: 608 - RNA, 1473 nt, Artificial Sequence
  derived and/or modified protein sequence (opt1) from LASV(Lassa virus/H.sapiens-wt/NGA/2016/ISTH_1546;Clade II)__AVO03537__GPC
augggccagaucgugaccuucuuccaggagaucccccacgucguggaggagaucaugaacaucgugcugaucacccucagccugcuggccauccucaaggggcuguacaacuucgccacgugcggccugaucgggcucaucaccuuccuguuccugugcggccgcuccugcagcaccaucuacaagggguccuaccagcuccaggcgcuggagcugaacauggagacccucaacaugacgaugccgcugagcugcaccaagaacaacucccaccacuacauccgggucggcaacgagaccggccuggagcucacccugacgaacaccagcaucaucaaccacaaguucugcaaccuguccgacgcccacaagaagaaccucuacgaccacacccugaugagcaucaucuccaccuuccaccugagcauccccaacuucaaccaguacgaggccauguccugcgacuucaacgggggcaagaucagcgugcaguacaaccucucccacagcuacgccggggacgccgcgcgccacugcggcacgguggccaacgggguccugcagaccuucaugcggauggccuggggcggcuccuacaucgcccuggacagcgggaagggcaacugggacugcaucaugaccuccuaccaguaccucaucauccagaacaccacgugggaggaccacugccaguucagccgccccucccccaucggguaccugggccugcucagccagcggacccgcgacaucuacaucagccggcgccugcugggcaccuucaccuggacgcucuccgacagcgaggggaaggagaccccgggcggguacugccugacccgguggaugcugaucgaggcggagcucaagugcuucggcaacaccgccguggccaagugcaacgagaagcacgacgaggaguucugcgacaugcugcgccuguucgacuucaacaagcaggccauccagcggcucaagacggaggcccagauguccauccagcugaucaacaaggcggugaacgcccugaucaacgaccagcucaucaugaagaaccaccuccgcgacaucauggggauccccuacugcaacuacagcaaguacugguaccugaaccacaccaccaccggcaagacgucccugccccggugcuggcuggucagcaacggcuccuaccugaacgagacccacuucagcgacgacaucgagcagcaggccgacaacaugaucaccgagaugcuccagaaggaguacaucgaccgccaggggaagacgccccugggccugguggaccucuucguguucuccaccagcuucuaccugaucuccaucuuccugcaccugaucaagaucccgacccaccggcacaucgucggcaagagcugccccaagccccaccgccucaaccacauggggaucugcuccugcgggcuguacaagcagcccggcgugccggugaaguggaagcgguga

SEQ ID NO: 609 - RNA, 1473 nt, Artificial Sequence
  derived and/or modified protein sequence (opt1) from LASV(Lassa virus/H.sapiens-wt/NGA/2016/ISTH_1591;Clade II)__AVO03647__GPC
augggccagaucaucaccuucuuccaggaggugccccacgucaucgaggaggugaugaacaucgugcugaucgcccucagccugcuggccauccucaaggggaucuacaacgucgcgaccugcggccuguucgggcugguguccuuccuccugcugugcggccgcagcugcuccacgaccuacaaggggguguacgagcuccagacccuggagcuggacauggccagccucaacaugaccaugccgcuguccugcacgaagaacaacagccaccacuacaucauggucggcaacgagaccggccuggagcucacccugaccaacacguccaucauccagcacaaguucugcaaccugagcgacgcccacaagaagaaccucuacgaccacgcccugauguccaucgugagcaccuuccaccuguccauccccaacuucaaccaguacgaggccaugagcugcgacuucaacgggggcaagaucaccgugcaguacaaccucucccacagcuacgcgaucgacgccgccaaccacugcgggaccgucgccaacggcgugcugcagacguucaugcggauggcguggggcggguccuacaucgcccuggacagcggccgcggguccugggacugcaucaugaccagcuaccaguaccucaucauccagaacaccaccugggaggaccacugccaguucucccggcccagccccaucggcuaccuggggcugcucagccagcgcacgcgggacaucuacaucucccgccggcugcugggcaccuucaccuggacccucagcgacuccgagggcaacgagacgcccgggggcuacugccugacccgcuggaugcugaucgaggccgagcucaagugcuucgggaacaccgccguggccaagugcaacgagaagcacgacgaggaguucugcgacaugcugcggcuguucgacuucaacaagcaggcgauccgccggcucaaggccgaggcccagaugagcauccagcugaucaacaaggccgucaacgcccugaucaacgaccagcucaucaugaagaaccaccuccgcgacaucaugggcaucccguacugcaacuacuccaaguacugguaccugaaccacaccgugacggggcggaccagccugccccgcugcuggcugguguccaacggcagcuaccugaacgagacccacuucuccgacgacaucgagcagcaggcggacaacaugaucaccgagcuccugcagaaggaguacauggaccggcagggcaagacgccccuggggcucgucgaccuguucguguucagcaccuccuucuaccugaucagcaucuuccugcaccucgugaagaucccgacccaccgccacaucaucggcaagcccugccccaagccccaccggcugaaccacaugggggucugcuccugcggccuguacaagcacccgggggugcccgugaaguggaagcgcuga

SEQ ID NO: 610 - RNA, 1473 nt, Artificial Sequence
  derived and/or modified protein sequence (opt1) from LASV(Lassa virus/H.sapiens-wt/NGA/2016/ISTH_1604;Clade II)__AVO03541__GPC
augggccagaucgugaccuucuuccaggaggucccccacgugaucgaggagaucaugaacaucgugcugaucacccucagccugcuggccauccucaagggggucuacaaccuggccacgugcggccugaucgggcucaucaccuuccuguuccugugcggccgcuccugcagcaugaccuacaagggguccuaccagcucgagacccuggagcugaacauggagacgcucaacaugaccaugccgcugagcugcaccaagaacaccucccaccacuacauccgggugggcaacgagacgggccuggagcucacccugaccaacaccagcaucaucaaccacaaguucugcaaccuguccgacgcgcacaagaagaaccucuacgaccacagccugauguccaucgugagcacguuccaccuguccauccccaacuucaaccaguacgaggccaugagcugcgacuucaacgggggcaagaucuccauccaguacaaccucagccacgccuacgccggggacgccgcgaagcacugcggcacccuggccaacgggguccugcagaccuucaugcgcauggccuggggcggcuccuacaucgcccucgacagcgggcggggcaacugggacugcaucaugaccuccuaccaguaccugaucauccagaacacgaccugggaggaccacugccaguucagccgccccucccccaucggguaccugggccuccugagccagcggacccgcgagaucuacaucagccggcgccugcucggcaccuucacguggacccuguccgacagcgaggggaacgaggcgccgggcggguacugccugacccgguggaugcucaucgaggccgagcugaagugcuucggcaacgccgccguggccaagugcaacgagaagcacgacgaggaguucugcgacaugcugcgccucuucgacuucaacaagcaggcgauccagcggcugaagaccgaggcccagauguccauccagcugaucaacaaggccgugaacgcccucaucaacgaccagcugaucaugaagaaccaccuccgcgacaucauggggauccccuacugcaacuacagcaaguacugguaccugaaccacacgaccaccggccggaccucccugccccgcugcuggcuggucagcaacggcuccuaccucaacgagacgcacuucagcgacgacaucgagcagcaggccgacaacaugaucaccgagaugcugcagaaggaguacaucgaccggcaggggaagacgccccugggccucguggaccuguucguguucuccaccagcuucuaccugaucuccaucuuccugcaccucgucaagaucccgacccaccgccacaucgugggcaagagcugccccaagccccaccggcugaaccacauggggaucugcuccugcgggcuguacaagcagcccggcgugccgguccgcuggaagcgguga

SEQ ID NO: 611 - RNA, 1473 nt, Artificial Sequence
  derived and/or modified protein sequence (opt1) from LASV(Lassa virus/H.sapiens-wt/NGA/2016/ISTH_1609;Clade II)__AVO03661__GPC
augggccagaucgugaccuucuuccaggagaucccccacgucaucgaggaggugaugaacaucgugcugaucacccucagccugcuggccguccucaaggggaucuacaacuucgccacgugcggccugaucgggcugaucaccuuccucuuccugugcggccgcuccugcagcaccaucuacaagggguccuaccagcugcagaagcucgagcugaacauggagacccugaacaugacgaugccgcucagcugcaccaagaacuccagccaccacuacauccgggugggcaacgagaccggccuggagcugacccucacgaacaccuccaucaucagccacaaguucugcaaccuguccgacgcgcacaagaagaaccuguacgaccacgcccucaugagcaucaucuccaccuuccaccugagcauccccaacuucaaccaguacgaggccauguccugcgacuucaacgggggcaagaucagcgugcaguacaaccugucccacagcuacgccggggacgccgcgcgccacugcggcacccucgccaacgggguccugcagacguucaugcggauggccuggggcggcuccuacaucgcccuggacagcgggaagggcaacugggacugcaucaugaccuccuaccaguuccucaucauccagaacaccaccugggaggaccacugccaguucagccgccccagccccaugggguaccugggccugcucucccagcggacgcgcgacaucuacaucagccggcgccugcugggcaccuucaccuggacccucuccgacagcgaggggaaggagacgccgggcggguacugccugacccgguggaugcugaucgaggcggagcucaagugcuucggcaacaccgccguggccaagugcaacgagaagcacgacgaggaguucugcgacaugcugcgccuguucgacuucaacaagcaggccauccagcggcucaagaccgaggcccagauguccauccagcugaucaacaaggcggugaacgcccugaucaacgaccagcucaucaugaagaaccaccuccgcgacaucauggggauccccuacugcaacuacagccaguacugguaccugaaccacacgaucaccggcaagaccucccugcccaagugcuggcuggucagcaacggcuccuaccugaacgagacccacuucagcgacgacaucgagcagcaggccgacaacaugaucacggagaugcuccagaaggaguacaucgaccggcaggggaagaccccgcugggccugguggaccucuucguguucuccaccagcuucuaccugaucuccaucuuccugcaccugaucaagauccccacccaccgccacaucgucggcaagagcugccccaagccccaccggcucaaccgcauggggaucugcuccugcgggcuguacaagcagcccggcgugccggugaaguggaagcgguga

SEQ ID NO: 612 - RNA, 1473 nt, Artificial Sequence
  derived and/or modified protein sequence (opt1) from LASV(Lassa virus/H.sapiens-wt/NGA/2016/ISTH_1610;Clade II)__AVO03603__GPC
augggccagaucaucaccuucuuccaggaggugccccacgucaucgaggaggugaugaacaucgugcugaucgcccucagccugcuggccauccucaaggggaucuacaacgucgcgaccugcggccuguucgggcugguguccuuccucuuccugugcggccgcagcugcuccacgaccuacaaggggguguacgagcugcagacccucgagcuggacauggccagccugaacaugaccaugccgcucuccugcacgaagaacaacagccaccacuacaucauggucggcaacgagaccggccuggagcugacccucaccaacacguccaucaucaaccacaaguucugcaaccugagcgacgcccacaagaagaaccuguacgaccacgcccucauguccaucaucagcaccuuccaccuguccauccccaacuucaaccaguacgaggccaugagcugcgacuucaacgggggcaagaucuccgugcaguacaaccugagccacaccuacgcgaucgacgccgccaaccacugcgggaccaucgccaacggcgugcuccagacguucaugcggauggcguggggcggguccuacaucgcccuggacagcggccgcggguccugggacugcaucaugaccagcuaccaguaccugaucauccagaacaccaccugggaggaccacugccaguucucccggcccagccccaucggcuaccucgggcugcugagccagcgcacgcgggacaucuacaucucccgccggcuccugggcaccuucaccuggacccugagcgacuccgagggcaacgagacgcccgggggcuacugccucacccgcuggaugcugaucgaggccgagcugaagugcuucgggaacaccgccgucgccaagugcaacgagaagcacgacgaggaguucugcgacaugcuccggcuguucgacuucaacaagcaggcgauccgccggcugaaggccgaggcccagaugaacauccagcucaucaacaaggccgugaacgcccugaucaacgaccagcugaucaugaagaaccaccuccgcgacaucaugggcaucccguacugcaacuacagcaaguacugguaccugaaccacaccgugacggggcggaccucccugccccgcugcuggcucgucagcaacggcuccuaccugaacgagacccacuucagcgacgacaucgagcagcaggcggacaacaugaucaccgagcugcuccagaaggaguacauggaccggcagggcaagacgccccuggggcugguggaccucuucguguucuccaccagcuucuaccugaucuccaucuuccugcaccugaucaagaucccgacccaccgccacaucgucggcaagcccugccccaagccccaccggcucaaccacauggggaucugcagcugcggccuguacaagcacccgggggugcccgugaaguggaagcgcuga

SEQ ID NO: 613 - RNA, 1473 nt, Artificial Sequence
  derived and/or modified protein sequence (opt1) from LASV(Lassa virus/H.sapiens-wt/NGA/2018/ISTH_0959;Clade II)__AVV65099__GPC
augggccagaucaucaccuucuuccaggaggugccccacgucaucgaggaggugaugaacaucgugcugaucgcccucagccugcuggccauccucaaggggaucuacaacgucgugaccugcggccuguucgggcugguguccuuccuccugcugugcggccgcagcugcuccacgaccuacaagggggucuacgagcuccagacccuggagcuggacauggcgagccucaacaugaccaugccgcuguccugcacgaagaacaacagccaccacuacaucauggugggcaacgagaccggccuggagcucacccugaccaacacguccaucaucaaccacaaguucugcaaccugagcgacgcccacaagaagaaccucuacgaccacgcccugauguccaucaucagcaccuuccaccuguccauccccaacuucaaccaguacgaggccaugagcugcgacuucaacgggggcaagaucuccgugcaguacaaccucagccacgccuacgcgaucgacgccgccaaccacugcgggaccaucgccaacggcguccugcagaccuucaugcggauggcguggggcggguccuacaucgcccuggacagcggcaagggguccugggacugcaucaugacgagcuaccaguaccucaucauccagaacaccaccugggaggaccacugccaguucucccgccccagccccaucggcuaccuggggcugcucagccagcggacccgcgacaucuacaucucccggcgccugcugggcacguucaccuggacccucagcgacuccgagggcaacgagacccccgggggcuacugccugacgcgguggaugcugaucgaggccgagcucaagugcuucgggaacaccgccguggccaagugcaacgagaagcacgacgaggaguucugcgacaugcugcgccuguucgacuucaacaagcaggcgauccggcgccucaagaccgaggcccagaugagcauccagcugaucaacaaggccgugaacgcccugaucaacgaccagcucaucaugaagaaccaccuccgggacaucaugggcaucccguacugcaacuacuccaaguacugguaccugaaccacaccgucacggggaagaccagccugccccgcugcuggcugguguccaacggcagcuaccugaacgagacccacuucuccgacgacaucgagcagcaggccgacaacaugaucaccgagcuccugcagaaggaguacaucgaccggcagggcaagacgccccuggggcucguggaccuguucgucuucagcaccuccuucuaccugaucagcaucuuccugcaccucgugaagaucccgacccaccgccacgugaucggcaagcccugccccaagccccaccggcugaaccacauggggaucugcuccugcggccuguacaagcacccggggguccccgugaaguggaagcgcuga

SEQ ID NO: 614 - RNA, 1473 nt, Artificial Sequence
  derived and/or modified protein sequence (opt1) from LASV(Lassa virus/H.sapiens-wt/NGA/2018/ISTH_1024;Clade II)__AVV65105__GPC
augggccagaucaucaccuucuuccaggaggugccccacgucaucgaggaggugaugaacaucgugcugaucgcccucagccugcuggccauccucaagggggucuacaacguggcgaccugcggccuguucgggcugguguccuuccuccugcugugcggccgcagcugcuccacgaccuacaagggggucuacgagcuccagacccuggagcuggacauggccaaccucaacaugaccaugccgcugagcugcacgaagaacaacucccaccacuacauccgggugggcaacgagaccggccuggagcucacccugaccaacacgagcaucaucaaccacaaguucugcaaccuguccgacgcccacaagaacaaccucuacgaccacgcccugaugagcaucaucuccaccuuccaccugagcauccccaacuucaaccaguacgaggccauguccugcgacuucaacgggggcaagaucagcgugcaguacaaccucucccacgcguacgccgucgacgccgccaaccacugcgggaccaucgcgaacggcgugcugcagaccuucaugcgcauggccuggggcgggagcuacaucgcccuggacuccggccgggggagcugggacugcaucaugacguccuaccaguaccucaucauccagaacaccaccugggaggaccacugccaguucagccgccccucccccaucggcuaccuggggcugcucagccagcggacccgcgacaucuacaucagccggcgccugcugggcacguucaccuggacccucuccgacagcgagggcaacgagacccccgggggcuacugccugacgcgguggaugcugaucgaggccgagcucaagugcuucgggaacaccgccguggcgaagugcaacgagaagcacgacgaggaguucugcgacaugcugcgccuguucgacuucaacaagcaggccauccggcgccucaagaccgaggcccagauguccauccagcugaucaacaaggccgucaacgcccugaucaacgaccagcucaucaugaagaaccaccuccgggacaucaugggcauccccuacugcaacuacagcaaguacugguaccugaaccacaccgugacggggaagaccucccugccccgcugcuggcuggugagcaacggcaccuaccugaacgagacccacuucuccgacgacaucgagcagcaggcggacaacaugaucacggagcuccugcagaaggaguacauggaccggcagggcaagaccccgcuggggcucgucgaccuguucguguucagcaccuccuucuaccugaucagcaucuuccugcaccucgugaagaucccgacccaccgccacgucaucggcaagcccugccccaagccccaccggcugaaccacauggggaucugcuccugcggccuguacaagcacccgggggugcccgugaaguggaagcgcuga

SEQ ID NO: 615 - RNA, 1473 nt, Artificial Sequence
  derived and/or modified protein sequence (opt1) from LASV(Lassa virus/H.sapiens-wt/NGA/2018/ISTH_1079;Clade II)__AVV65107__GPC
augggccagaucaucaccuucuuccaggaggugccccacgucaucgaggaggugaugaacaucgugcugaucgcccucagccugcuggccauccucaaggggaucuacaacgucgcgaccugcggccuguucgggcugguggccuuccuccugcugugcggccgcuccugcagcacgaccuacaaggggguguacgagcuccagacccuggagcuggacauggccucccucaacaugaccaugccgcugagcugcacgaagaacaacucccaccacuacaucauggucggcaacgagaccggccuggagcucacccugaccaacacgagcaucaucaaccacaaguucugcaaccuguccgacgcccacaagaagaaccucuacgaccacgcccugaugagcaucaucuccaccuuccaccugagcauccccaacuucaaccaguacgaggcgauguccugcgacuucaacgggggcaagaucagcgugcaguacaaccucucccacaccuacgccguggacgccgccaaccacugcgggaccaucgcgaacggcguccugcagacguucaugcggauggccuggggcgggagcuacaucgcccuggacuccggcaaggggagcugggacugcaucaugaccuccuaccaguaccucaucauccagaacaccaccugggaggaccacugccaguucagccgccccucccccaucggcuaccuggggcugcucagccagcggacgcgcgacaucuacaucagccggcgccugcugggcaccuucaccuggacccucuccgacagcgagggcaacgagacgcccgggggcuacugccugacccgguggaugcugaucgaggccgagcucaagugcuucgggaacaccgccguggcgaagugcaacgagaagcacgacgaggaguucugcgacaugcugcgccuguucgacuucaacaagcaggccauccggcgccucaagaccgaggcccagauguccauccagcugaucaacaaggccgugaacgcccugaucaacgaccagcucaucaugaagaaccaccuccgggacaucaugggcauccccuacugcaacuacagcaaguacugguaccugaaccacacggucaccgggcgcaccucccugccccggugcuggcuggugagcaacggcuccuaccugaacgagacccacuucagcgacgacaucgagcagcaggcggacaacaugaucacggagcuccugcagaaggaguacauggaccgccagggcaagaccccgcuggggcucguggaccuguucgucuucuccaccagcuucuaccugaucuccaucuuccugcaccucaucaagaucccgacccaccggcacgugaucggcaagcccugccccaagccccaccgccugaaccacauggggaucugcagcugcggccuguacaagcacccgggggugcccgucaaguggaagcgguga

SEQ ID NO: 616 - RNA, 1473 nt, Artificial Sequence
  derived and/or modified protein sequence (opt1) from LASV(Lassa virus/H.sapiens-wt/NGA/2018/ISTH_1177;Clade II)__AVV65101__GPC
augggccagaucaucaccuucuuccaggaggugccccacgucaucgaggaggugaugaacaucgugcugaucgcccucagccugcuggccauccucaaggggaucuacaacgucgcgaccugcggccuguucgggcugguguccuuccuccugcugugcggccgcagcugcuccacgaccuacaaggggguguacgagcuccagacccuggagcuggacauggccagccucaacaugaccaugccgcuguccugcacgaagaacaacagccaccacuacauccgggucggcaacgagaccggccuggagcucacccugaccaacacguccaucaucgaccacaaguucugcaaccugagcgacgcccacaagaagaaccucuacgaccacgcccugauguccaucaucagcaccuuccaccuguccauccccaacuucaaccaguacgaggccaugagcugcgacuucaacgggggcaagaucuccgugcaguacaaccucagccacaccuacgcgguggacgccgccaaccacugcgggaccaucgccaacggcguccugcagacguucaugcgcauggcguggggcggguccuacaucgcccuggacagcggcaagggguccugggacugcaucaugaccagcuaccaguaccucaucauccagaacaccaccugggaggaccacugccaguucucccggcccagccccaucggcuaccuggggcugcucagccagcgcacgcgggacaucuacaucucccgccggcugcugggcaccuucaccuggacccucagcgacuccgagggcaacgagacgcccgggggcuacugccugacccgcuggaugcugaucgaggccgagcucaagugcuucgggaacaccgccguggccaagugcaacgagaagcacgacgaggaguucugcgacaugcugcggcuguucgacuucaacaagcaggcgauccgccggcucaagaccgaggcccagaugagcauccagcugaucaacaaggccgugaacgcccugaucaacgaccagcucaucaugaagaaccaccuccgcgacaucaugggcauccccuacugcaacuacuccaaguacugguaccugaaccacacgaucaccgggcggaccagccugccccgcugcuggcuggucuccaacggcagcuaccugaacgagacccacuucuccgacgacaucgagcagcaggccgacaacaugaucacggagcuccugcagaaggaguacauggaccggcagggcaagaccccgcuggggcucguggaccuguucguguucagcaccuccuucuaccugaucagcaucuuccugcaccucgucaagaucccgacccaccgccacgugaucggcaagcccugccccaagccccaccggcugaaccacauggggaucugcuccugcggccuguacaagcacccgggggugcccgucaaguggaagcgcuga

SEQ ID NO: 617 - RNA, 1473 nt, Artificial Sequence
  derived and/or modified protein sequence (opt1) from LASV(Lassa virus/H.sapiens-wt/NGA/2018/ISTH_1375;Clade II)__AVV65115__GPC
augggccagaucaucaccuucuuccaggaggugccccacgucaucgaggaggugaugaacaucgugcugaucgcccucagccugcuggccauccucaaggggaucuacaacaucgcgaccugcggccuguucgggcuggucuccuuccuccugcugugcggccgcagcugcuccacgaccuacaaggggguguacgagcuccagacccuggagcuggacauggccagccucaacaugaccaugccgcuguccugcacgaagaacaacagccaccacuacaucauggugggcaacgagaccggccuggagcucacccugaccaacacguccaucaucaaccaccgguucugcaaccugagcgacgcccacaagaagaaccucuacgaccacgcccugauguccaucaucagcaccuuccaccuguccauccccaacuucaaccaguacgaggccaugagcugcgacuucaacgggggcaagaucuccguccaguacaaccucagccacgcguacgccguggacgccgccaaccacugcgggaccaucgcgaacggcgugcugcagaccuucaugcgcauggccuggggcggguccuacaucgcccuggacagcggcaagggguccugggacugcaucaugacgagcuaccaguaccucaucauccagaacaccaccugggaggaccacugccaguucucccggcccagccccaucggcuaccuggggcugcucagccagcgcacccgggacaucuacaucucccgccggcugcugggcacguucaccuggacccucagcgacuccgagggcaacgagacccccgggggcuacugccugacgcgcuggaugcugaucgaggccgagcucaagugcuucgggaacaccgccgucgcgaagugcaacgagaagcacgacgaggaguucugcgacaugcugcggcuguucgacuucaacaagcaggccauccgccggcucaagaccgaggcccagaugagcauccagcugaucaacaaggccgugaacgcccugaucaacgaccagcucaucaugaagaaccaccuccgcgacaucaugggcaucccguacugcaacuacuccaaguacugguaccugaaccacaccgugacggggaagaccagccugccccggugcuggcuggucuccaacggcagcuaccugaacgagacccacuucuccgacgacaucgagcagcaggcggacaacaugaucaccgagcuccugcagaaggaguacaucgaccgccagggcaagacgccccuggggcucguggaccuguucguguucagcaccuccuucuaccugaucagcaucuuccugcaccucgucaagaucccgacccaccggcacgugaucggcaagcccugccccaagccccaccgccugaaccacauggggaucugcuccugcggccuguacaagcacccgggggugcccgucaaguggaagcgguga

SEQ ID NO: 618 - RNA, 1473 nt, Artificial Sequence
  derived and/or modified protein sequence (opt1) from LASV(Lassa virus/H.sapiens-wt/NGA/2018/ISTH_1381;Clade II)__AVV65111__GPC
augggccagaucgugaccuucuuccaggaggucccccacgugaucgaggaggugaugaacaucguccugaucgcccucagccugcuggccauccucaaggggaucuacaacguggcgaccugcggccuguucgggcugguguccuuccuccugcugugcggccgcagcugcuccacgaccuacaagggggucuacgagcuccagacccuggagcuggacauggccagccucaacaugaccaugccgcuguccugcacgaagaacaacagccaccacuacaucauggugggcaacgagaccggccuggagcucacccugaccaacacguccaucaucaaccacaaguucugcaaccugagcgacgcccacaagaagaaccucuacgaccacgcccugauguccaucaucagcaccuuccaccuguccauccccaacuucaaccaguacgaggccaugagcugcgacuucaacgggggcaagaucuccgugcaguacaaccucagccacaccuacgcggucgacgccgccaaccacugcgggaccaucgccaacggcgugcugcagacguucaugcggauggcguggggcggguccuacaucgcccuggacagcggcaagggguccugggacugcaucaugaccagcuaccaguaccucaucauccagaacaccaccugggaggaccacugccaguucucccgccccagccccaucggcuaccuggggcugcucagccagcggacgcgcgacaucuacaucucccggcgccugcugggcaccuucaccuggacccucagcgacuccgagggcaacgagacgcccgggggcuacugccugacccgguggaugcugaucgaggccgagcucaagugcuucgggaacaccgccguggccaagugcaacgagaagcacgacgaggaguucugcgacaugcugcgccuguucgacuucaacaagcaggcgauccggcgccucaagaccgaggcccagaugagcauccagcugaucaacaaggccgucaacgcccugaucaacgaccagcucaucaugaagaaccaccuccgggacaucaugggcauccccuacugcaacuacuccaaguacugguaccugaaccacacggugaccgggaagaccagccugccccgcugcuggcugguguccaacggcagcuaccugaacgagacccacuucuccgacgacaucgagcagcaggccgacaacaugaucacggagcuccugcagaaggaguacauggaccggcagggcaagaccccgcuggggcucgucgaccuguucguguucagcaccuccuucuaccugaucagcaucuuccugcaccucgugaagaucccgacccaccgccacgucgugggcaagcccugccccaagccccaccggcugaaccacauggggaucugcuccugcggccuguacaagcacccgggggugcccguccgcuggaagcgguga

SEQ ID NO: 619 - RNA, 1473 nt, Artificial Sequence
  derived and/or modified protein sequence (opt1) from LASV(Lassa virus/H.sapiens-wt/NGA/2018/ISTH_1643;Clade II)__AVV65119__GPC
augggccagaucaucaccuucuuccaggaggugccccacgucaucgaggaggugaugaacaucgugcugaucgcccucagccugcuggccauccucaaggggaucuacaacgucgcgaccugcggccuguucgggcugguguccuuccuccugcugugcggccgcagcugcuccacgaccuacaaggggguguacgagcuccagacccuggagcuggacauggccagccucaacaugaccaugccgcuguccugcacgaagaacaacagccaccacuacaucauggucggcaacgagaccggccuggagcucacccugaccaacacguccaucaucaaccacaaguucugcaaccugagcgacgcccacaagaagaaccucuacgaccacgcccugauguccaucaucagcaccuuccaccuguccauccccaacuucaaccaguacgaggccaugagcugcgacuucaacgggggcaagaucuccgugcaguacaaccucagccacaccuacgcgguggacgccgccaaccacugcgggaccaucgccaacggcguccugcagacguucaugcggauggcguggggcggguccuacaucgcccuggacagcggcaagggguccugggacugcaucaugaccagcuaccaguaccucaucauccagaacaccuccugggaggaccacugccaguucagccgccccagccccaucggcuaccuggggcugcucucccagcggacccgcgacaucuacaucagccggcgccugcugggcacguucaccuggacccucuccgacagcgagggcaacgagacccccgggggcuacugccugacgcgguggaugcugaucgaggccgagcucaagugcuucgggaacaccgccguggccaagugcaacgagaagcacgacgaggaguucugcgacaugcugcgccuguucgacuucaacaagcaggcgauccggcgccucaagaccgaggcccagauguccauccagcugaucaacaaggccgugaacgcccugaucaacgaccagcucaucaugaagaaccaccuccgggacaucaugggcauccccuacugcaacuacagcaaguacugguaccugaaccacaccgucacggggaagaccucccugccccgcugcuggcuggugagcaacggcaccuaccugaacgagacccacuucuccgacgacaucgagcagcaggccgacaacaugaucacggagcuccugcagaaggaguacaucgaccggcagggcaagaccccgcuggggcucguggaccuguucgucuucagcaccuccuucuaccugaucagcaucuuccugcaccucgugaagaucccgacccaccgccacgugaucggcaagcccugccccaagccccaccggcugaaccacauggggaucugcuccugcggccuguacaagcacccggggguccccgugaaguggaagcgcuga

SEQ ID NO: 620 - RNA, 1473 nt, Artificial Sequence
  derived and/or modified protein sequence (opt1) from LASV(LASV003-NIG-2008;Clade II)__AIT17580__GPC
augggccagaucaucaccuucuuccaggaggugccccacgucaucgaggaggugaugaacaucgugcugaucgcccucagccugcuggccauccucaaggggaucuacaacgucgcgaccugcggccuguucgggcugguguccuuccuccugcugugcggccgcagcugcuccacgaccuacaaggggguguacgagcuccagacccuggagcuggacauggccagccucaacaugaccaugccgcuguccugcacgaagaacaacagccaccacuacaucauggucggcaacgagaccggccuggagcucacccugaccaacacguccaucaucaaccacaaguucugcaaccugagcgacgcccacaagaagaaccucuacgaccacgcccugauguccaucaucagcaccuuccaccuguccauccccaacuucaaccaguacgaggccaugagcugcgacuucaacgggggcaagaucuccgugcaguacaaccucagccacaccuacgcgguggacgccgccaaccacugcgggaccaucgccaacggcguccugcagacguucaugcggauggcguggggcggguccuacaucgcccuggacagcggcaagggguccugggacugcaucaugaccagcuaccaguaccucaucauccagaacaccaccugggaggaccacugccaguucucccgccccagccccaucggcuaccuggggcugcucagccagcggacgcgcgacaucuacaucucccggcgccugcugggcaccuucaccuggacccucagcgacuccgagagcaacgagacgccgggcggguacugccugacccgguggaugcugaucgaggccgagcucaagugcuucggcaacaccgccguggccaagugcaacgagaagcacgacgaggaguucugcgacaugcugcgccuguucgacuucaacaagcaggcgauccggcgccucaaggccgaggcccagauguccauccagcugaucaacaaggccgugaacgcccugaucaacgaccagcucaucaugaagaaccaccuccgggacaucauggggauccccuacugcaacuacagcaaguacugguaccugaaccacaccgucacgggccgcaccucccugccccggugcuggcuggugagcaacggguccuaccugaacgagacccacuucagcgacgacaucgagcagcaggcggacaacaugaucaccgagcuccugcagaaggaguacauggaccgccagggcaagacgccccugggccucguggaccuguucgucuucuccaccagcuucuaccugaucuccaucuuccugcaccucgugaagaucccgacccaccggcacgugaucgggaagcccugccccaagccccaccgccugaaccacaugggcaucugcagcugcgggcuguacaagcacccgggcguccccgugaaguggaagcgguga

SEQ ID NO: 621 - RNA, 1473 nt, Artificial Sequence
  derived and/or modified protein sequence (opt1) from LASV(LASV006-NIG-2008;Clade II)__AIT17584__GPC
augggccagaucaucaccuucuuccaggaggugccccaggucaucgaggaggugaugaacaucgugcugaucgcccucagccugcuggccauccucaaggggaucuacaacgucgcgaccugcggccuguucgggcugguguccuuccuccugcugugcggccgcagcugcuccacgaccuacaaggggguguacgagcuccagacccuggagcuggacauggccagccucaacaugaccaugccgcuguccugcacgaagaacaacagccaccacuacaucauggucggcaacgagaccggccuggagcucacccugaccaaccaguccaucaucaaccacaaguucugcaaccugagcgacgcccacaagaagaaccucuacgaccacgcccugauguccaucaucagcacguuccaccuguccauccccaacuucaaccaguacgaggccaugagcugcgacuucaacgggggcaagaucuccgugcaguacaaccucagccacuccuucgcgguggacgccgccaaccacugcgggaccaucgccaacggcguccugcagaccuucaugcggauggcguggggcgggagcuacaucgcccuggacuccggcaaggggagcugggacugcaucaugaccuccuaccaguaccucaucauccagaacacgaccugggaggaccacugccaguucagccgccccagccccaucggcuaccuggggcugcucucccagcggacccgcgacaucuacaucagccggcgccugcugggcaccuucacguggacccucuccgacagcgagggcaacgagacccccgggggcuacugccugacccgguggaugcugaucgaggccgagcucaagugcuucgggaacacggccguggccaagugcaacgagaagcacgacgaggaguucugcgacaugcugcgccuguucgacuucaacaagcaggcgauccggcgccucaagaccgaggcccagauguccauccagcugaucaacaaggccgugaacgcccugaucaacgaccagcucaucaugaagaaccaccuccgggacaucaugggcauccccuacugcaacuacagcaaguacugguaccugaaccacaccaagaccgggaagacgucccugccccgcugcuggcuggucagcaacggcuccuaccugaacgagacccacuucagcgacgacaucgagcagcaggccgacaacaugaucaccgagcuccugcagaaggaguacauggaccggcagggcaagaccccgcuggggcucguggaccuguucguguucuccacgagcuucuaccugaucuccaucuuccugcaccucgucaagaucccgacccaccgccacgugaucggcaagcccugccccaagccccaccggcugaaccacauggggaucugcagcugcggccuguacaagcacccgggggugcccgucaaguggaagcgcuga

SEQ ID NO: 622 - RNA, 1473 nt, Artificial Sequence
  derived and/or modified protein sequence (opt1) from LASV(LASV035-NIG-2009;Clade II)__AIT17588__GPC
augggccagaucaucaccuucuuccaggaggugccccacgucaucgaggaggugaugaacaucgugcugaucgcccucagccugcuggccauccucaaggggaucuacaacgucgcgaccugcggccuguucgggcugguguccuuccuccugcugugcggccgcagcugcuccacgaccuacaaggggguguacgagcuccagacccuggagcuggacauggccagccucaacaugaccaugccgcuguccugcacgaagaacaacagccaccacuacaucauggucggcaacgagaccggccuggagcucacccugaccaacacguccaucaucaaccacaaguucugcaaccugagcgacgcccacaagaagaaccucuacgaccacgcccugauguccaucaucagcaccuuccaccuguccauccccaacuucaaccaguacgaggccaugagcugcgacuucaacgggggcaagaucuccgugcaguacaaccucagccacgcguacgccguggacgccgccaaccacugcgggaccaucgcgaacggcguccugcagaccuucaugcggauggccuggggcggguccuacaucgcccuggacagcggcaagggguccugggacugcaucaugacgagcuaccaguaccucaucauccagaacaccaccugggaggaccacugccaguucucccgccccagccccaucggcuaccuggggcugcucagccagcggacccgcgacaucuacaucucccggcgccugcugggcacguucaccuggacccucagcgacuccgagggcaacgagacccccgggggcuacugccugacgcgguggaugcugaucgaggccgagcucaagugcuucgggaacaccgccguggcgaagugcaacgagaagcacgacgaggaguucugcgacaugcugcgccuguucgacuucaacaagcaggccauccggcgccucaaggccgaggcccagaugagcauccagcugaucaacaaggccgugaacgcgcugaucaacgaccagcucaucaugaagaaccaccuccgggacaucaugggcauccccuacugcaacuacuccaaguacugguaccugaaccacaccgucaccgggaagacgagccugccccgcugcuggcugguguccaacggcagcuaccugaacgagacccacuucuccgacgacaucgagcagcaggccgacaacaugaucaccgagcuccugcagaaggaguacaucgaccggcagggcaagaccccgcuggggcucguggaccuguucgucuucagcacguccuucuaccugaucagcaucuuccugcaccucgugaagaucccgacccaccgccacgugaucggcaagcccugccccaagccccaccggcugaaccacauggggaucugcuccugcggccuguacaagcacccggggguccccgugaaguggaagcgcuga

SEQ ID NO: 623 - RNA, 1473 nt, Artificial Sequence
  derived and/or modified protein sequence (opt1) from LASV(LASV042-NIG-2009;Clade II)__AIT17592__GPC
augggccagaucaucaccuucuuccaggaggugccccacgucaucgaggaggugaugaacaucgugcugaucgcccucagccugcuggccauccucaaggggaucuacaacgucgcgaccugcggccuguucgggcugguguccuuccuccugcugugcggccgcagcugcuccacgaccuacaaggggguguacgagcuccagacccuggagcuggacauggccagccucaacaugaccaugccgcuguccugcacgaagaacaacagccaccacuacaucauggucggcaacgagaccggccuggagcucacccugaccaacacguccaucaucaaccacaaguucugcaaccugagcgacgcccacaagaagaaccucuacgaccacacccugauguccaucaucagcaccuuccaccuguccauccccaacuucaaccaguacgaggccaugagcugcgacuucaacgggggccggaucuccgugcaguacaaccucagccacgccuacgcgguggacgccgccaaccacugcgggaccaucgccaacggcguccugcagacguucaugcgcauggcguggggcggguccuacaucgcccuggacagcggcaagggguccugggacugcaucaugaccagcuaccaguaccucaucauccagaacaccaccugggaggaccacugccaguucucccggcccagccccaucggcuaccuggggcugcucagccagcgcacgcgggacaucuacaucucccgccggcugcugggcaccuucaccuggacccucagcgacuccgagggcaacgagacgcccgggggcuacugccugacccgcuggaugcugaucgaggccgagcucaagugcuucgggaacaccgccguggccaagugcaacgagaagcacgacgaggaguucugcgacaugcugcggcuguucgacuucaacaagcaggcgauccgccggcucaagaccgaggcccagaugagcauccagcugaucaacaaggccgugaacgcccugaucaacgaccagcucaucaugaagaaccaccuccgcgacaucaugggcauccccuacugcaacuacuccaaguacugguaccugaaccacacgaucaccgggaagaccagccugccccggugcuggcuggucuccaacggcagcuaccugaacgagacccacuucuccgacgacaucgagcagcaggccgacaacaugaucacggagcuccugcagaaggaguacaucgaccgccagggcaagaccccgcuggggcucguggaccuguucguguucagcaccuccuucuaccugaucagcaucuuccugcaccucgucaagaucccgacccaccggcacguggugggcaagcccugccccaagccccaccgccugaaccacauggggaucugcuccugcggccuguacaagcacccggggguccccgugaaguggaagcgguga

SEQ ID NO: 624 - RNA, 1473 nt, Artificial Sequence
  derived and/or modified protein sequence (opt1) from LASV(LASV045-NIG-2009;Clade II)__AIT17596__GPC
augggccagaucaucaccuucuuccaggaggugccccacgucaucgaggaggugaugaacaucgugcugaucgcccucagccugcuggccauccucaaggggaucuacaacgucgcgaccugcggccuguucgggcugguguccuuccuccugcugugcggccgcagcugcuccacgaccuacaaggggguguacgagcuccagacccuggagcuggacauggccagccucaacaugaccaugccgcuguccugcacgaagaacaacagccaccacuacaucauggucggcaacgagaccggccuggagcucacccugaccaacacguccaucaucaaccacaaguucugcaaccugagcgacgcccacaagaagaaccucuacgaccacgcccugauguccaucaucagcaccuuccaccuguccauccccaacuucaaccaguacgaggccaugagcugcgacuucaacgggggcaagaucuccgugcaguacaaccucagccacaccuacgcgguggacgccgccaaccacugcgggaccaucgccaacggcguccugcagacguucaugcggauggcguggggcggguccuacaucgcccuggacagcggcaagggguccugggacugcaucaugaccagcuaccaguaccucaucauccagaacaccuccugggaggaccacugccaguucagccgccccagccccaucggcuaccuggggcugcucucccagcggacccgcgacaucuacaucagccggcgccugcugggcacguucaccuggacccucuccgacagcgagggcaacgagacccccgggggcuacugccugacgcgguggaugcugaucgaggccgagcucaagugcuucgggaacaccgccguggccaagugcaacgagaagcacgacgaggaguucugcgacaugcugcgccuguucgacuucaacaagcaggcgauccggcgccucaagaccgaggcccagauguccauccagcugaucaacaaggccgugaacgcccugaucaacgaccagcucaucaugaagaaccaccuccgggacaucaugggcaucccguacugcaacuacagcaaguacugguaccugaaccacaccgucacggggaagaccucccugccccgcugcuggcuggugagcaacggcuccuaccugaacgagacccacuucagcgacgacaucgagcagcaggccgacaacaugaucaccgagcuccugcagaaggaguacaucgaccggcagggcaagacgccccuggggcucguggaccuguucgucuucuccaccagcuucuaccugaucuccaucuuccugcaccucgugaagaucccgacccaccgccacgugaucggcaagcccugccccaagccccaccggcugaaccacauggggaucugcagcugcggccuguacaagcacccggggguccccgugaaguggaagcgcuga

SEQ ID NO: 625 - RNA, 1473 nt, Artificial Sequence
  derived and/or modified protein sequence (opt1) from LASV(LASV046-NIG-2009;Clade II)__AIT17600__GPC
augggccagaucaucaccuucuuccaggaggugccccacgucaucgaggaggugaugaacaucgugcugaucgcccucagccugcuggccauccucaaggggaucuacaacgucgcgaccugcggccuguucgggcugguguccuuccuccugcugugcggccgcagcugcuccacgaccuacaaggggguguacgagcuccagacccuggagcuggacauggccagccucaacaugaccaugccgcuguccugcacgaagaacaacagccaccacuacaucauggucggcaacgagaccggccuggagcucacccugaccaacacguccaucaucaaccacaaguucugcaaccugagcgacgcccacaagaagaaccucuacgaccacgcccugauguccaucaucagcaccuuccaccuguccauccccaacuucaaccaguacgaggccaugagcugcgacuucaacgggggcaagaucuccgugcaguacaaccucagccacgcguacgccggggacgccgccaaccacugcggcaccaucgcgaacggggugcugcagaccuucaugcggauggccuggggcggcuccuacaucgcccuggacagcgggaagggcuccugggacugcaucaugacgagcuaccaguaccucaucauccagaacaccaccugggaggaccacugccaguucucccgccccagccccaucggguaccugggccugcucagccagcggacccgcgacaucuacaucucccggcgccugcugggcacguucaccuggacccucagcgacuccgaggggaacgagaccccgggcggguacugccugacgcgguggaugcugaucgaggccgagcucaagugcuucggcaacaccgccgucgcgaagugcaacgagaagcacgacgaggaguucugcgacaugcugcgccuguucgacuucaacaagcaggccauccggcgccucaagaccgaggcccagaugagcauccagcugaucaacaaggccgugaacgcccugaucaacgaccagcucaucaugaagaaccaccuccgggacaucauggggauccccuacugcaacuacuccaaguacugguaccugaaccacaccgugacgggcaagaccagccugccccgcugcuggcuggucuccaacggcagcuaccugaacgagacccacuucuccgacgacaucgagcagcaggcggacaacaugaucaccgagcuccugcagaaggaguacaucgaccggcaggggaagacgccccugggccucguggaccuguucguguucagcaccuccuucuaccugaucagcaucuuccugcaccucgucaagaucccgacccaccgccacgugaucgggaagcccugccccaagccccaccggcugaaccacaugggcaucugcuccugcgggcuguacaagcacccgggcgugcccgucaaguggaagcgcuga

SEQ ID NO: 626 - RNA, 1473 nt, Artificial Sequence
  derived and/or modified protein sequence (opt1) from LASV(LASV049-NIG-2009;Clade II)__AIT17604__GPC
augggccagaucaucaccuucuuccaggaggugccccacgucaucgaggaggugaugaacaucgugcugaucgcccucagccugcuggccauccucaaggggaucuacaacgucgcgaccugcggccuguucgggcugguguccuuccuccugcugugcggccgcagcugcuccacgaccuacaaggggguguacgagcuccagacccuggagcuggacaugaccagccucaacaugacgaugccgcuguccugcaccaagaacaacagccaccacuacaucauggucggcaacgagaccggccuggagcucacccugacgaacaccuccaucaucaaccacaaguucugcaaccugagcgacgcccacaagaaggaccucuacgaccacgcccugauguccaucaucagcaccuuccaccuguccauccccaacuucaaccaguacgaggccaugagcugcgacuucaacgggggcaagaucuccgugcaguacaaccucagccacaccuacgccguggacgcggccaagcacugcgggacgaucgccaacggcguccugcagaccuucaugcggauggccuggggcggguccuacaucgcgcuggacagcggcaagggguccugggacugcaucaugaccagcuaccaguaccucaucauccagaacaccacgugggaggaccacugccaguucucccgccccagccccgugggcuaccuggggcugcucagccagcggacccgcgacaucuacaucucccggcgccugcugggcaccuucaccuggacgcucagcgacuccgagggcaacgagacccccgggggcuacugccugacccgguggaugcugaucgaggccgagcucaagugcuucgggaacaccgccguggccaagugcaacgagaagcacgacgaggaguucugcgacaugcugcgccuguucgacuucaacaagcaggccauccggcgccucaagacggaggcgcagaugagcauccagcugaucaacaaggccgucaacgcccugaucaacgaccagcucaucaugaagaaccaccuccgggacaucaugggcauccccuacugcaacuacuccaaguacugguaccugaaccacaccgugaccgggaagaccagccugccccgcugcuggcugguguccaacggcagcuaccugaacgagacgcacuucuccgacgacaucgagcagcaggccgacaacaugaucaccgagcuccugcagaaggaguaccuggaccggcagggcaagaccccgcucgggcuggucgaccuguucguguucagcaccuccuucuaccugaucagcaucuuccuccaccuggugaagaucccgacgcaccgccacgucaucggcaagcccugccccaagccccaccggcugaaccacauggggaucugcuccugcggccucuacaagcacccgggggugcccgugaaguggaagcgcuga

SEQ ID NO: 627 - RNA, 1473 nt, Artificial Sequence
  derived and/or modified protein sequence (opt1) from LASV(LASV052-NIG-2008;Clade II)__AIT17608__GPC
augggccagaucaucaccuucuuccaggaggugccccacgucaucgaggaggugaugaacaucgugcugaucgcccucagccugcuggccauccucaaggggaucuacaacgucgcgaccugcggccuguucgggcugguguccuuccuccugcugugcggccgcagcugcuccacgaccuacaaggggguguacgagcuccagacccuggagcuggacauggccagccucaacaugaccaugccgcuguccugcacgaagaacaacagccaccacuacaucauggucggcaacgagaccggccuggagcucacccugaccaacacguccaucaucaaccacaaguucugcaaccugagcgacgcccacaagcggaaccucuacaaccacgcccugauguccaucaucagcaccuuccaccuguccauccccaacuucaaccaguacgaggccaugagcugcgacuucaacgggggcaagaucuccgugcaguacaaccucagccacaccuacgcgguggacgccgccaaccacugcgggaccaucgccaacggcguccugcagacguucaugcgcauggcguggggcggguccuacaucgcccuggacagcggcaagggguccugggacugcaucaugaccagcuaccaguaccucaucauccagaacaccaccugggaggaccacugccaguucucccggcccagccccaucggcuaccuggggcugcucagccagcgcacgcgggacaucuacaucucccgccggcugcugggcaccuucaccuggacccucagcgacuccgagggcaacgagacgcccgggggcuacugccugacccgcuggaugcugaucgaggccgagcucaagugcuucgggaacaccgccguggccaagugcaacgagaagcacgacgaggaguucugcgacaugcugcggcuguucgacuucaacaagcaggcgauccgccggcucaagaccgaggcccagaugagcauccagcugaucaacaaggccgugaacgcccugaucaacgaccagcucaucaugaagaaccaccuccgcgacaucaugggcauccccuacugcaacuacuccaaguacugguaccugaaccacacggucaccgggaagaccagccugccccggugcuggcugguguccaacggcagcuaccugaacgagacccacuucuccgacgacaucgagcagcaggccgacaacaugaucacggagcuccugcagaaggaguacaucgaccgccagggcaagaccccgcuggggcucguggaccuguucgucuucagcaccuccuucuaccugaucagcaucuuccugcaccucgugaagaucccgacccaccggcacaucaucggcaagcccugccccaagccccaccgccugaaccacauggggaucugcuccugcggccuguacaagcacccgggggugcccgucaaguggcggcgcuga

SEQ ID NO: 628 - RNA, 1473 nt, Artificial Sequence
  derived and/or modified protein sequence (opt1) from LASV(LASV056-NIG-2008;Clade II)__AIT17612__GPC
augggccagaucaucaccuucuuccaggaggugccccacgucaucgaggaggugaugaacaucgugcugaucgcccucagccugcuggccauccucaaggggaucuacaacgucgcgaccugcggccuguucgggcugguguccuuccuccugcugugcggccgcagcugcuccacgaccuacaaggggguguacgagcuccagacccuggagcuggacauggccagccucaacaugaccaugccgcuguccugcacgaagaacaacagccaccacuacauccgggucggcaacgagaccggccuggagcucacccugaccaacacguccaucaucaaccacaaguucugcaaccugagcgacgcccacaagaagaaccucuacgaccacucccugaugagcaucaucuccaccuuccaccugagcauccccaacuucaaccaguacgaggccauguccugcgacuucaacgggggcaagaucagcgugcaguacaaccucucccacaccuacgccguggacgcggccaaccacugcgggaccaucgccaacggcguccugcagacguucaugcgcauggccuggggcgggagcuacaucgcgcuggacuccggcaaggggaacugggacugcaucaugaccagcuaccaguaccucaucauccagaacaccaccugggaggaccacugccaguucucccggcccagccccaucggcuaccuggggcugcucagccagcgcacgcgggacaucuacaucucccgccggcugcugggcaccuucaccuggacccucagcgacuccgagggcaacgagacgcccgggggcuacugccugacccgcuggaugcugaucgaggccgagcucaagugcuucgggaacaccgccguggccaagugcaacgagaagcacgacgaggaguucugcgacaugcugcggcuguucgacuucaacaagcaggccauccgccggcucaagaccgaggcgcagaugagcauccagcugaucaacaaggccgugaacgcccugaucaacgaccagcucaucaugaagaaccaccuccgcgacaucaugggcauccccuacugcaacuacuccaaguacugguaccugaaccacacggucaccgggaagaccagccugccccggugcuggcugguguccaacggcagcuaccugaacgagacccacuucuccgacgacaucgagcagcaggccgacaacaugaucacggagcuccugcagaaggaguacaucgaccgccagggcaagaccccgcuggggcucguggaccuguucgucuucagcaccuccuucuaccugaucagcaucuuccugcaccucgugaagaucccgacccaccggcacguggucggcaagcccugccccaagccccaccgccugaaccacauggggaucugcuccugcggccuguacaagcacccgggggugcccgugaaguggaagcgguga

SEQ ID NO: 629 - RNA, 1473 nt, Artificial Sequence
  derived and/or modified protein sequence (opt1) from LASV(LASV058-NIG-2008;Clade II)__AIT17616__GPC
augggccagaucaucaccuucuuccaggaggugccccacgucaucgaggaggugaugaacaucgugcugaucgcccucagccugcuggccauccucaaggggaucuacaacgucgcgaccugcggccuguucgggcugguguccuuccuccugcugugcggccgcagcugcuccacgaccuacaaggggguguacgagcuccagacccuggagcuggacauggccagccucaacaugaccaugccgcuguccugcacgaagaacaacagccaccacuacaucauggucggcaacgagaccggccuggagcucacccugaccaacacguccaucaucaaccacaaguucugcaaccugagcgacgcccacaagaagaaccucuacgaccacgcccugauguccaucaucagcaccuuccaccuguccauccccaacuucaaccaguacgaggccaugagcugcgacuucaacgggggcaagaucuccgugcaguacaaccucagccacgcguacgccguggacgccgccaaccacugcgggaccaucgcgaacggcguccugcagaccuucaugcggauggccuggggcggguccuacaucgcccuggacagcggcaagggguccugggacugcaucaugacgagcuaccaguaccucaucauccagaacaccaccugggaggaccacugccaguucucccgccccagccccaucggcuaccuggggcugcucagccagcggacccgcgacaucuacaucucccggcgccugcugggcacguucaccuggacccucagcgacuccgagggcaacgagacccccgggggcuacugccugacgcgguggaugcugaucgaggccgagcucaagugcuucgggaacaccgccguggcgaagugcaacgagaagcacgacgaggaguucugcgacaugcugcgccuguucgacuucaacaagcaggccauccggcgccucaagaccgaggcccagaugagcauccagcugaucaacaaggccgugaacgcccugaucaacgaccagcucaucaugaagaaccaccuccgggacaucaugggcaucccguacugcaacuacuccaaguacugguaccugaaccacaccgucacggggaagaccagccugccccgcugcuggcugguguccaacggcagcuaccugaacgagacccacuucuccgacgacaucgagcagcaggcggacaacaugaucaccgagcuccugcagaaggaguacaucgaccggcagggcaagacgccccuggggcucguggaccuguucgucuucagcaccuccuucuaccugaucagcaucuuccugcaccucgugaagaucccgacccaccgccacgugaucggcaagcccugccccaagccccaccggcugaaccacauggggaucugcuccugcggccuguacaagcacccggggguccccgugaaguggaagcgcuga

SEQ ID NO: 630 - RNA, 1473 nt, Artificial Sequence
  derived and/or modified protein sequence (opt1) from LASV(LASV063-NIG-2009;Clade II)__AIT17620__GPC
augggccagaucaucaccuucuuccaggaggugccccacgucaucgaggaggugaugaacaucgugcugaucgcccucagccugcuggccauccucaaggggaucuacaacgucgcgaccugcggccuguucgggcugguguccuuccuccugcugugcggccgcagcugcuccacgaccuacaaggggguguacgagcuccagacccuggagcuggacauggccagccucaacaugaccaugccgcuguccugcacgaagaacaacagccaccacuacaucauggucggcaacgagaccggccuggagcucacccugaccaacacguccaucaucagccacaaguucugcaaccuguccgacgcccacaagaagaaccucuacgaccacgcccugaugagcaucaucuccaccuuccaccugagcauccccaacuucaaccaguacgaggccauguccugcgacuucaacgggggcaagaucagcgugcaguacaaccucucccacgcguacgccaucgacgccgccaaccacugcgggaccguggcgaacggcguccugcagaccuucaugcggauggccuggggcgggagcuacaucgcccuggacuccggcaaggggagcugggacugcaucaugacguccuaccaguaccucaucauccagaacaccaccugggaggaccacugccaguucagccgccccagccccaucggcuaccuggggcugcucucccagcggacccgcgacaucuacaucagccggcgccugcugggcacguucaccuggacccucuccgacagcgagggcaacgagacccccgggggcuacugccugacgcgguggaugcugaucgaggccgagcucaagugcuucgggaacaccgccguggcgaagugcaacgagaagcacgacgaggaguucugcgacaugcugcgccuguucgacuucaacaagcaggccauccggcgccucaaggccgaggcccagauguccauccagcugaucaacaaggccgugaacgcgcugaucaacgaccagcucaucaugaagaaccaccuccgggacaucaugggcauccccuacugcaacuacagcaaguacugguaccugaaccacaccgucaccgggaagacgucccugccccgcugcuggcuggugagcaacggcuccuaccugaacgagacccacuucagcgacgacaucgagcagcaggccgacaacaugaucaccgagcuccugcagaaggaguacauggaccggcagggcaagaccccgcuggggcucguggaccuguucgucuucuccacgagcuucuaccugaucuccaucuuccugcaccucgugaagaucccgacccaccgccacgugaucggcaagcccugccccaagccccaccggcugaaccacauggggaucugcagcugcggccuguacaagcacccggggguccccgugaaguggaagcgcuga

SEQ ID NO: 631 - RNA, 1473 nt, Artificial Sequence
  derived and/or modified protein sequence (opt1) from LASV(LASV1000-NIG-2009;Clade II)__AIT17782__GPC
augggccagaucaucaccuucuuccaggaggugccccacgucaucgaggaggugaugaacaucgugcugaucgcccucagccugcuggccauccucaaggggaucuacaacgucgcgaccugcggccuguucgggcugguguccuuccuccugcugugcggccgcagcugcuccacgaccuacaaggggguguacgagcuccagacccuggagcuggacauggccagccucaacaugaccaugccgcuguccugcacgaagaacaacagccaccacuacaucauggucggcaacgagaccggccuggagcucacccugaccaacacguccaucaucaaccacaaguucugcaaccugagcgacgcccacaagaagaaccucuacgaccacgcccugauguccaucaucagcaccuuccaccuguccauccccaacuucaaccaguacgaggccaugagcugcgacuucaacgggggcaagaucuccgugcaguacaaccucagccacaccuacgcgguggacgccgccaaccacugcgggaccaucgccaacggcguccugcagacguucaugcggauggcguggggcggguccuacaucgcccuggacagcggcaagggguccugggacugcaucaugaccagcuaccaguaccucaucauccagaacaccaccugggaggaccacugccaguucucccgccccagccccaucggcuaccuggggcugcucagccagcggacgcgcgacaucuacaucucccggcgccugcugggcaccuucaccuggacccucagcgacuccgagggcaacgagacgcccgggggcuacugccugacccgguggaugcugaucgaggccgagcucaagugcuucgggaacaccgccguggccaagugcaacgagaagcacgacgaggaguucugcgacaugcugcgccuguucgacuucaacaagcaggcgaucaagcggcucaagaccgaggcccagaugagcauccagcugaucaacaaggccgugaacgcccugaucaacgaccagcucaucaugaagaaccaccuccgcgacaucaugggcauccccuacugcaacuacuccaaguacugguaccugaaccacacggucaccgggaagaccagccugccccggugcuggcugguguccaacggcagcuaccugaacgagacccacuucuccgacgacaucgagcagcaggccgacaacaugaucacggagcuccugcagaaggaguacaucgaccgccagggcaagaccccgcuggggcucguggaccuguucgucuucagcaccuccuucuaccugaucagcaucuuccugcaccucgugaagaucccgacccaccggcacguggucggcaagcccugccccaagccccaccgccugaaccacauggggaucugcuccugcggccuguacaagcacccgggggugcccgugaaguggaagcgguga

SEQ ID NO: 632 - RNA, 1473 nt, Artificial Sequence
  derived and/or modified protein sequence (opt1) from LASV(LASV1008-NIG-2009;Clade II)__AIT17786__GPC
augggccagaucaucaccuucuuccaggaggugccccacgucaucgaggaggugaugaacaucgugcugaucgcccucagccugcuggccauccucaaggggaucuacaacgucgcgaccugcggccuguucgggcugguguccuuccuccugcugugcggccgcagcugcuccacgaccuacaaggggguguacgagcuccagacccuggagcuggacauggccagccucaacaugaccaugccgcuguccugcacgaagaacaacagccaccacuacaucauggucggcaacgagaccggccuggagcucacccugaccaacacguccaucaucaaccacaaguucugcaaccugagcgacgcccacaagaagaaccucuacgaccacgcccugauguccaucaucagcaccuuccaccuguccauccccaacuucaaccaguacgaggccaugagcugcgacuucaacgggggcaagaucuccgugcaguacaaccucagccacgcguacgccaucgacgccgccgaccacugcgggaccaucgcgaacggcgugcugcagaccuucaugcggauggccuggggcggguccuacaucgcccuggacagcggcaagggguccugggacugcaucaugacgagcuaccaguaccucaucauccagaacaccaccugggaggaccacugccaguucucccgccccagccccaucggcuaccuggggcugcucagccagcggacccgcgacaucuacaucucccggcgccugcugggcacguucaccuggacccucagcgacuccgagggcaacgagacccccgggggcuacugccugacgcgguggaugcugaucgaggccgagcucaagugcuucgggaacaccgccgucgcgaagugcaacgagaagcacgacgaggaguucugcgacaugcugcgccuguucgacuucaacaagcaggccauccggcgccucaagaccgaggcccagaugagcauccagcugaucaacaaggccgugaacgcccugaucaacgaccagcucaucaugaagaaccaccuccgggacaucaugggcaucccguacugcaacuacuccaaguacugguaccugaaccacaccgugacggggaagaccagccugccccgcugcuggcuggucuccaacggcagcuaccugaacgagacccacuucuccgacgacaucgagcagcaggcggacaacaugaucaccgagcuccugcagaaggaguacauggaccggcagggcaagacgccccuggggcucguggaccuguucguguucagcaccuccuucuaccugaucagcaucuuccugcaccucgucaagaucccgacccaccgccacaucaccggcaagcccugccccaagccccaccggcugaaccacauggggaucugcuccugcggccuguacaagcacccgggggugcccgugaaguggaagcgcuga

SEQ ID NO: 633 - RNA, 1473 nt, Artificial Sequence
  derived and/or modified protein sequence (opt1) from LASV(LASV1011-NIG-2009;Clade II)__AIT17790__GPC
augggccagaucaucaccuucuuccaggaggugccccacgucaucgaggaggugaugaacaucgugcugaucgcccucagccugcuggccauccucaaggggaucuacaacgucgcgaccugcggccuguucgggcugguguccuuccuccugcugugcggccgcagcugcuccacgaccuacaaggggguguacgagcuccagacccuggagcuggacauggccagccucaacaugaccaugccgcuguccugcacgaagaacaacagccaccacuacaucauggucggcaacgagaccggccuggagcucacccugaccaacacguccaucaucaaccacaaguucugcaaccugagcgacgcccacaagaagaaccucuacgaccacgcccugauguccaucaucagcaccuuccaccuguccauccccaacuucaaccaguacgaggccaugagcugcgacuucaacgggggcaagaucuccgugcaguacaaccucagccacaccuacgcgguggacgccgccaaccacugcgggaccaucgccaacggcguccugcagacguucaugcggauggcguggggcggguccuacaucgcccuggacagcggcaagggguccugggacugcaucaugaccagcuaccaguaccucaucauccagaacaccaccugggaggaccacugccaguucucccgccccagccccaucggcuaccuggggcugcucagccagcggacgcgcgacaucuacaucucccggcgccugcugggcaccuucaccuggacccucagcgacuccgagggcaacgagacgcccgggggcuacugccugacccgguggaugcugaucgaggccgagcucaagugcuucgggaacaccgccguggccaagugcaacgagaagcacgacgaggaguucugcgacaugcugcgccuguucgacuucaacaagcaggcgauccggcgccucaagaccgaggcccagaugagcauccagcugaucaacaaggccgugaacgcccugaucaacgaccagcucaucaugaagaaccaccuccgggacaucaugggcauccccuacugcaacuacuccaaguacugguaccugaaccacacggucaccgggaagaccagccugccccgcugcuggcugguguccaacggcagcuaccugaacgagacccacuucuccgacgacaucgagcagcaggccgacaacaugaucacggagcuccugcagaaggaguacauggaccggcagggcaagaccccgcuggggcucguggaccuguucgucuucagcaccuccuucuaccugaucagcaucuuccugcaccucgugaagaucccgacccaccgccacaucacgggcaagcccugccccaagccccaccggcugaaccacauggggaucugcuccugcggccuguacaagcacccgggggugcccgucaaguggaagcgcuga

SEQ ID NO: 634 - RNA, 1473 nt, Artificial Sequence
  derived and/or modified protein sequence (opt1) from LASV(LASV1016-NIG-2009;Clade II)__AIT17798__GPC
augggccagaucaucaccuucuuccaggaggugccccacgucaucgaggaggugaugaacaucgugcugaucgcccucagccugcuggccauccucaaggggaucuacaacgucgcgaccugcggccuguucgggcugguguccuuccuccugcugugcggccgcagcugcuccacgaccuacaaggggguguacgagcuccagacccuggagcuggacauggccagccucaacaugaccaugccgcuguccugcacgaagaacaacagccaccacuacaucauggucggcaacgagaccggccuggagcucacccugaccaacacguccaucaucaaccacaaguucugcaaccugagcgacgcccacaagaagaaccucuacgaccacgcccugauguccaucaucagcaccuuccaccuguccauccccaacuucaaccaguacgaggccaugagcugcgacuucaacgggggcaagaucuccgugcaguacaaccucagccacaccuacgcgguggacgccgccaaccacugcgggaccaucgccaacggcguccugcagacguucaugcggauggcguggggcggguccuacaucgcccuggacagcggcaagggguccugggacugcaucaugaccagcuaccaguaccucaucauccagaacaccaccugggaggaccacugccaguucucccgccccagccccaucggcuaccuggggcugcucagccagcggacgcgcgacaucuacaucucccggcgccugcugggcaccuucaccuggacccucagcgacuccgagggcaacgagacgcccgggggcuacugccugacccgguggaugcugaucgaggccgagcucaagugcuucgggaacaccgccguggccaagugcaacgagaagcacgacgaggaguucugcgacaugcugcgccuguucgacuucaacaagcaggcgaucaugcggcucaagaccgaggcccagaugagcauccagcugaucaacaaggccgugaacgcccugaucaacgaccagcucaucaugaagaaccaccuccgcgacaucaugggcauccccuacugcaacuacuccaaguacugguaccugaaccacacggucaccgggaagaccagccugccccggugcuggcugguguccaacggcagcuaccugaacgagacccacuucuccgacgacaucgagcagcaggccgacaacaugaucacggagaugcuccagaaggaguaccuggaccgccagggcaagaccccgcuggggcucguggaccuguucgucuucagcaccuccuucuaccugaucagcaucuuccugcaccucgugaagaucccgacccaccggcacaucaucggcaagcccugccccaagccccaccgccugaaccacauggggaucugcuccugcggccuguacaagcacccgggggugcccgucaaguggaagcgguga

SEQ ID NO: 635 - RNA, 1473 nt, Artificial Sequence; identical to SEQ ID NO: 547
  derived and/or modified protein sequence (opt1) from LASV(LASV221-NIG-2010;Clade II)__AIT17624__GPC

SEQ ID NO: 636 - RNA, 1473 nt, Artificial Sequence
  derived and/or modified protein sequence (opt1) from LASV(LASV224-NIG-2010;Clade II)__AIT17626__GPC
augggccagaucaucaccuucuuccaggaggugccccacgucaucgaggaggugaugaacaucgugcugaucgcccucagccugcuggccauccucaagggggucuacaacguggcgaccugcggccuguucgggcugguguccuuccuccugcugugcggccgcagcugcuccacgaccuacaagggggucuacgagcuccagacccuggagcuggacauggccagccucaacaugaccaugccgcuguccugcacgaagaacaacagccaccacuacaucauggugggcaacgagaccggccuggagcucacccugaccaacacguccaucauccagcacaaguucugcaaccugagcgacgcccacaagaagaaccucuacgaccacgcccugauguccaucaucagcaccuuccaccuguccauccccaacuucaaccaguacgaggccaugagcugcgacuucaacgggggcaagaucaccgugcaguacaaccucucccacagcuacgcgaucgacgccgccaaccacugcgggaccaucgccaacggcguccugcagacguucaugcggauggcguggggcggguccuacaucgcccuggacagcggcaagggguccugggacugcaucaugaccagcuaccaguaccucaucauccagaacaccaccugggaggaccacugccaguucucccgccccagccccaucggcuaccuggggcugcucagccagcggacgcgcgacaucuacaucucccggcgccugcugggcaccuucaccuggacccucagcgacuccgagggcaacgagacgcccgggggcuacugccugacccgguggaugcugaucgaggccgagcucaagugcuucgggaacaccgccguggccaagugcaacgagaagcacgacgaggaguucugcgacaugcugcgccuguucgacuucaacaagcaggcgauccggcgccucaagaccgaggcccagaugagcauccagcugaucaacaaggccgugaacgcccugaucaacgaccagcucaucaugaagaaccaccuccgggacaucaugggcauccccuacugcaacuacuccaaguacugguaccugaaccacacggucaccgggcgcaccagccugccccggugcuggcugguguccaacggcagcuaccugaacgagacccacuucuccgacgacaucgagcagcaggccgacaacaugaucacggagcuccugcagaaggaguacauggaccgccagggcaagaccccgcuggggcucguggaccuguucgucuucagcaccuccuucuaccugaucagcaucuuccugcaccucgugaagaucccgacccaccggcacaucaucggcaagcccugccccaagccccaccgccugaaccacaugggggugugcuccugcggccuguacaagcacccggggguccccgugaaguggaagcgguga

SEQ ID NO: 637 - RNA, 1473 nt, Artificial Sequence
  derived and/or modified protein sequence (opt1) from LASV(LASV225-NIG-2010;Clade II)__AIT17630__GPC
augggccagaucaucaccuucuuccaggaggugccccacgucaucgaggaggugaugaacaucgugcugaucgcccucagccugcuggccauccucaaggggaucuacaacgucgcgaccugcggccuguucgggcugcucuccuuccugcugcucugcggccgcagcugcuccacgaccuacaaggggguguacgagcugcagacccuggagcucgacauggccagccugaacaugaccaugccgcuguccugcacgaagaacaacagccaccacuacaucauggugggcaacgagaccggccucgagcugacccugaccaacacguccaucaucaaccacaaguucugcaaccucagcgacgcccacaagaagaaccuguacgaccacgcccugauguccaucaucagcaccuuccaccucuccauccccaacuucaaccaguacgaggccaugagcugcgacuucaacgggggcaagaucuccguccaguacaaccugagccacgcguacgccguggacgccgccgagcacugcgggaccaucgcgaacggcgugcugcagaccuucaugcggauggccuggggcggguccuacaucgcccucgacagcggcaagggguccugggacugcgucaugacgagcuaccaguaccugaucauccagaacaccuccugggaggaccacugccaguucagccgccccagccccaucggcuaccuggggcuccugucccagcggacccgcgacaucuacaucagccggcgccugcucggcaccuucacguggacccuguccgacagcgagggcaacgagacccccgggggcuacugccugacccgguggaugcucaucgaggccgagcugaagugcuucgggaacacggccguggcgaagugcaacgagaagcacgacgaggaguucugcgacaugcugcgccucuucgacuucaacaagcaggccauccggcgccugaagaccgaggcccagauguccauccagcugaucaacaaggccgugaacgcccucaucaacgaccagcugaucaugaagaaccaccuccgggacaucaugggcauccccuacugcaacuacagcaaguacugguaccugaaccacaccgucaccgggaagacgucccugccccgcugcuggcuggugagcaacggcuccuaccucaacgagacccacuucagcgacgacaucgagcagcaggcggacaacaugaucaccgagcugcugcagaaggaguacaucgaccggcagggcaagaccccgcucgggcugguggaccuguucgucuucuccacgagcuucuaccugaucuccaucuuccuccaccuggugaagaucccgacccaccgccacgugaucggcaagcccugccccaagccccaccggcugaaccacauggggaucugcagcugcggccucuacaagcacccggggguccccgugaaguggaagcgcuga

SEQ ID NO: 638 - RNA, 1473 nt, Artificial Sequence
  derived and/or modified protein sequence (opt1) from LASV(LASV229-NIG-2010;Clade II)__AIT17634__GPC
augggccagaucaucaccuucuuccaggaggugccccacgucaucgaggaggugaugaacaucgugcugaucgcccucagccugcuggccauccucaaggggaucuacaacgucgcgaccugcggccuguucgggcugguguccuuccuccugcugugcggccgcagcugcuccacgaucuacaaggacguguacgagcuccagacccuggagcuggacauggccagccucaacaugaccaugccgcuguccugcaccaagaacaacagccaccacuacaucauggucgggaacgagacgggccuggagcucacccugaccaacaccuccaucaucaaccacaaguucugcaaccugagcgacgcccacaagaagaaccucuacgaccacgcccugauguccaucaucagcacguuccaccuguccauccccaacuucaaccaguacgaggccaugagcugcgacuucaacggcgggaagaucuccgugcaguacaaccucagccacaccuacgcgaucgacgccgccaaccacugcggcaccaucgccaacggggugcugcagaccuucaugcggauggcguggggcggguccuacaucgcccuggacagcggcaagggcuccugggacugcaucaugacgagcuaccaguaccucaucauccagaacaccaccugggaggaccacugccaguucucccgccccagccccaucggguaccugggccugcucagccagcggacccgcgacaucuacaucucccggcgccugcuggggacguucaccuggacccucagcgacuccgagggcaacgagaccccgggcggguacugccugacgcgguggaugcugaucgaggccgagcucaagugcuucggcaacaccgccgucgccaagugcaacgagaagcacgacgaggaguucugcgacaugcugcgccuguucgacuucaacaagcaggcgauccggcgccucaagaccgaggcccagaugagcauccagcugaucaacaaggccgugaacgcccugaucaacgaccagcucaucaugaagaaccaccuccgggacaucauggggauccccuacugcaacuacucccgcuacugguaccugaaccacaccgugacgggccggaccagccugccccgcugcuggcuggucuccaacgggagcuaccugaacgagacccacuucuccgacgacaucgagcagcaggccgacaacaugaucaccgagcuccugcagaaggaguacauggaccggcagggcaagacgccccugggccucguggaccuguucguguucagcaccuccuucuaccugaucagcaucuuccugcaccucgucaagaucccgacccaccgccacgugaucgggaagcccugccccaagccccaccggcugaaccacaugggcaucugcuccugcgggcuguacaaccacccgggcgugcccgucaaguggaagcgcuga

SEQ ID NO: 639 - RNA, 1473 nt, Artificial Sequence
  derived and/or modified protein sequence (opt1) from LASV(LASV237-NIG-2010;Clade II)__AIT17638__GPC
augggccagaucaucaccuucuuccaggaggugccccacgucaucgaggaggugaugaacaucgugcugaucgcccucagccugcuggccauccucaaggggaucuacaacgucgcgaccugcggccuguucgggcugguguccuuccuccugcugugcggccgcagcugcuccacgaccuacaaggggguguacgagcuccagacccuggagcuggacauggccagccucaacaugaccaugccgcuguccugcacgaagaacaacagccaccacuacaucauggucggcaacgagaccggccuggagcucacccugaccaacacguccaucaucaaccacaaguucugcaaccugagcgacgcccacaagaaggaccucuacgaccacgcccugauguccaucaucagcaccuuccaccuguccauccccaacuucaaccaguacgaggccaugagcugcgacuucaacgggggcaagaucuccgugcaguacaaccucagccacaccuacgcgguggacgccgccaaccacugcgggaccaucgccaacggcguccugcagacguucaugcggauggcguggggcggguccuacaucgcccuggacagcggcaagggguccugggacugcaucaugaccagcuaccaguaccucaucauccagaacaccaccugggaggaccacugccaguucucccgccccagccccaucggcuaccuggggcugcucagccagcggacgcgcgacaucuacaucucccggcgccugcugggcaccuucaccuggacccucagcgacuccgagggcaacgagacgcccgggggcuacugccugacccgguggaugcugaucgaggccgagcucaagugcuucgggaacaccgccguggccaagugcaacgagaagcacgacgaggaguucugcgacaugcugcgccuguucgacuucaacaagcaggcgauccggcgccucaagaccgaggcccagaugagcauccagcugaucaacaaggccgugaacgcccugaucaacgaccagcucaucaugaagaaccaccuccgggacaucaugggcauccccuacugcaacuacuccaaguacugguaccugaaccacacggucaccgggaagaccagccugccccgcugcuggcugguguccaacggcagcuaccugaacgagacccacuucuccgacgacaucgagcagcaggccgacaacaugaucacggagcuccugcagaaggaguacauggaccggcagggcaagaccccgcuggggcucguggaccuguucgucuucagcaccuccuucuaccugaucagcaucuuccugcaccucaucaagaucccgacccaccgccacaucacgggcaagcccugccccaagccccaccggcugaaccacauggggaucugcuccugcggccuguacaagcacccgggggugcccgugaaguggaagcgcuga

SEQ ID NO: 640 - RNA, 1473 nt, Artificial Sequence
  derived and/or modified protein sequence (opt1) from LASV(LASV239-NIG-2010;Clade II)__AIT17642__GPC
augggccagaucaucaccuucuuccaggaggugccccacgucaucgaggaggugaugaacaucgugcugaucgcccucagccugcuggccauccucaagggggucuacaacguggcgaccugcggccuguucgggcugguguccuuccuccugcugugcggccgcagcugcuccacgaccuacaagggggucuacgagcuccagacccuggagcuggacauggccagccucaacaugaccaugccgcuguccugcacgaagaacaacagccaccacuacaucauggugggcaacgacaccggccuggagcucacccugaccaacacguccaucaucaaccacaaguucugcaaccugagcgacgcccacaagaagaaccucuacgaccacgcccugauguccaucaucagcaccuuccaccuguccauccccaacuucaaccaguacgaggccaugagcugcgacuucaacgggggcaagaucuccgugcaguacaaccucagccacgcguacgccgucgacgccgccucccacugcgggaccaucgcgaacggcgugcugcagaccuucaugcggauggccuggggcgggagcuacaucgcccuggacuccggcaaggggagcugggacugcaucaugacguccuaccaguaccucaucauccagaacaccaccugggaggaccacugccaguucagccgccccagccccaucggcuaccuggggcugcucucccagcggacccgcgacaucuacaucagccggcgccugcugggcacguucaccuggacccucuccgacagcgagggcaacgagacccccgggggcuacugccugacgcgguggaugcugaucgaggccgagcucaagugcuucgggaacaccgccguggcgaagugcaacgagaagcacgacgaggaguucugcgacaugcugcgccuguucgacuucaacaagcaggccauccggcgccucaagaccgaggcccagauguccauccagcugaucaacaaggccgucaacgcccugaucaacgaccagcucaucaugaagaaccaccuccgggacaucaugggcaucccguacugcaacuacagcaaguacugguaccugaaccacaccgugacggggaagaccucccugccccgcugcuggcuggugagcaacggcuccuaccugaacgagacccacuucagcgacgacaucgagcagcaggcggacaacaugaucaccgagcuccugcagaaggaguacauggaccggcagggcaagacgccccuggggcucgucgaccuguucguguucuccaccagcuucuaccugaucuccaucuuccugcaccucgugaagaucccgacccaccgccacaucaucggcaagcccugccccaagccccaccggcugaaccacauggggaucugcagcugcggccuguacaagcacccggggguccccgugaaguggaagcgcuga

SEQ ID NO: 641 - RNA, 1473 nt, Artificial Sequence
  derived and/or modified protein sequence (opt1) from LASV(LASV241-NIG-2011;Clade II)__AIT17646__GPC
augggccagaucaucaccuucuuccaggaggugccccacgucaucgaggaggugaugaacaucgugcugaucgcccucagccugcuggccauccucaaggggaucuacaacgucgcgaccugcggccuguucgggcugguguccuuccuccugcugugcggccgcagcugcuccacgaccuacaaggggguguacgagcuccagacccuggagcuggacauggccagccucaacaugaccaugccgcuguccugcacgaagaacaacagccaccacuacaucauggucggcaacgagaccggccuggagcucacccugaccaacacguccaucaucaaccacaaguucugcaaccugagcgacgcccacaagaagaaccucuacgaccacgcccugauguccaucaucagcaccuuccaccuguccauccccaacuucaaccaguacgaggccaugagcugcgacuucaacgggggcaagaucuccgugcaguacaaccucagccacgcguacgccguggacgccgccucccacugcgggaccgucgcgaacggcgugcugcagaccuucaugcggauggccuggggcgggagcuacaucgcccuggacuccggcaaggggagcugggacugcaucaugacguccuaccaguaccucaucauccagaacaccaccugggaggaccacugccaguucagccgccccagccccaucggcuaccuggggcugcucucccagcggacccgcgacaucuacaucagccggcgccugcugggcacguucaccuggacccucuccgacagcgagggcaacgagacccccgggggcuacugccugacgcgguggaugcugaucgaggccgagcucaagugcuucgggaacaccgccguggcgaagugcaacgagaagcacgacgaggaguucugcgacaugcugcgccuguucgacuucaacaagcaggccauccggcgccucaagaccgaggcccagauguccauccagcugaucaacaaggccgucaacgcccugaucaacgaccagcucaucaugaagaaccaccuccgggacaucaugggcaucccguacugcaacuacagcaaguacugguaccugaaccacaccgugacggggaagaccucccugccccgcugcuggcuggugagcaacggcuccuaccugaacgagacccacuucagcgacgacaucgagcagcaggcggacaacaugaucaccgagcuccugcagaaggaguacauggaccggcagggcaagacgccccuggggcucgucgaccuguucguguucuccaccagcuucuaccugaucuccaucuuccugcaccucgugaagaucccgacccaccgccacgucaucggcaagcccugccccaagccccaccggcugaaccacauggggaucugcagcugcggccuguacaagcacccgggggugcccgugaaguggaagcgcuga

SEQ ID NO: 642 - RNA, 1473 nt, Artificial Sequence
  derived and/or modified protein sequence (opt1) from LASV(LASV242-NIG-2010;Clade II)__AIT17650__GPC
augggccagaucaucaccuucuuccaggaggugccccacgucaucgaggaggugaugaacaucgugcugaucgcccucagccugcuggccauccucaaggggaucuacaacgucgcgaccugcggccuguucgggcugguguccuuccuccugcugugcggccgcagcugcuccacgaccuacaaggggguguacgagcuccagacccuggagcuggacauggccagccucaacaugaccaugccgcuguccugcacgaagaacaacagccaccacuacaucauggucggcaacgagaccggccuggagcucacccugaccaacaucuccaucaucaaccacaaguucugcaaccugagcgacgcccacaagaagaaccucuacgaccacgcccugauguccaucaucagcacguuccaccuguccauccccaacuucaaccaguacgaggccaugagcugcgacuucaacgggggcaagaucuccgugcaguacaaccucagccacaccuacgcgguggacgccgccaaccacugcgggaccaucgccaacggcguccugcagaccuucaugcggauggcguggggcggguccuacaucgcccuggacagcggcaagggguccugggacugcaucaugacgagcuaccaguaccucaucauccagaacaccaccugggaggaccacugccaguucucccgccccagccccaucggcuaccuggggcugcucagccagcggacccgcgacaucuacaucucccggcgccugcugggcacguucaccuggacccucagcgacuccgagggcaacgagacccccgggggcuacugccugacgcgguggaugcugaucgaggccgagcucaagugcuucgggaacaccgccguggccaagugcaacgagaagcacgacgaggaguucugcgacaugcugcgccuguucgacuucaacaagcaggcgauccggcgccucaaggccgaggcccagaugagcauccagcugaucaacaaggccgugaacgcccugaucaacgaccagcucaucaugaagaaccaccuccgggacaucaugggcauccccuacugcaacuacuccaaguacugguaccugaaccacaccgucaccgggcgcacgagccugccccggugcuggcugguguccaacggcagcuaccugaacgagacccacuucuccgacgacaucgagcagcaggcggacaacaugaucaccgagcuccugcagaaggaguacaucgaccgccagggcaagaccccgcuggggcucguggaccuguucgucuucagcacguccuucuaccugaucagcaucuuccugcaccucgugaagaucccgacccaccggcacaucaucggcaagcccugccccaagccccaccgccugaaccacauggggaucugcuccugcggccuguacaagcacccgggggugcccgucaaguggaagcgguga

SEQ ID NO: 643 - RNA, 1473 nt, Artificial Sequence
  derived and/or modified protein sequence (opt1) from LASV(LASV246-NIG-2010;Clade II)__AIT17658__GPC
augggccagaucaucaccuucuuccaggaggugccccacgucaucgaggaggugaugaacaucgugcugaucgcccucagccugcuggccauccucaagggggucuacaacguggcgaccugcggccuguucgggcugguguccuuccuccugcugugcggccgcagcugcuccaucacguacaagggggucuacgagcuccagacccuggagcuggacauggccaaccucaacaugaccaugccgcugagcugcaccaagaacaacucccaccacuacaucauggugggcaacgagacgggccuggagcucacccugaccaacaccagcaucaucaaccacaaguucugcaaccuguccgacgcccacaagaagaaccucuacgaccacgcccugaugagcaucaucuccacguuccaccugagcauccccaacuucaaccaguacgaggccauguccugcgacuucaacgggggcaagaucagcgugcaguacaaccucucccacaccuacgcgggggacgccgccgaccacugcggcaccaucgccaacgggguccugcagaccuucaugcggauggcguggggcggcagcuacaucgcccuggacuccgggaagggcagcugggacugcaucaugacguccuaccaguaccucaucauccagaacaccaccugggaggaccacugccaguucagccgccccucccccaugggguaccugggccugcucagccagcggacccgcgacaucuacaucagccggcgccugcugggcacguucaccuggacccucuccgacagcgaggggaacgagaccccgggcggguacugccugacgcgguggaugcugaucgaggccgagcucaagugcuucggcaacaccgccguggccaagugcaacgagaagcacgacgaggaguucugcgacaugcugcgccuguucgacuucaacaagcaggcgauccggcgccucaagaccgaggcccagauguccauccagcugaucaacaaggccgugaacgcccugaucaacgaccagcucaucaugaagaaccaccuccgggacaucauggggauccccuacugcaacuacagcaaguacugguaccugaaccacaccaucacgggcaagaccucccugccccgcugcuggcuggucagcaacggcuccuaccugaacgagacccacuucagcgacgacaucgagcagcaggccgacaacaugaucaccgagcuccugcagaaggaguacaucgaccggcaggggaagacgccccugggccucguggaccuguucguguucuccaccagcuucuaccugaucuccaucuuccugcaccucgucaagaucccgacccaccgccacaucaccgggaagcccugccccaagccccaccggcugaaccacaugggcaucugcagcugcgggcuguacaagcacccgggcgugcccgugcgcuggaagcgguga

SEQ ID NO: 644 - RNA, 1473 nt, Artificial Sequence
  derived and/or modified protein sequence (opt1) from LASV(LASV251-NIG-2010;Clade II)__AIT17666__GPC
augggccagaucgugaccuucuuccaggaggucccccacgugaucgaggaggugaugaacaucguccugaucgcccucagccugcuggccauccucaaggggaucuacaacguggcgaccugcggccuguucgggcugguguccuuccuccugcugugcggccgcagcugcuccacgaccuacaagggggucuacgagcuccagacccuggagcuggacauggccagccucaacaugaccaugccgcuguccugcacgaagaacaacagccaccacuacaucauggugggcaacgagaccggccuggagcucacccugaccaacacguccaucaucaaccacaaguucugcaaccugagcgacgcccacaagaagaaccucuacgaccacgcccugauguccaucaucagcaccuuccaccuguccauccccaacuucaaccaguacgaggccaugagcugcgacuucaacgggggcaagaucuccgugcaguacaaccucagccacaccuacgcggucgacgccgccaaccacugcgggaccaucgccaacggcgugcugcagacguucaugcggauggcguggggcggguccuacaucgcccuggacagcggcaagggguccugggacugcaucaugaccagcuaccaguaccucaucauccagaacaccaccugggaggaccacugccaguucucccgccccagccccaucggcuaccuggggcugcucagccagcggacgcgcgacaucuacaucucccggcgccugcugggcaccuucaccuggacccucagcgacuccgagggcaacgagacgcccgggggcuacugccugacccgguggaugcugaucgaggccgagcucaagugcuucgggaacaccgccguggccaagugcaacgagaagcacgacgaggaguucugcgacaugcugcgccuguucgacuucaacaagcaggcgauccggcgccucaagaccgaggcccagaugagcauccagcugaucaacaaggccgucaacgcccugaucaacgaccagcucaucaugaagaaccaccuccgggacaucaugggcauccccuacugcaacuacuccaaguacugguaccugaaccacacggugaccgggaagaccagccugccccgcugcuggcugguguccaacggcagcuaccugaacgagacccacuucuccgacgacaucgagcagcaggccgacaacaugaucacggagcuccugcagaaggaguacauggaccggcagggcaagaccccgcuggggcucgucgaccuguucguguucagcaccuccuucuaccugaucagcaucuuccugcaccucgugaagaucccgacccaccgccacaucacgggcaagcccugccccaagccccaccggcugaaccacauggggaucugcuccugcggccuguacaagcacccggggguccccgugaaguggaagcgcuga

SEQ ID NO: 645 - RNA, 1473 nt, Artificial Sequence
  derived and/or modified protein sequence (opt1) from LASV(LASV253-NIG-2011;Clade II)__AIT17670__GPC
augggccagaucaucaccuucuuccaggaggugccccacgucaucgaggaggugaugaacaucgugcugaucgcccucagccugcuggccauccucaaggggaucuacaacgucgcgaccugcggccuguucgggcugguguccuuccuccugcugugcggccgcagcugcuccacgaccuacaaggggguguacgagcuccagacccuggagcuggacauggccagccucaacaugaccaugccgcuguccugcacgaagaacaacagccaccacuacaucauggucggcaacgagaccggccuggagcucacccugaccaacacguccaucaucaaccacaaguucugcaaccugagcgacgcccacaagaagaaccucuacgaccacgcccugauguccaucaucagcaccuuccaccuguccauccccaacuucaaccaguacgaggccaugagcugcgacuucaacgggggcaagaucuccgugcaguacaaccucagccacaccuacgcgguggacgccgccaaccacugcgggaccaucgccaacggcguccugcagacguucaugcggauggcguggggcggguccuacaucgcccuggacagcggcaagggguccugggacugcaucaugaccagcuaccaguaccucaucauccagaacaccaccugggaggaccacugccaguucucccgccccagccccaucggcuaccuggggcugcucagccagcggacgcgcgacaucuacaucucccggcgccugcugggcaccuucaccuggacccucagcgacuccgagggcaacgagacgcccgggggcuacugccugacccgguggaugcugaucgaggccgagcucaagugcuucgggaacaccgccguggccaagugcaacgagaagcacgacgaggaguucugcgacaugcugcgccuguucgacuucaacaagcaggcgauccggcgccucaaggccgaggcccagaugagcauccagcugaucaacaaggccgugaacgcccugaucaacgaccagcucaucaugaagaaccaccuccgggacaucaugggcaucccguacugcaacuacuccaaguacugguaccugaaccacaccgucacggggcgcaccagccugccccggugcuggcugguguccaacggcagcuaccugaacgagacccacuucuccgacgacaucgagcagcaggcggacaacaugaucaccgagcuccugcagaaggaguacaucgaccgccagggcaagacgccccuggggcucguggaccuguucgucuucagcaccuccuucuaccugaucagcaucuuccugcaccucgugaagaucccgacccaccggcacaucaucggcaagcccugccccaagccccaccgccugaaccacauggggaucugcuccugcggccuguacaagcacccgggggugcccgucaaguggaagcgguga

SEQ ID NO: 646 - RNA, 1473 nt, Artificial Sequence
  derived and/or modified protein sequence (opt1) from LASV(LASV254-NIG-2011;Clade II)__AIT17674__GPC
augggccagaucaucaccuucuuccaggaggugccccacgucaucgaggaggugaugaacaucgugcugaucgcccucagccugcuggccauccucaaggggaucuacaacgucgcgaccugcggccuguucgggcugguguccuuccuccugcugugcggccgcagcugcuccacgaccuacaaggggguguacgagcuccagacccuggagcuggacaugaccaaccucaacaugacgaugccgcugagcugcaccaagaacaacucccaccacuacaucauggucggcaacgagaccggccuggagcucacccugacgaacaccagcaucaucaaccacaaguucugcaaccuguccgacgcccacaagaagaaccucuacaaccacgcccugaugagcaucaucuccaccuuccaccugagcauccccaacuucaaccaguacgaggccauguccugcgacuucaacgggggcaagaucagcgugcaguacaaccucucccacagcuacgccguggacgcggccaaccacugcgggaccaucgccaacggcguccugcagacguucaugcggauggccuggggcggguccuacaucgcgcuggacagcggcaaggggaacugggacugcaucaugaccuccuaccaguaccucaucauccagaacaccaccugggaggaccacugccaguucagccgccccucccccaucggcuaccuggggcugcucagccagcggacgcgcgacaucuacaucagccggcgccugcugggcaccuucaccuggacccucuccgacagcgagggcaacgagacgcccgggggcuacugccugacccgguggaugcugaucgaggccgagcucaagugcuucgggaacaccgccguggccaagugcaacgagaagcacgacgaggaguucugcgacaugcugcgccuguucgacuucaacaagcaggccauccggcgccucaagaccgaggcgcaggccaacauccagcugaucaacaaggccgugaacgcccugaucaacgaccagcucaucaugaagaaccaccuccgggacaucaugggcauccccuacugcaacuacuccaaguacugguaccugaaccacacggucaccgggaagaccagccugccccgcugcuggcugguguccaacggcagcuaccugaacgagacccacuucuccgacgacaucgagcagcaggccgacaacaugaucacggagcuccugcagaaggaguacauggaccggcagggcaagaccccgcuggggcucguggaccuguucgucuucagcaccuccuucuaccugaucagcaucuuccugcaccucgugaagaucccgacccaccgccacgugaucggcaagcccugccccaagccccaccggcugaaccacauggggaucugcuccugcggccuguacaagcacccggggguccccgugaaguggaagcgcuga

SEQ ID NO: 647 - RNA, 1473 nt, Artificial Sequence
  derived and/or modified protein sequence (opt1) from LASV(LASV256-NIG-2010;Clade II)__AIT17678__GPC
augggccagaucaucaccuucuuccaggaggugccccacgucaucgaggaggugaugaacaucgugcugaucacccucagccugcuggccauccucaaggggaucuacaacaucgccacgugcggccuguucgggcuggucuccuuccuccugcugugcggccgcagcugcuccaccaccuacaaggggguguacgagcuccagacccuggagcuggacaugacgagccucaacaugaccaugccgcuguccugcaccaagaacaacagccaccacuacaucauggugggcaacgagaccggccuggagcucacgcugaccaacaccuccaucaucaaccacaaguucugcaaccugagcgacgcgcacaagaagaaccucuacgaccacgcccugauguccaucaucagcaccuuccaccuguccauccccaacuucaaccaguacgaggccaugagcugcgacuucaacgggggcaagaucuccguccaguacaaccucagccacacguacgccguggacgccgcgaaccacugcgggaccaucgccaacggcgugcugcagaccuucaugcggauggccuggggcggguccuacaucgcccuggacagcggcaagggguccugggacugcaucaugaccagcuaccaguaccucaucauccagaacacgaccugggaggaccacugccaguucucccgccccagccccaucggcuaccuggggcugcucagccagcggacccgcgacaucuacaucucccggcgccugcugggcaccuucacguggacccucagcgacuccgagggcaacgagacccccgggggcuacugccugacccgguggaugcugaucgaggcggagcucaagugcuucgggaacacggccgucgccaagugcaacgagaagcacgacgaggaguucugcgacaugcugcgccuguucgacuucaacaagcaggccauccggcgccucaagaccgaggcccagaugagcauccagcugaucaacaaggcggugaacgcccugaucaacgaccagcucaucaugaagaaccaccuccgggacaucaugggcauccccuacugcaacuacuccaaguacugguaccugaaccacaccgugaccgggaagacgagccugccccgcugcuggcuggucuccaacggcagcuaccugaacgagacccacuucuccgacgacaucgagcagcaggccgacaacaugaucaccgagcuccugcagaaggaguacaucgaccggcagggcaagaccccgcuggggcucguggaccuguucguguucagcacguccuucuaccugaucagcaucuuccugcaccucgucaagaucccgacccaccgccacaucaucggcaagcccugccccaagccccaccggcugaaccacauggggaucugcuccugcggccuguacaagcacccggggauccccgugaaguggaagcgcuga

SEQ ID NO: 648 - RNA, 1473 nt, Artificial Sequence
  derived and/or modified protein sequence (opt1) from LASV(LASV267-NIG-2010;Clade II)__AIT17686__GPC
augggccagaucaucaccuucuuccaggaggugccccacgucaucgaggaggugaugaacaucgugcugaucgcccucagccugcuggccauccucaaggggaucuacaacgucgcgaccugcggccuguucgggcugguguccuuccuccugcugugcggccgcagcugcuccaccaccuacaaggggguguacgagcuccagacccuggagcuggacauggccagccucaacaugaccaugccgcuguccugcacgaagaacaacagccaccacuacaucauggucggcaacgagaccggccuggagcucacccugaccaacacguccaucaucaaccacaaguucugcaaccugagcgacgcccacaagaagaaccucuacgaccacgcccugauguccaucaucagcaccuuccaccuguccauccccaacuucaaccaguacgaggccaugagcugcgacuucaacgggggcaagaucuccgugcaguacaaccucagccacaccuacgcgguggacgccgccaaccacugcgggaccaucgccaacggcguccugcagacguucaugcggauggcguggggcggguccuacaucgcccuggacagccgcaagggcuccugggacugcaucaugaccagcuaccaguaccucaucauccagaacaccaccugggaggaccacugccaguucucccggcccagccccaucggguaccugggccugcucagccagcgcacgcgggacaucuacaucucccgccggcugcuggggaccuucaccuggacccucagcgacuccgagggcaacgagacgccgggcggguacugccugacccgcuggaugcugaucgaggccgagcucaagugcuucggcaacaccgccguggccaagugcaacgagaagcacgacgaggaguucugcgacaugcugcggcuguucgacuucaacaagcaggcgauccgccggcucaagaccgaggcccagaugagcauccagcugaucaacaaggccgugaacgcccugaucaacgaccagcucaucaugaagaaccaccuccgcgacaucauggggauccccuacugcaacuacuccaaguacugguaccugaaccacacggucaccggcaagaccagccugccccggugcuggcugguguccaacgggagcuaccugaacgagacccacuucuccgacgacaucgagcagcaggccgacaacaugaucacggagcuccugcagaaggaguacauggaccgccagggcaagacgccccugggccucguggaccuguucgucuucagcaccuccuucuaccugaucagcaucuuccugcaccucaucaagaucccgacccaccggcacgugaucgggaagcccugccccaagccccaccgccugaaccacaugggcaucugcuccugcgggcuguacaagcacccgggcgugcccgucaaguggaagcgguga

SEQ ID NO: 649 - RNA, 1473 nt, Artificial Sequence
  derived and/or modified protein sequence (opt1) from LASV(LASV271-NIG-2010;Clade II)__AIT17690__GPC
augggccagaucaucaccuucuuccaggaggugccccacgucaucgaggaggugaugaacaucgugcugaucgcccucagccugcuggccauccucaaggggaucuacaacgucgcgaccugcggccuguucgggcugguguccuuccuccugcugugcggccgcagcugcuccacgaccuacaaggggguguacgagcuccagacccuggagcuggacauggccagccucaacaugaccaugccgcuguccugcacgaagaacaacagccaccacuacaucauggucggcaacgagaccggccuggagcucacccugaccaacacguccaucaucaaccacaaguucugcaaccugagcgacgcccacaagaagaaccucuacgaccacgcccugauguccaucaucagcaccuuccaccuguccauccccaacuucaaccaguacgaggccaugagcugcgacuucaacgggggcaagaucuccgugcaguacaaccucagccacgcguacgccguggacgccgccucccacugcgggaccgucgcgaacggcgugcugcagaccuucaugcggauggccuggggcgggagcuacaucgcccuggacuccggcaaggggagcugggacugcaucaugacguccuaccaguaccucaucauccagaacaccaccugggaggaccacugccaguucagccgccccagccccaucggcuaccuggggcugcucucccagcggacccgcgacaucuacaucagccggcgccugcugggcacguucaccuggacccucuccgacagcgagggcaacgagacccccgggggcuacugccugacgcgguggaugcugaucgaggccgagcucaagugcuucgggaacaccgccguggcgaagugcaacgagaagcacgacgaggaguucugcgacaugcugcgccuguucgacuucaacaagcaggccauccggcgccucaagaccgaggcccagauguccauccagcugaucaacaaggccgucaacgcccugaucaacgaccagcucaucaugaagaaccaccuccgggacaucaugggcaucccguacugcaacuacagcaaguacugguaccugaaccacaccgugacggggcgcaccucccugccccggugcuggcuggugagcaacggcuccuaccugaacgagacccacuucagcgacgacaucgagcagcaggcggacaacaugaucaccgagcuccugcagaaggaguacauggaccgccagggcaagacgccccuggggcucgucgaccuguucguguucuccaccagcuucuaccugaucuccaucuuccugcaccucgugaagaucccgacccaccggcacgucaucggcaagcccugccccaagccccaccgccugaaccacauggggaucugcagcugcggccuguacaagcacccgggggugcccgugaaguggaagcgguga

SEQ ID NO: 650 - RNA, 1473 nt, Artificial Sequence
  derived and/or modified protein sequence (opt1) from LASV(LASV274-NIG-2010;Clade II)__AIT17694__GPC
augggccagaucaucaccuucuuccaggaggugccccacgucaucgaggaggugaugaacaucgugcugaucgcccucagccugcuggccauccucaaggggaucuacaacgucgcgaccugcggccuguucgggcugguguccuuccuccugcugugcggccgcagcugcuccacgaucuacaaggggguguacgagcuccagacccuggagcuggacauggccagccucaacaugaccaugccgcuguccugcaccaagaacaacagccaccacuacaucauggucggcaacgagacgggccuggagcucacccugaccaacaccuccaucaucaaccacaaguucugcaaccugagcgacgcccacaagaagaaccucuacgaccacgcccugauguccaucaucagcacguuccaccuguccauccccaacuucaaccaguacgaggccaugagcugcgacuucaacgggggcaagaucuccgugcaguacaaccucagccacaccuacgcgguggacgccgccaaccacugcgggaccaucgccaacggcguccugcagaccuucaugcggauggcguggggcggguccuacaucgcccuggacagcggcaagggguccugggacugcaucaugacgagcuaccaguaccucaucauccagaacaccaccugggaggaccacugccaguucucccgccccagccccaucggcuaccuggggcugcucagccagcggacccgcgacaucuacaucucccggcgccugcugggcacguucaccuggacccucagcgacuccgagggcaacgagacccccgggggcuacugccugacgcgguggaugcugaucgaggccgagcucaagugcuucgggaacaccgccguggccaagugcaacgagaagcacgacgaggaguucugcgacaugcugcgccuguucgacuucaacaagcaggcgauccggcgccucaagaccgaggcccagaugagcauccagcugaucaacaaggccgugaacgcccugaucaacgaccagcucaucaugaagaaccaccuccgggacaucaugggcaucccguacugcaacuacuccaaguacugguaccugaaccacaccgucacggggaagaccagccugccccgcugcuggcugguguccaacggcagcuaccugaacgagacccacuucuccgacgacaucgagcagcaggccgacaacaugaucaccgagcuccugcagaaggaguacaucgaccggcagggcaagacgccccuggggcucguggaccuguucgucuucagcaccuccuucuaccugaucagcaucuuccugcaccucgugaagaucccgacccaccgccacguggucggcaagcccugccccaagccccaccggcugaaccacauggggaucugcuccugcggccuguacaagcacccgggggugcccgugaaguggaagcgcuga

SEQ ID NO: 651 - RNA, 1473 nt, Artificial Sequence
  derived and/or modified protein sequence (opt1) from LASV(LASV719-NIG-2009;Clade II)__AIT17704__GPC
augggccagaucaucaccuucuuccaggaggugccccacgucaucgaggaggugaugaacaucgugcugaucgcccucagccugcuggccauccucaaggggaucuacaacgucgcgaccugcggccuguucgggcugguguccuuccuccugcugugcggccgcagcugcuccacgaccuacaaggggguguacgagcuccagacccuggagcuggacauggccagccucaacaugaccaugccgcuguccugcacgaagaacaacagccaccacuacaucauggucggcaacgagaccggccuggagcucacccugaccaacacguccaucaucaaccacaaguucugcaaccugagcgacgcccacaagaagaaccucuacgaccacgcccugauguccaucaucagcaccuuccaccuguccauccccaacuucaaccaguacgaggccaugagcugcgacuucaacgggggcaagaucuccgugcaguacaaccucagccacaccuacgcgguggacgccgccaaccacugcgggaccaucgccaacggcguccugcagacguucaugcggauggcguggggcggguccuacaucgcccuggacagcggcaagggguccugggacugcaucaugaccagcuaccaguaccucaucauccagaacaccaccugggaggaccacugccaguucucccgccccagccccaucggcuaccuggggcugcucagccagcggacgcgcgacaucuacaucucccggcgccugcugggcaccuucaccuggacccucagcgacuccgagggcaacgagacgcccgggggcuacugccugacccgguggaugcugaucgaggccgagcucaagugcuucgggaacaccgccguggccaagugcaacgagaagcacgacgaggaguucugcgacaugcugcgccuguucgacuucaacaagcaggcgauccggcgccucaagaccgaggcccagaugagcauccagcugaucaacaaggccgugaacgcccugaucaacgaccagcucaucaugaagaaccaccuccgggacaucaugggcauccccuacugcaacuacuccaaguacugguaccugaaccacacggucaccgggaagaccagccugccccgcugcuggcugguguccaacggcagcuaccugaacgagacccacuucuccgacgacaucgagcagcaggccgacaacaugaucacggagcuccugcagaaggaguacaucgaccggcagggcaagaccccgcuggggcucguggaccuguucgucuucagcaccuccuucuaccugaucagcaucuuccugcaccucgugaagaucccgacccaccgccacgugaucggcaagcccugccccaagccccaccggcugaaccacauggggaucugcuccugcggccuguacaagcacccggggguccccgugaaguggaagcgcuga

SEQ ID NO: 652 - RNA, 1473 nt, Artificial Sequence
  derived and/or modified protein sequence (opt1) from LASV(LASV738-NIG-2009;Clade II)__AIT17712__GPC
augggccagaucaucaccuucuuccaggaggugccccacgucaucgaggaggugaugaacaucgugcugaucgcccucagccugcuggccauccucaaggggaucuacaacgucgcgaccugcggccuguucgggcugguguccuuccuccugcugugcggccgcagcugcuccacgaccuacaaggggguguacgagcuccagacccuggagcuggacauggccagccucaacaugaccaugccgcuguccugcacgaagaacaacagccaccacuacaucauggucggcaacgagaccggccuggagcucacccugaccaacacguccaucaucaaccacaaguucugcaaccugagcgacgcccacaagaagaaccucuacgaccacgcccugauguccaucaucagcaccuuccaccuguccauccccaacuucaaccaguacgaggccaugagcugcgacuucaacgggggcaagaucuccgugcaguacaaccucagccacaccuacgcgguggacgccgccaaccacugcgggaccaucgccaacggcguccugcagacguucaugcggauggcguggggcggguccuacaucgcccuggacagcggcaagggggccugggacugcaucaugaccuccuaccaguaccucaucauccagaacaccaccugggaggaccacugccaguucagccgccccucccccaucggcuaccuggggcugcucagccagcggacgcgcgacaucuacaucagccggcgccugcugggcaccuucaccuggacccucuccgacagcgagggcaacgagacgcccgggggcuacugccugacccgguggaugcugaucgaggccgagcucaagugcuucgggaacaccgccguggcgaagugcaacgagaagcacgacgaggaguucugcgacaugcugcgccuguucgacuucaacaagcaggccaucaugcggcucaagaccgaggcccagauguccauccagcugaucaacaaggccgugaacgcccugaucaacgaccagcucaucaugaagaaccaccuccgcgacaucaugggcauccccuacugcaacuacagcaaguacugguaccugaaccacacggucaccgggaagaccucccugccccggugcuggcuggugagcaacggcuccuaccugaacgagacccacuucagcgacgacaucgagcagcaggcggacaacaugaucacggagaugcuccagaaggaguacaucgaccgccagggcaagaccccgcuggggcugguggaccucuucgucuucuccaccagcuucuaccugaucuccaucuuccugcaccuggugaagaucccgacccaccggcacgugaucggcaagcccugccccaagccccaccgccucaaccacauggggaucugcagcugcggccuguacaagcacccggggguccccgugcgguggaagcgcuga

SEQ ID NO: 653 - RNA, 1473 nt, Artificial Sequence
  derived and/or modified protein sequence (opt1) from LASV(LASV966-NIG-2009;Clade II)__AIT17718__GPC
augggccagaucaucaccuucuuccaggaggugccccacgucaucgaggaggugaugaacaucgugcugaucgcccucagccugcuggccauccucaaggggaucuacaacgucgcgaccugcggccuguucgggcugguguccuuccuccugcugugcggccgcagcugcuccacgaccuacaaggggguguacgagcuccagacccuggagcuggacauggccagccucaacaugaccaugccgcuguccugcacgaagaacaacagccaccacuacauccgggucggcaacgagaccggccuggagcucacccugaccaacgccuccaucaucaaccacaaguucugcaaccugagcgacgcccacaagaagaaccucuacgaccacgcccugauguccaucaucagcacguuccaccuguccauccccaacuucaaccaguacgaggcgaugagcugcgacuucaacgggggcaagaucuccgugcaguacaaccucagccacgccuacgccaucgacgccgcgaaccacugcgggaccguggccaacggcguccugcagaccuucaugcgcauggccuggggcggguccuacaucgcccuggacagcggccgggggaacugggacugcaucaugaccuccuaccaguaccucaucauccagaacacgaccugggaggaccacugccaguucagccgccccucccccaucggcuaccuggggcugcucagccagcggacccgcgacaucuacaucagccggcgccugcugggcaccuucacguggacccucuccgacagcgagggcaacgagacccccgggggcuacugccugacccgguggaugcugaucgaggccgagcucaagugcuucgggaacacggcgguggccaagugcaacgagaagcacgacgaggaguucugcgacaugcugcgccuguucgacuucaacaagcaggccauccggcgccucaagaccgaggcccagauguccauccagcugaucaacaaggccgugaacgcgcugaucaacgaccagcucaucaugaagaaccaccuccgggacaucaugggcauccccuacugcaacuacagcaaguacugguaccugaaccacaccgucaccgggaagacgucccugccccgcugcuggcuggugagcaacggcuccuaccugaacgagacccacuucagcgacgacaucgagcagcaggccgacaacaugaucaccgagcuccugcagaaggaguacauggaccggcagggcaagaccccgcuggggcucguggaccuguucgucuucuccacgagcuucuaccugaucuccaucuuccugcaccucgugaagaucccgacccaccgccacgugaucggcaagcccugccccaagccccaccggcugaaccacauggggaucugcagcugcggcuucuacaagcacccggggguccccgugaaguggaagcgcuga

SEQ ID NO: 654 - RNA, 1473 nt, Artificial Sequence
  derived and/or modified protein sequence (opt1) from LASV(LASV969-NIG-2009;Clade II)__AIT17724__GPC
augggccagaucaucaccuucuuccaggaggugccccacgucaucgaggaggugaugaacaucgugcugaucgcccucagccugcuggccauccucaaggggaucuacaacgucgcgaccugcggccuguucgggcugguguccuuccuccugcugugcggccgcagcugcuccacgaccuacaaggggguguacgagcuccagacccuggagcuggacauggccaaccucaacaugaccaugccgcugagcugcacgaagaacaacucccaccacuacaucauggucggcaacgagaccggccuggagcucacccugaccaacacgagcaucaucaaccacaaguucugcaaccuguccgacgcccacaagaagaaccucuacgaccacgcccugaugagcaucaucuccaccuuccaccugagcauccccaacuucaaccaguacgaggccauguccugcgacuucaacgggggcaagaucagcgugcaguacaaccucucccacaccuacgcgguggacgccgccaaccacugcgggaccgucgccaacggcgugcugcagacguucaugcggauggcguggggcgggagcuacaucgcccuggacuccggcaaggggagcugggacugcaucaugaccuccuaccaguaccucaucauccagaacaccaccugggaggaccacugccaguucagccgccccucccccaucggcuaccuggggcugcucagccagcggacgcgcgacaucuacaucagccggcgccugcugggcaccuucaccuggacccucuccgacagcgagggcaacgagacgcccgggggcuacugccugacccgguggaugcugaucgaggccgagcucaagugcuucgggaacaccgccguggccaagugcaacgagaagcacgacgaggaguucugcgacaugcugcgccuguucgacuucaacaagcaggcgauccggcgccucaagaccgaggcccagauguccauccagcugaucaacaaggccgucaacgcccugaucaacgaccagcucaucaugaagaaccaccuccgggacaucaugggcauccccuacugcaacuacagcaaguacugguaccugaaccacacggugaccgggaagaccucccugccccgcugcuggcuggugagcaacggcuccuaccugaacgagacccacuucagcgacgacaucgagcagcaggccgacaacaugaucacggagcuccugcagaaggaguacauggaccggcagggcaagaccccgcuggggcucgucgaccuguucguguucuccaccagcuucuaccugaucuccaucuuccugcaccucgugaagaucccgacccaccgccacaucaugggcaagcccugccccaagccccaccggcugaaccacauggggaucugcagcugcggccuguacaagcacccggggguccccgugaaguggaagcgcuga

SEQ ID NO: 655 - RNA, 1473 nt, Artificial Sequence
  derived and/or modified protein sequence (opt1) from LASV(LASV971-NIG-2009;Clade II)__AIT17728__GPC
augggccagaucaucaccuucuuccaggaggugccccacgucaucgaggaggugaugaacaucgugcugaucgcccucagccugcuggccauccucaaggggaucuacaacgucgcgaccugcggccuguucgggcugguguccuuccuccugcugugcggccgcagcugcuccaccaccuacaaggggguguacgagcuccagacccuggagcuggacaugggcagccucaacaugaccaugccgcuguccugcacgaagaacaacagccaccacuacaucauggucggcaacgagaccgggcuggagcucacccugaccaacacguccaucaucaaccacaaguucugcaaccugagcgacgcccacaagaagaaccucuacgaccacgcccugauguccaucaucagcaccuuccaccuguccauccccaacuucaaccaguacgaggccaugagcugcgacuucaacggcgggaagaucuccgugcaguacaaccucagccacaccuacgccguggacgcggccaaccacugcggcaccaucgccaacgggguccugcagacguucaugcggauggccuggggcggcuccuacaucgcgcuggacagcgggaagggcuccugggacugcaucaugaccagcuaccaguaccucaucauccagaacaccaccugggaggaccacugccaguucucccgccccagccccaucggguaccugggccugcucagccagcggacgcgcgacaucuacaucucccggcgccugcugggcaccuucaccuggacccucagcgacuccgaggggaacgagacgccgggcggguacugccugacccgguggaugcugaucgaggccgagcucaagugcuucggcaacaccgccguggccaagugcaacgagaagcacgacgaggaguucugcgacaugcugcgccuguucgacuucaacaagcaggccauccggcgccucaagaccgaggcgcagaugagcauccagcugaucaacaaggccgugaacgcccugaucaacgaccagcucaucaugaagaaccaccuccgggacaucauggggauccccuacugcaacuacuccaaguacugguaccugaaccacacggucaccggcaagaccagccugccccgcugcuggcugguguccaacggcagcuaccugaacgagacccacuucuccgacgacaucgagcagcaggccgacaacaugaucacggagcuccugcagaaggaguacauggaccggcaggggaagacgccccugggccucguggaccuguucgucuucagcaccuccuucuaccugaucagcaucuuccugcaccucgugaagaucccgacccaccgccacgugaucgggaagcccugccccaagccccaccggcugaaccacaugggcaucugcuccugcgggcuguacaagcacccgggcguccccgugaaguggaagcgcuga

SEQ ID NO: 656 - RNA, 1473 nt, Artificial Sequence
  derived and/or modified protein sequence (opt1) from LASV(LASV975-NIG-2009;Clade II)__AIT17732__GPC
augggccagaucaucaccuucuuccaggaggugccccacgucaucgaggaggugaugaacaucgugcugaucgcccucagccugcuggccauccucaaggggaucuacaacgucgcgaccugcggccuguucgggcugguguccuuccuccugcugugcggccgcagcugcuccacgaccuacaaggggguguacgagcuccagacccuggagcuggacauggccagccucaacaugaccaugccgcuguccugcacgaagaacaacagccaccacuacaucauggucggcaacgagaccggccuggagcucacccugaccaacacguccaucaucaaccacaaguucugcaaccugagcgacgcccacaagaagaaccucuacgaccacgcccugauguccaucaucagcaccuuccaccuguccauccccaacuucaaccaguacgaggccaugagcugcgacuucaacgggggcaagaucuccgugcaguacaaccucagccacaccuacgcgguggacgccgccaaccacugcgggaccaucgccaacggcguccugcagacguucaugcggauggcguggggcggguccuacaucgcccuggacagcggcaagggguccugggacugcaucaugaccagcuaccaguaccucaucauccagaacaccaccugggaggaccacugccaguucucccgccccagccccaucggcuaccuggggcugcucagccagcggacgcgcgacaucuacaucucccggcgccugcugggcaccuucaccuggacccucagcgacuccgagggcaacgagacgcccgggggcuacugccugacccgguggaugcugaucgaggccgagcucaagugcuucgggaacaccgccguggccaagugcaacgagaagcacgacgaggaguucugcgacaugcugcgccuguucgacuucaacaagcaggcgauccggcgccucaagaccgaggcccagaugagcauccagcugaucaacaaggccgugaacgcccugaucaacgaccagcucaucaugaagaaccaccuccgggacaucaugggcauccccuacugcaacuacuccaaguacugguaccugaaccacacggucaccgggaagaccagccugccccgcugcuggcugguguccaacggcagcuaccugaacgagacccacuucuccgacgacaucgagcagcaggccgacaacaugaucacggagcuccugcagaaggaguacaucgaccggcagggcaagaccccgcuggggcucguggaccuguucgucuucagcaccuccuucuaccugaucagcaucuuccugcaccucgugaagaucccgacccaccgccacaucgugggcaagcccugccccaagccccaccggcugaaccacauggggaucugcuccugcggccuguacaagcacccggggguccccgugaaguggaagcgcuga

SEQ ID NO: 657 - RNA, 1473 nt, Artificial Sequence
  derived and/or modified protein sequence (opt1) from LASV(LASV976-NIG-2009;Clade II)__AIT17736__GPC
augggccagaucgugaccuucuuccaggaggucccccacgugaucgaggaggugaugaacaucguccugaucgcccucagccugcuggccauccucaaggggaucuacaacguggcgaccugcggccuguucgggcugguguccuuccuccugcugugcggccgcagcugcuccacgaccuacaagggggucuacgagcuccagacccuggagcuggacauggccagccucaacaugaccaugccgcuguccugcacgaagaacaacagccaccacuacaucauggugggcaacgagaccggccuggagcucacccugaccaacacguccaucaucaaccacaaguucugcaaccugagcgacgcccacaagaaggaccucuacgaccacgcccugauguccaucaucagcaccuuccaccuguccauccccaacuucaaccaguacgaggccaugagcugcgacuucaacgggggcaagaucuccgugcaguacaaccucagccacaccuacgcggucgacgccgccaaccacugcgggaccaucgccaacggcgugcugcagacguucaugcggauggcguggggcggguccuacaucgcccuggacagcggcaagggguccugggacugcaucaugaccagcuaccaguaccucaucauccagaacaccaccugggaggaccacugccaguucucccgccccagccccaucggcuaccuggggcugcucagccagcggacgcgcgacaucuacaucucccggcgccugcugggcaccuucaccuggacccucagcgacuccgagggcaacgagacgcccgggggcuacugccugacccgguggaugcugaucgaggccgagcucaagugcuucgggaacaccgccguggccaagugcaacgagaagcacgacgaggaguucugcgacaugcugcgccuguucgacuucaacaagcaggcgaucaugcggcucaagaccgaggcccagaugagcauccagcugaucaacaaggccgucaacgcccugaucaacgaccagcucaucaugaagaaccaccuccgcgacaucaugggcauccccuacugcaacuacuccaaguacugguaccugaaccacacggugaccgggaagaccagccugccccggugcuggcugguguccaacggcagcuaccugaacgagacccgcuucuccgacgacaucgagcagcaggccgacaacaugaucacggagaugcuccagaaggaguaccuggaccggcagggcaagaccccgcuggggcucgucgaccuguucguguucagcaccuccuucuaccugaucagcaucuuccugcaccucgugaagaucccgacccaccgccacaucaucggcaagcccugccccaagccccaccggcugaaccacauggggaucugcuccugcggccuguacaagcacccggggguccccgugaaguggaagcgcuga

SEQ ID NO: 658 - RNA, 1473 nt, Artificial Sequence
  derived and/or modified protein sequence (opt1) from LASV(LASV978-NIG-2009;Clade II)__AIT17744__GPC
augggccagaucaucaccuucuuccaggaggugccccacgucaucgaggaggugaugaacaucgugcugaucgcccucagccugcuggccauccucaaggggaucuacaacgucgcgaccugcggccuguucgggcugauguccuuccuccugcugugcggccgcagcugcuccacgaccuacaaggggguguacgagcuccagacccuggagcuggacauggccaaccucaacaugaccaugccgcugagcugcacgaagaacaacucccaccacuacaucauggugggcaacgagaccggccuggagcucacccugaccaacacgagcaucaucaaccacaaguucugcaaccuguccgacgcccacaagaagaaccucuacgaccacgcccugaugagcaucaucuccaccuuccaccugagcauccccaacuucaaccaguacgaggccauguccugcgacuucaacgggggcaagaucagcguccaguacaaccucucccacgcguacgccguggacgccgccaaccacugcgggaccaucgcgaacggcgugcugcagaccuucaugcggauggccuggggcgggagcuacaucgcccuggacuccggcaaggggagcugggacugcaucaugacguccuaccaguaccucaucauccagaacaccagcugggaggaccacugccaguucucccgccccagccccaucggcuaccuggggcugcucagccagcggacccgcgacaucuacaucucccggcgccugcugggcaccuucacguggacccucagcgacuccgagggcaacgagacccccgggggcuacugccugacccgguggaugcugaucgaggccgagcucaagugcuucgggaacacggccgucgcgaagugcaacgagaagcacgacgaggaguucugcgacaugcugcgccuguucgacuucaacaagcaggccauccggcgccucaagaccgaggcccagaugagcauccagcugaucaacaaggccgugaacgcccugaucaacgaccagcucaucaugaagaaccaccuccgggacaucaugggcauccccuacugcaacuacuccaaguacugguaccugaaccacaccgugaccgggaagacgagccugccccgcugcuggcuggucuccaacggcagcuaccugaacgagacccacuucuccgacgacaucgagcagcaggcggacaacaugaucaccgagcuccugcagaaggaguacaucgaccggcagggcaagaccccgcuggggcucguggaccuguucguguucagcacguccuucuaccugaucagcaucuuccugcaccucgucaagaucccgacccaccgccacgugaucggcaagcccugccccaagccccaccggcugaaccacauggggaucugcuccugcggccuguacaagcacccgggggugcccgucaaguggaagcgcuga

SEQ ID NO: 659 - RNA, 1473 nt, Artificial Sequence
  derived and/or modified protein sequence (opt1) from LASV(LASV981-NIG-2009;Clade II)__AIT17752__GPC
augggccagaucaucaccuucuuccacgaggugccccacgucaucgaggaggugaugaacaucgugcugaucgcccucagccugcuggccauccucaaggggaucuacaacgucgcgaccugcggccuguucgggcugguguccuuccuccugcugugcggccgcagcugcuccacgaccuacaaggggguguacgagcuccagacccuggagcuggacauggccagccucaacaugaccaugccgcuguccugcacgaagaacaacagccaccacuacaucauggucggcaacgagaccggccuggagcucacccugaccaacacguccaucaucaaccacaaguucugcaaccugagcgacgcccacaagaagaaccucuacgaccacgcccugauguccaucaucagcaccuuccaccuguccauccccaacuucaaccaguacgaggccaugagcugcgacuucaacgggggcaagaucuccgugcaguacaaccucagccacaccuacgcgaucgacgccgccaaccacugcgggaccaucgccaacggcgugcugcagacguucaugcggauggcguggggcggguccuacaucgcccuggacagcggccgcggguccugggacugcaucaugaccagcuaccaguaccucaucauccagaacaccaccugggaggaccacugccaguucucccggcccagccccaucggcuaccuggggcugcucagccagcgcacgcgggacaucuacaucucccgccggcugcugggcaccuucaccuggacccucagcgacuccgagggcaacgagacgcccgggggcuacugccugacccgcuggaugcugaucgaggccgagcucaagugcuucgggaacaccgccgucgccaagugcaacgagaagcacgacgaggaguucugcgacaugcugcggcuguucgacuucaacaagcaggcgauccgccggcucaagaccgaggcccagaugagcauccagcugaucaacaaggccgugaacgcccugaucaacgaccagcucaucaugaagaaccaccuccgcgacaucaugggcauccccuacugcaacuacuccaaguacugguaccugaaccacacggugaccgggaagaccagccugccccggugcuggcuggucuccaacggcagcuaccugaacgagacccacuucuccgacgacaucgagcagcaggccgacaacaugaucacggagcuccugcagaaggaguacaucgaccgccagggcaagaccccgcuggggcucguggaccuguucguguucagcaccuccuucuaccugaucagcaucuuccugcaccucgucaagaucccgacccaccggcacgugaucggcaagcccugccccaagccccaccgccugaaccacauggggaucugcuccugcggccuguacaagcacccgggggugcccgucaaguggaagcgguga

SEQ ID NO: 660 - RNA, 1473 nt, Artificial Sequence
  derived and/or modified protein sequence (opt1) from LASV(LASV982-NIG-2009;Clade II)__AIT17756__GPC
augggccagaucaucaccuucuuccaggaggugccccacgucaucgaggaggugaugaacaucgugcugaucgcccucagccugcuggccauccucaaggggaucuacaacgucgcgaccugcggccuguucgggcugguguccuuccuccugcugugcggccgcagcugcuccaucacguacaaggggguguacgagcuccagacccuggagcuggacauggccagccucaacaugaccaugccgcuguccugcaccaagaacaacagccaccacuacaucauggucggcaacgagacgggccuggagcucacccugaccaacaccuccaucaucaaccacaaguucugcaaccugagcgacgcccacaagaagaaccucuacgaccacgcccugauguccaucaucagcacguuccaccuguccauccccaacuucaaccaguacgaggccaugagcugcgacuucaacgggggcaagaucuccgugcaguacaaccucagccacaccuacgcgguggacgccgccaaccacugcgggaccaucgccaacggcguccugcagaccuucaugcggauggcguggggcggguccuacaucgcccuggacagcggccgcggguccugggacugcaucaugacgagcuaccaguaccucaucauccagaacaccaccugggaggaccacugccaguucucccggcccagccccaucggcuaccuggggcugcucagccagcgcacccgggacaucuacaucucccgccggcugcugggcacguucaccuggacccucagcgacuccgagggcaacgagacccccgggggcuacugccugacgcgcuggaugcugaucgaggccgagcucaagugcuucgggaacaccgccguggccaagugcaacgagaagcacgacgaggaguucugcgacaugcugcggcuguucgacuucaacaagcaggcgauccgccggcucaaggccgaggcccagaugagcauccagcugaucaacaaggccgugaacgcccugaucaacgaccagcucaucaugaagaaccaccuccgcgacaucaugggcauccccuacugcaacuacuccaaguacugguaccugaaccacaccgucaccgggcggacgagccugccccgcugcuggcugguguccaacggcagcuaccugaacgagacccacuucuccgacgacaucgagcagcaggcggacaacaugaucaccgagcuccugcagaaggaguacaucgaccggcagggcaagaccccgcuggggcucguggaccuguucgucuucagcacguccuucuaccugaucagcaucuuccugcaccucgugaagaucccgacccaccgccacaucaucggcaagcccugccccaagccccaccggcugaaccacauggggaucugcuccugcggccuguacaagcacccgggggugcccgucaaguggaagcgcuga

SEQ ID NO: 661 - RNA, 1473 nt, Artificial Sequence
  derived and/or modified protein sequence (opt1) from LASV(LASV988-NIG-2009;Clade II)__AIT17758__GPC
augggccagaucaucaccuucuuccaggaggugccccacgucaucgaggaggugaugaacaucgugcugaucgcccucagccugcuggccauccucaaggggaucuacaacgucgcgaccugcggccuguucgggcugguguccuuccuccugcugugcggccgcagcugcuccacgaccuacaaggggguguacgagcuccagacccuggagcugaacauggccagccucaacaugaccaugccgcuguccugcacgaagaacaacagccaccacuacaucauggucggcaacgagaccggccuggagcucacccugaccaacacguccaucaucaaccacaaguucugcaaccugagcgacgcccacaagcggaaccucuacgaccacgcccugauguccaucaucagcaccuuccaccuguccauccccaacuucaaccaguacgaggccaugagcugcgacuucaacgggggcaagaucuccgugcaguacaaccucagccacaccuacgcgguggacgccgccaagcacugcgggaccaucgccaacggcguccugcagacguucaugcgcauggcguggggcggguccuacaucgcccuggacagcggcaagggguccugggacugcaucaugaccagcuaccaguaccucaucauccagaacaccaccugggaggaccacugcgaguucucccggcccagccccaucggcuaccuggggcugcucagccagcgcacgcgggacaucuacaucucccgccggcugcugggcaccuucaccuggacccucagcgacuccgagggcaacgagacgcccgggggcuacugccugacccgcuggaugcugaucgaggccgagcucaagugcuucgggaacaccgccguggccaagugcaacgagaagcacgacgaggaguucugcgacaugcugcggcuguucgacuucaacaagcaggcgauccgccggcucaaggccgaggcccagaugagcauccagcugaucaacaaggccgugaacgcccugaucaacgaccagcucaucaugaagaaccaccuccgcgacaucaugggcaucccguacugcaacuacuccaaguacugguaccugaaccacaccgucacggggaagaccagccugccccggugcuggcugguguccaacggcagcuaccugaacgagacccacuucuccgacgacaucgagcagcaggcggacaacaugaucaccgagcuccugcagaaggaguacaucgaccgccagggcaagacgccccuggggcucguggaccuguucgucuucagcaccuccuucuaccugaucagcaucuuccugcaccucgugaagaucccgacccaccggcacgugaucggcaagcccugccccaagccccaccgccugaaccacauggggaucugcuccugcggccuguacaagcacccggggguccccgugaaguggaagcgguga

SEQ ID NO: 662 - RNA, 1473 nt, Artificial Sequence
  derived and/or modified protein sequence (opt1) from LASV(LASV989-NIG-2009;Clade II)__AIT17762__GPC
augggccagaucaucaccuucuuccaggaggugccccacgucaucgaggaggugaugaacaucgugcugaucgcccucagccugcuggccauccucaaggggaucuacaacgucgcgaccugcggccuguucgggcugguguccuuccuccugcugugcggccgcagcugcuccacgaccuacaaggggguguacgagcuccagacccuggagcuggacauggccagccucaacaugaccaugccgcuguccugcacgaagaacaacagccaccacuacaucauggucggcaacgagaccggccuggagcucacccugaccaacacguccaucaucagccacaaguucugcaaccuguccgacgcccacaagaagaaccucuacgaccacgcccugaugagcaucaucuccaccuuccaccugagcauccccaacuucaaccaguacgaggccauguccugcgacuucaacgggggcaagaucagcgugcaguacaaccucucccacaccuacgcgguggacgccgccaaccacugcgggaccaucgccaacggcguccugcagacguucaugcggauggcguggggcgggagcuacaucgcccuggacuccggcaaggggagcugggacugcaucaugaccuccuaccaguaccucaucauccagaacaccaccugggaggaccacugccaguucagccgccccagccccaucggcuaccuggggcugcucucccagcggacgcgcgacaucuacaucagccggcgccugcugggcaccuucaccuggacccucuccgacagcgagggcaacgaggcccccgggggcuacugccugacgcgguggaugcugaucgaggccgagcucaagugcuucgggaacaccgccguggcgaagugcaacgagaagcacgacgaggaguucugcgacaugcugcgccuguucgacuucaacaagcaggccauccggcgccucaagaccgaggcccagauguccauccagcugaucaacaaggccgugaacgcccugaucaacgaccagcucaucaugaagaaccaccuccgggacaucaugggcaucccguacugcaacuacagccgcuacugguaccugaaccacaccgucacggggaagaccucccugccccggugcuggcuggugagcaacggcuccuaccugaacgagacccacuucagcgacgacaucgagcagcaggcggacaacaugaucaccgagcuccugcagaaggaguacauggaccgccagggcaagacgccccuggggcucguggaccuguucgucuucuccaccagcuucuaccugaucuccaucuuccugcaccucgugaagaucccgacccaccggcacgugaucggcaagcccugccccaagccccaccgccugaaccacauggggaucugcagcugcggccuguacaagcacccggggguccccgugaaguggaagcgguga

SEQ ID NO: 663 - RNA, 1473 nt, Artificial Sequence
  derived and/or modified protein sequence (opt1) from LASV(LASV991-NIG-2009;Clade II)__AIT17770__GPC
augggccagaucgugaccuucuuccaggaggucccccacgugaucgaggaggugaugaacaucguccugaucgcccucagccugcuggccauccucaaggggaucuacaacguggcgaccugcggccuguucgggcugguguccuuccuccugcugugcggccgcagcugcuccacgaccuacaagggggucuacgagcuccaggcccuggagcuggacaugagcucccucaacaugaccaugccgcugagcugcaccaagaacaacucccaccacuacaucauggugggcaacgagacgggccuggagcucacccugaccaacaccagcaucauccaccacaaguucugcaaccuguccgacgcccacaagaaggaccucuacgaccacgcccugaugagcaucaucuccacguuccaccugagcauccccaacuucaaccaguacgaggccauguccugcgacuucaacgggggcaagaucagcgugcaguacaaccucucccacaccuacgcggucgacgccgccaaccacugcgggaccaucgccaacggcgugcugcagaccuucaugcggauggcguggggcgggagcuacaucgcccuggacuccggcaagggcgggugggacugcaucaugacgagcuaccaguuccucaucauccagaacaccaccugggaggaccacugccaguucucccgccccagccccaucggguaccugggccugcucagccagcggacccgcgacaucuacaucucccggcgccugcugggcacguucaccuggacccucagcgacuccgaggggaacgagaccccgggcggguacugccugacgcgguggaugcugaucgaggccgagcucaagugcuucggcaacaccgccguggccaagugcaacgagaagcacgacgaggaguucugcgacaugcugcgccuguucgacuucaacaagcaggcgaucaagcggcucaagaccgaggcccagaugagcauccaccugaucaacaaggccgucaacgcccugaucaacgaccagcucaucaugaagaaccaccuccgcgacaucauggggauccccuacugcaacuacuccaaguacugguaccugaaccacaccgugacgggcaagaccagccugccccggugcuggcugguguccaacggcagcuaccugaacgagacccacuucuccgacgacaucgagcagcaggccgacaacaugaucaccgagcuccugcagaaggaguacaucgaccgccaggggaagacgccccugggccucgucgaccuguucguguucagcaccuccuucuaccugaucagcaucuuccugcaccucgugaagaucccgacccaccggcacgucaucgggaagcccugccccaagccccaccgccugaaccacaugggcaucugcuccugcgggcuguacaagcacccgggcgugcccgugcgguggaagcgcuga

SEQ ID NO: 664 - RNA, 1473 nt, Artificial Sequence
  derived and/or modified protein sequence (opt1) from LASV(LASV993-NIG-2009;Clade II)__AIT17778__GPC
augggccagaucaucaccuucuuccaggaggugccccacgucaucgaggaggugaugaacaucgugcugaucgcccucagccugcuggccauccucaaggggaucuacaacgucgcgaccugcggccuguucgggcugguguccuuccuccugcugugcggccgcagcugcuccacgaccuacaaggggguguacgagcuccagacccuggagcuggacauggccaaccucaacaugaccaugccgcugagcugcacgaagaacaacucccaccacuacaucauggucggcaacgagaccggccuggagcucacccugaccaacacgagcaucaucaaccacaaguucugcaaccuguccgacgcccacaagaagaaccucuacgaccacgcccugaugagcaucaucuccaccuuccaccugagcauccccaacuucaaccaguacgaggccauguccugcgacuucaacgggggcaagaucagcgugcaguacaaccucucccacaccuacgcgcgggacgccgccaaccacugcgggaccaucgccaacggcgugcugcagacguucaugcgcauggcguggggcgggagcuacaucgcccuggacuccggcaaggggagcugggacugcaucaugaccuccuaccaguaccucaucauccagaacaccaccugggaggaccacugccaguucagccggcccucccccaucggcuaccuggggcugcucagccagcgcacgcgggacaucuacaucagccgccggcugcugggcaccuucaccuggacccucuccgacagcgagggcaacgagacgcccgggggcuacugccugacccgcuggaugcugaucgaggccgagcucaagugcuucgggaacaccgccgucgccaagugcaacgagaagcacgacgaggaguucugcgacaugcugcggcuguucgacuucaacaagcaggcgauccgccggcucaagaccgaggcccagaugaacauccagcugaucaacaaggccgugaacgcccugaucaacgaccagcucaucaugaagaaccaccuccgcgacaucaugggcauccccuacugcaacuacuccaaguacugguaccugaaccacacggugaccgggaagaccagccugccccggugcuggcuggucuccaacggcagcuaccugaacgagacccacuucuccgacgacaucgagcagcaggccgacaacaugaucacggagcuccugcagaaggaguacauggaccgccagggcaagaccccgcuggggcucguggaccuguucguguucagcaccuccuucuaccugaucagcaucuuccugcaccucgucaagaucccgacccaccggcacgugaucggcaagcccugccccaagccccaccgccugaaccacauggggaucugcuccugcggccuguacaagcacccgggggugcccgucaaguggaagcgguga

SEQ ID NO: 665 - RNA, 1473 nt, Artificial Sequence
  derived and/or modified protein sequence (opt1) from LASV(Nig08-04;Clade II)__ADU56610__GPC
augggccagaucgugaccuucuuccaggaggucccccacgugaucgaggaggugaugaacaucguccugaucgcccucagccugcuggccauccucaaggggaucuacaacguggcgaccugcggccuguucgggcugaucuccuuccuccugcugugcggccgcagcugcuccacgaccuacaaggggguguacgagcuccagacccuggagcuggacauggccaaccucaacaugaccaugccgcugagcugcacgaagaacuccagccaccacuacaucauggucggcaacgagaccggccuggagcucacccugaccaacacguccaucaucaaccacaaguucugcaaccugagcgacgcccacaagaagaaccucuacgaccacgcccugauguccaucaucagcaccuuccaccuguccauccccaacuucaaccaguacgaggccaugagcugcgacuucaacgggggcaagaucuccgugcaguacaaccucagccacgcguacgccguggacgccgccaaccacugcgggaccaucgcgaacggcguccugcagaccuucaugcggauggccuggggcggguccuacaucgcccuggacagcggcaaggggaacugggacugcaucaugacguccuaccaguaccucaucauccagaacaccaccugggaggaccacugccaguucagccgccccucccccaucggcuaccuggggcugcucagccagcggacccgcgacaucuacaucagccggcgccugcugggcacguucaccuggacccucuccgacagcgagggcaacgaggcccccgggggcuacugccugacccgguggaugcugaucgaggccgagcucaagugcuucgggaacacggcgaucgccaagugcaacgagaagcacgacgaggaguucugcgacaugcugcgccuguucgacuucaacaagcaggccaucaagcggcucaaggccgaggcccagauguccauccagcugaucaacaaggcggugaacgcccugaucaacgaccagcucaucaugaagaaccaccuccgcgacaucaugggcauccccuacugcaacuacagcaaguacugguaccugaaccacaccgugaccgggaagaccucccugccccggugcuggcugaucagcaacggcuccuaccugaacgagacgcacuucagcgacgacaucgagcagcaggccgacaacaugaucaccgagcuccugcagaaggaguacauggaccgccagggcaagaccccgcuggggcucgucgaccuguucguguucuccaccagcuucuaccugaucuccaucuuccugcaccucgugaagaucccgacgcaccggcacaucgucggccgccccugccccaagccccaccggcugaaccacauggggaucugcagcugcggccuguacaagcacccgggggugcccgugaaguggaagcgcuga

SEQ ID NO: 666 - RNA, 1473 nt, Artificial Sequence
  derived and/or modified protein sequence (opt1) from LASV(Nig08-A41;Clade II)__ADU56626__GPC
augggccagaucaucaccuucuuccaggaggugccccacgucaucgaggaggugaugaacaucgugcugaucgcccucagccugcuggccauccucaaggggaucuacaacgucgcgaccugcggccuguucgggcugguguccuuccuccugcugugcggccgcagcugcuccacgaccuacaaggggguguacgagcuccagacccuggagcugaacauggccagccucaacaugaccaugccgcuguccugcacgaagaacaacagccaccacuacaucauggucggcaacgagaccggccuggagcucacccugaccaacacguccaucaucaaccacaaguucugcaaccugagcgacgcccacaagcggaaccucuacgaccacgcccugauguccaucaucagcaccuuccaccuguccauccccaacuucaaccaguacgaggccaugagcugcgacuucaacgggggcaagaucuccgugcaguacaaccucagccacaccuacgcgguggacgccgccaagcacugcgggaccaucgccaacggcguccugcagacguucaugcgcauggcguggggcggguccuacaucgcccuggacagcggcaagggguccugggacugcaucaugaccagcuaccaguaccucaucauccagaacaccaccugggaggaccacugccaguucucccggcccagccccaucggcuaccuggggcugcucagccagcgcacgcgggacaucuacaucucccgccggcugcugggcaccuucaccuggacccucagcgacuccgagggcaacgagacgcccgggggcuacugccugacccgcuggaugcugaucgaggccgagcucaagugcuucgggaacaccgccguggccaagugcaacgagaagcacgacgaggaguucugcgacaugcugcggcuguucgacuucaacaagcaggcgauccgccggcucaaggccgaggcccagaugagcauccagcugaucaacaaggccgugaacgcccugaucaacgaccagcucaucaugaagaaccaccuccgcgacaucaugggcaucccguacugcaacuacuccaaguacugguaccugaaccacaccgucacggggaagaccagccugccccggugcuggcugguguccaacggcagcuaccugaacgagacccacuucuccgacgacaucgagcagcaggcggacaacaugaucaccgagcuccugcagaaggaguacaucgaccgccagggcaagacgccccuggggcucguggaccuguucgucuucagcaccuccuucuaccugaucagcaucuuccugcaccucgugaagaucccgacccaccggcacgugaucggcaagcccugccccaagccccaccgccugaaccacauggggaucugcuccugcggccuguacaagcacccggggguccccgugaaguggaagcgguga

SEQ ID NO: 667 - RNA, 1473 nt, Artificial Sequence
  derived and/or modified protein sequence (opt1) from LASV(Nig08-A47;Clade II)__ADU56630__GPC
augggccagaucaucaccuucuuccaggaggugccccacgucaucgaggaggugaugaacaucgugcugaucgcccucagccugcuggccauccucaaggggaucuacaacgucgcgaccugcggccuguucgggcugguguccuuccuccugcugugcggccgcagcugcuccacgaccuacaaggggguguacgagcuccagacccuggagcuggacauggccagccucaacaugaccaugccgcuguccugcacgaagaacaacagccaccacuacaucauggucggcaacgagaccggccuggagcucacccugaccaacacguccaucaucaaccacaaguucugcaaccugagcgacgcccacaagaagaaccucuacgaccacgcccugauguccaucaucagcaccuuccaccuguccauccccaacuucaaccaguacgaggccaugagcugcgacuucaacgggggcaagaucuccgugcaguacaaccucagccacgcguacgccguggacgccgccaaccacugcgggaccaucgcgaacggcguccugcagaccuucaugcggauggccuggggcggguccuacaucgcccuggacagcggcaagggguccugggacugcaucaugacgagcuaccaguaccucaucauccagaacaccaccugggaggaccacugccaguucucccgccccagccccaucggcuaccuggggcugcucagccagcggacccgcgacaucuacaucucccggcgccugcugggcacguucaccuggacccucagcgacuccgagggcaacgagacccccgggggcuacugccugacgcgguggaugcugaucgaggccgagcucaagugcuucgggaacaccgccguggcgaagugcaacgagaagcacgacgaggaguucugcgacaugcugcgccuguucgacuucaacaagcaggccauccggcgccucaagaccgaggcccagaugagcauccagcugaucaacaaggccgugaacgcccugaucaacgaccagcucaucaugaagaaccaccuccgggacaucaugggcaucccguacugcaacuacuccaaguacugguaccugaaccacaccgucacggggaagaccagccugccccgcugcuggcugguguccaacggcagcuaccugaacgagacccacuucuccgacgacaucgagcagcaggcggacaacaugaucaccgagcuccugcagaaggaguacauggaccggcagggcaagacgccccuggggcucguggaccuguucgucuucagcaccuccuucuaccugaucagcaucuuccugcaccucgugcgcaucccgacccaccggcacgugaucggcaagcccugccccaagccccaccgccugaaccacauggggaucugcuccugcggccuguacaagcacccggggguccccgugaaguggaagcgguga

SEQ ID NO: 668 - RNA, 1473 nt, Artificial Sequence
  derived and/or modified protein sequence (opt1) from LASV(CSF;Clade III)__AAL13212__GPC
augggccagaucgugaccuucuuccaggaggucccccacgugaucgaggagaucaugaacaucgugcugaucacccucagccugcuggccauccucaagggggucuacaaccuggccacgugcggccugaucgggcucaucaccuuccuguuccugugcggccgcuccugcagcaugaccuacaagggguccuaccagcucgagacccuggagcugaacauggagacgcucaacaugaccaugccgcugagcugcaccaagaacaccucccaccacuacauccgggugggcaacgagacgggccuggagcucacccugaccaacaccagcaucaucaaccacaaguucugcaaccuguccgacgcgcacaagaagaaccucuacgaccacagccugauguccaucaucagcacguuccaccuguccauccccaacuucaaccaguacgaggccaugagcugcgacuucaacgggggcaagaucuccauccaguacaaccucagccacaccuacgccggggacgccgccaagcacugcggcacccuggcgaacgggauccugcagaccuucaugcgcauggccuggggcggcuccuacaucgcccucgacagcgggcggggcaacugggacugcaucaugacguccuaccaguaccugaucauccagaacaccaccugggaggaccacugccaguucagccgccccucccccaucggguaccugggccuccugagccagcggacccgcgagaucuacaucagccggcgccugcucggcacguucaccuggacccuguccgacagcgaggggaacgagaacccgggcggguacugccugacccgguggaugcucaucgaggccgagcugaagugcuucggcaacacggcgguggccaagugcaacgagaagcacgacgaggaguucugcgacaugcugcgccucuucgacuucaacaagcaggccauccagcggcugaaggccgaggcccagauguccauccagcugaucaacaaggcggucaacgcccucaucaacgaccagcugaucaugaagaaccaccuccgcgacaucauggggauccccuacugcaacuacagcaaguacugguaccugaaccacaccaccaccggccggacgucccugccccgcugcuggcuggugagcaacggcuccuaccucaacgagacccgguucagcgacgacaucgagcagcaggccgacaacaugaucaccgagaugcugcagaaggaguacaucgaccgccaggggaagacgccccugggccucguggaccuguucgucuucuccaccagcuucuaccugaucuccaucuuccugcaccucaucaagaucccgacccaccggcacaucgucgggggccccugccccaagccccaccgccugaaccacaaggggaucugcagcugcggccuguacaagcggccgggcguguccgugcgcuggaagcgguga

SEQ ID NO: 669 - RNA, 1473 nt, Artificial Sequence
  derived and/or modified protein sequence (opt1) from LASV(ISTH2121-NIG-2012;Clade III)__AIT17540__GPC
augggccagaucgugaccuucuuccaggaggucccccacgugaucgaggagaucaugaacaucgugcugaucacccucagccugcuggccauccucaaggggaucuacaacuucgccacgugcggccugaucgggcugaucaccuuccucuuccugugcggccgcuccugcagcaccaucuacaagggguccuaccagcugcagacccucgagcugaacauggagacgcugaacaugaccaugccgcucagcugcaccaagaacaacucccaccacuacauccgggucggcaacgagaccggccuggagcugacgcucaccaacaccagcaucaucaaccacaaguucugcaaccuguccgaggcgcacaagaagaaccuguacgaccacgcccucaugagcaucaucuccaccuuccaccugagcauccccaacuucaaccaguacgaggccauguccugcgacuucaacgggggcaagaucagcgugcaguacaaccugucccacagcuacgccguggacgccgcgaaccacugcgggacggucgccaacggcgugcuccagaccuucaugcgcauggccuggggcggguccuacaucgcccuggacagcggccgggggaacugggacugcaucaugaccuccuaccaguaccugaucauccagaacaccacgugggaggaccacugccaguucagccgccccucccccaucggcuaccucgggcugcugagccagcggacccgcgacaucuacaucagccggcgccuccugggcaccuucaccuggacgcuguccgacagcgagggcaaggagacccccgggggcuacugccucacccgguggaugcugaucgaggcggagcugaagugcuucgggaacaccgccguggccaagugcaacgagaagcacgacgaggaguucugcgacaugcuccgccuguucgacuucaacaagcaggccauccagcggcugaagacggaggcccagauguccauccagcucaucaacaaggcggucaacgcccugaucaacgaccagcugaucaugaagaaccaccuccgcgacaucaugggcauccccuacugcaacuacagcaaguacugguaccugaaccacaccuccaccgggcggaccagccugcccaagugcuggcucguguccaacggcagcuaccugaacgagacgcacuucuccgacgacaucgagcagcaggccgacaacaugaucaccgagaugcugcagaaggaguacaucgaccgccagggcaagaccccgcucgggcugguggaccuguucgucuucagcaccuccuucuaccucaucagcaucuuccugcaccuggugaagaucccgacgcaccggcacaucgugggcaaguccugccccaagccccaccgccugaaccacauggggaucugcagcugcggccucuacaagcagcccggggucccggugaaguggaagcgguga

SEQ ID NO: 670 - RNA, 1473 nt, Artificial Sequence
  derived and/or modified protein sequence (opt1) from LASV(Nig08-A19;Clade III)__ADU56618__GPC
augggccagaucgugaccuucuuccaggaggucccccacgugaucgaggaggugaugaacaucguccugaucgcccucagcauccuggccauccugaaggggcucuacaacaucgcgaccugcggccugaucgggcuggugacguuccuccugcuguccggccgcagcugcuccaugaccuacaaggggguguacgagcuccagacccuggagcugaacaugaacacccucaacaugacgaugccgcugagcugcaccaagaacaacucccaccacuacaucauggucggcaacgagaccggccuggagcucacccugacgaacaccagccugcuccaccacaaguucugcaaccuguccgacgcccacaagaagaaccuguacgaccacacccucaugagcaucaucuccaccuuccaccugagcauccccaacuucaaccaguacgaggccauguccugcgacuucaacgggggcaagaucacggugcaguacaaccugagccacuccuacgccaucgacgccgcgaaccacugcgggaccguggccaacggcguccuccagaccuucaugcggauggccuggggcgggagcuacaucgcccuggacuccggccgcgggaagugggacugcaucaugaccagcuaccaguaccugaucauccagaacacgaccugggaggaccacugccaguucucccggcccagccccaucggcuaccucgggcugcugucccagcgcacccgggacaucuacaucagccgccggcuccugggcaccuucacguggacccugagcgacuccgagggcaacgagacccccgggggcuacugccucacccgcuggaugcugaucgaggcggagcugaagugcuucgggaacacggccguggccaagugcaacgagaagcacgacgaggaguucugcgacaugcuccggcuguucgacuucaacaagcaggccauccgccggcugaaggccgaggcgcagaugagcauccagcucaucaacaaggccgugaacgcccugaucaacgaccagcugaucaugaagaaccaccuccgcgacaucaugggcauccccuacugcaacuacuccaaguacugguaccugaaccacaccagcaccgggcggaccucccugccccgcugcuggcucgucagcaacggcuccuaccugaacgagacgcacuucagcgacgacaucgagcagcaggccgacaacaugaucaccgagaugcugcagaaggaguaccucgaccggcagggcaagaccccgcuggggcugguggaccuguucguguucuccaccagcuucuaccucaucuccaucuuccugcaccuggucaagaucccgacgcaccgccacaucgugggcaagcccugccccaagccccaccggcucaaccacauggggaucugcagcugcggccuguacaagcagccgggggugcccguccgcuggaagcgguga

SEQ ID NO: 671 - RNA, 1473 nt, Artificial Sequence
  derived and/or modified protein sequence (opt1) from LASV(ONM-299;Clade III)__ANH09734__GPC
augggccagaucgugaccuucuuccaggaggucccccacgugaucgaggagaucaugaacaucgugcugaucacccucagccugcuggccauccucaaggggcuguacaacuucgccacgugcggccugaucgggcucaucaccuuccuguuccugugcggccgcuccugcagcaugaucuacaagggguccuaccagcucgagacccuggagcugaacauggagacccucaacaugacgaugccgcugagcugcaccaagaacaacucccaccacuacauccgggucggcaacgagaccggccuggagcucacccugacgaacaccagcaucaucgggcacaaguucugcaaccuguccgacgcgcacaagaagaaccucuacgaccacagccugauguccaucaucagcaccuuccaccuguccauccccaacuucaaccaguacgaggccaugagcugcgacuucaacggcgggaagaucuccauccaguacaaccucagccacaccuacgccggcgacgccgccaagcacugcgggacgguggcgaacggcgugcugcagaccuucaugcgcauggccuggggcggguccuacaucgcccuggacagcggccgggggaacugggacugcaucaugaccuccuaccaguaccucaucauccagaacaccacgugggaggaccacugccaguucagccgccccucccccaucggcuaccugggccugcucagccagcggacccgcgacaucuacaucagccggcgccugcuggggaccuucaccuggacgcucuccgacagcgagggcaaggagacccccgggggcuacugccugacccgguggaugcugaucgaggccgagcucaagugcuucgggaacaccgcggucgccaagugcaacgagaagcacgacgaggaguucugcgacaugcugcgccuguucgacuucaacaagcaggccauccagcggcucaagacggaggcccagauguccauccagcugaucaacaaggccgugaacgcgcugaucaacgaccagcucaucaugaagaaccaccuccgcgacaucaugggcauccccuacugcaacuacagcaaguacugguaccugaaccacaccuccaccggccggaccagccugcccaagugcuggcugguguccaacgggagcuaccugaacgagacgcacuucuccgacgacaucgagcagcaggccgacaacaugaucaccgagaugcuccagaaggaguacaucgaccgccagggcaagaccccgcuggggcuggucgacguguucguguucagcaccuccuucuaccucaucagcaucuuccugcaccuggucaagaucccgacgcaccggcacaucgugggcaaguccugccccaagccccaccgccugaaccacauggggaucugcagcugcggccucuacaagcagcccggcgugccgguccgguggaagcgcuga

SEQ ID NO: 672 - RNA, 1473 nt, Artificial Sequence
  derived and/or modified protein sequence (opt1) from LASV(ONM-700;Clade III)__ANH09738__GPC
augggccagaucgugaccuucuuccaggaggucccccacgugaucgaggagaucaugaacaucgugcugaucacccucagccugcuggccauccucaaggggcuguacaacuucgccacgugcggccugaucgggcucaucaccuuccuguuccugugcggccgcuccugcagcaugaucuacaagggguccuaccagcucgagacccuggagcugaacauggagacccucaacaugacgaugccgcugagcugcaccaagaacaacucccaccacuacauccgggucggcaacgagaccggccuggagcucacccugacgaacaccagcaucaucaaccacaaguucugcaaccuguccgacgcgcacaagcgcaaccucuacgaccacagccugauguccaucaucagcaccuuccaccuguccauccccaacuucaaccaguacgaggccaugagcugcgacuucaacgggggcaagaucuccauccaguacaaccucagccacaccuacgccggggacgccgccaagcacugcggcacgguggcgaacggggugcugcagaccuucaugcggauggccuggggcggcuccuacaucgcccuggacagcgggcgcggcaacugggacugcaucaugaccuccuaccaguaccucaucauccagaacaccacgugggaggaccacugccaguucagccggcccucccccaucggguaccugggccugcucagccagcgcacccgggacaucuacaucagccgccggcugcugggcaccuucaccuggacgcucuccgacagcgaggggaaggagaccccgggcggguacugccugacccgcuggaugcugaucgaggccgagcucaagugcuucggcaacaccgcggucgccaagugcaacgagaagcacgacgaggaguucugcgacaugcugcggcuguucgacuucaacaagcaggccauccagcgccucaagacggaggcccagauguccauccagcugaucaacaaggccgugaacgcgcugaucaacgaccagcucaucaugaagaaccaccuccgggacaucauggggauccccuacugcaacuacagcaaguacugguaccugaaccacaccuccaccggccgcaccagccugcccaagugcuggcugguguccaacggcagcuaccugaacgagacgcacuucuccgacgacaucgagcagcaggccgacaacaugaucaccgagaugcuccagaaggaguacaucgaccggcaggggaagacgccccugggccuggucgacguguucauguucagcaccuccuucuaccucaucagcaucuuccugcaccuggugaagaucccgacccaccgccacaucgucgggaaguccugccccaagccccaccggcugaaccacaugggcaucugcagcugcgggcucuacaagcagcccggcgugccggugcgcuggaagcgguga

SEQ ID NO: 673 - RNA, 1473 nt, Artificial Sequence
  derived and/or modified protein sequence (opt1) from LASV(Weller;Clade III)__AAT49010__GPC
augggccagaucgugaccuucuuccaggaggucccccacgugaucgaggaggugaugaacaucguccugaucgcccucagcgugcuggccauccugaaggggcucuacaacuucgcgaccugcggccugaucgggcuggugacguuccuccugcuguccggccgcagcugcuccaugaucuacaagggggucuacgagcuccagacccuggagcugaacauggagacccucaacaugaccaugccgcugagcugcacgaagaacaccucccaccacuacauccgggugggcaacgacaccggccuggagcucacccugacgaacgagacccugcuccaccacaaguucugcaaccugagcgacgcccacaagcgcaaccuguacgaccacgcccucauguccaucaucagcaccuuccaccuguccauccccaacuucaaccaguacgaggccaugagcugcgacuucaacgggggcaagaucaccgugcaguacaaccugucccacagcuacgccgucgacgcggccaagcacugcgggacgguggccaacggcgugcuccagaccuucaugcggauggccuggggcggguccuacaucgcgcuggacagccgccacggcaacugggacugcaucaugaccuccuaccaguaccugaucauccagaacaccacgugggaggaccacugccaguucagccggcccucccccaucggguaccucggccugcugagccagcgcacccgggacaucuacaucucccgccggcuccuggggaccuucaccuggacgcugagcgacagcgagggcaacgagaccccgggcggguacugccucacccgcuggaugcugaucgaggccgagcugaagugcuucggcaacaccgccgucgccaagugcaacgagaagcacgacgaggaguucugcgacaugcuccggcuguucgacuucaacaagcaggccauccgccggcugaagacggaggcgcagauguccauccagcucaucaacaaggccgugaacgcccugaucaacgaccagcugaucaugaagaaccaccuccgcgacaucauggggauccccuacugcaacuacagcaaguacugguaccugaaccacaccuccaccggcaagaccagccugccccggugcuggcucguguccaacgggagcuaccugaacgagacgcacuucuccgacgacaucgagcagcaggccgacaacaugaucaccgagaugcugcagaaggaguaccucgaccgccagggcaagacgccccugggccuggucgaccuguucguguucagcaccuccuucuaccucaucagcaucuuccugcaccugaucaagaucccgacccaccggcacaucguggggaagcccugccccaagccccaccgccucaaccacaugggcaucugcuccugcgggcuguacaagcagccgggcguccccgugcgguggaagcgcuga

SEQ ID NO: 674 - RNA, 1476 nt, Artificial Sequence
  derived and/or modified protein sequence (opt1) from LASV(BA366;Clade IV)__ADI39451__GPC
augggccagaucgugaccuucuuccaggaggucccccacgugaucgaggaggugaugaacaucguccugaucgcccucagcgugcuggccgugcugaaggggcucuacaacgucgcgaccugcggccugaucgggcugaucgccuuccuccugcugugcggccgcuccugcacgaccacccucuacaaggggguguacgagcugcaggcccuggagcucaacauggagacccugaacaugacgaugccgcugagcugcaccaagaacaacucccaccacuacaucauggugggcaacgagaccggccucgagcugacccugacgaacaccagcaucaucaaccacaaguucugcaaccucuccgacgcccacaagaagaaccuguacgaccacgcccugaugagcaucaucuccaccuuccaccucagcauccccaacuucaaccaguacgaggcgauguccugcgacuucaacgggggcaagaucagcguccaguacaaccugucccacaccuacgccguggacgccgccaaccacugcgggacgguggcgaacggcguccugcagaccuucaugcggauggccuggggcgggagcuacaucgcccucgacuccggccgcgggagcugggacugcaucaugaccuccuaccaguaccugaucauccagaacaccacgugggaggaccacugccaguucagccggcccucccccaucggcuaccuggggcuccugagccagcgcacccgggacaucuacaucucccgccggcugcucggcaccuucaccuggacgcugagcgacagcgagggcaaggacacccccgggggcuacugccugacccgcuggaugcucaucgaggccgagcugaagugcuucgggaacaccgccguggcgaagugcaacgagaagcacgacgaggaguucugcgacaugcugcggcuguucgacuucaacaagcaggccauccagcgccugaaggccgaggcccagauguccauccagcugaucaacaaggccgugaacgcgcucaucaacgaccagcugaucaugaagaaccaccuccgggacaucaugggcauccccuacugcaacuacagcaaguacugguaccucaaccacacgaucaccgggcgcaccucccugcccaagugcuggcuggucagcaacggcuccuaccucaacgagacccacuucagcgacgacaucgagcagcaggccgacaacaugaucacggagaugcugcagaaggaguacaucgagcggcagggcaagaccccgcuggggcucguggaccuguucguguucuccaccagcuucuaccugaucuccaucuuccugcaccucaucaagaucccgacccaccgccacaucgucaacaagcccugccccaagccccaccggcugaaccacaugggcgugugcagcugcgggcuguacaagcagccgggcgugcccguccgcuggaagcgguga

SEQ ID NO: 675 - RNA, 1476 nt, Artificial Sequence
  derived and/or modified protein sequence (opt1) from LASV(G1180-SLE-2010;Clade IV)__AIT17168__GPC
augggccagaucgugaccuucuuccaggaggucccccacgugaucgaggaggugaugaacaucguccugaucgcccucagcauccuggccgugcugaaggggcucuacaacuucgcgaccugcggccugguggggcugcucaccuuccugcugcucugcggccgcuccugcaccgccagccgguacaagggggucuacgagcugcagacccuggagcucaacauggagacccugaacaugacgaugccgcuguccugcaccaagaacaacagccaccacuacaucauggugggcaacgagaccggccucgagcugacccugacgaacaccuccaucaucaaccacaaguucugcaaccucagcgacgcccacaagaagaaccuguacgaccacgcccugauguccaucaucagcaccuuccaccucuccauccccaacuucaaccaguacgaggccaugagcugcgacuucaacgggggcaagaucuccgugcaguacaaccugagccacuccuacgcgggggacgccgccaaccacugcggcaccgucgccaacggggugcugcagacguucaugcgcauggcguggggcggcagcuacaucgcccucgacuccgggcacggcagcugggacugcaucaugaccuccuaccaguaccugaucauccagaacaccaccugggaggaccacugccaguucagccggcccucccccaucggguaccugggccuccugagccagcgcacgcgggacaucuacaucagccgccggcugcucggcaccuucaccuggacccuguccgacagcgaggggaaggacacgccgggcggguacugccugacccgcuggaugcucaucgaggccgagcugaagugcuucggcaacaccgccguggccaagugcaacgagaagcacgacgaggaguucugcgacaugcugcggcuguucgacuucaacaagcaggcgauccagcgccugaaggccgaggcccagauguccauccagcugaucaacaaggccgucaacgcccucaucaacgaccagcugaucaugaagaaccaccuccgggacaucauggggauccccuacugcaacuacagcaaguacugguaccucaaccacaccacgaccggcaagaccucccugcccaagugcuggcuggugagcaacggcuccuaccucaacgagacccacuucagcgacgacaucgagcagcaggcggacaacaugaucacggagaugcugcagaaggaguacauggagcgccaggggaagacgccccugggccucguggaccuguucgucuucuccaccagcuucuaccugaucuccaucuuccugcaccucgugaagaucccgacccaccggcacaucgugggcaagagcugccccaagccccaccgccugaaccacauggggaucugcuccugcgggcuguacaagcagcccggcgucccggugaaguggaagcgguga

SEQ ID NO: 676 - RNA, 1476 nt, Artificial Sequence
  derived and/or modified protein sequence (opt1) from LASV(G1190-SLE-2010;Clade IV)__AIT17172__GPC
augggccagaucgugaccuucuuccaggaggucccccacgugaucgaggaggugaugaacaucguccugaucgcccucagcauccuggccgugcugaaggggcucuacaacuucgcgaccugcggccugguggggcuggucacguuccuccugcugugcggccgcuccugcaccaccagccucuacaaggggguguacgagcugcagacccuggagcucaacauggagacgcugaacaugaccaugccgcuguccugcaccaagaacaacagccaccacuacaucauggugggcaacgagaccggccucgagcugacgcugaccaacaccuccaucaucaaccacaaguucugcaaccucagcgacgcccacaagaagaaccuguacgaccacgcccugauguccaucaucagcaccuuccaccucuccauccccaacuucaaccaguacgaggccaugagcugcgacuucaacgggggcaagaucuccguccaguacaaccugagccacuccuacgccggggacgcggccaaccacugcggcacgguggccaacggggugcugcagaccuucaugcggauggccuggggcggcagcuacaucgcgcucgacuccgggcgcggccggugggacugcaucaugaccagcuaccaguaccugaucauccagaacaccacgugggaggaccacugccaguucucccgccccagccccaucggguaccugggccuccugucccagcggacccgcgacaucuacaucagccggcgccugcucggcaccuucaccuggacgcugagcgacuccgaggggaaggacaccccgggcggguacugccugacccgguggaugcucaucgaggccgagcugaagugcuucggcaacaccgccgucgccaagugcaacgagaagcacgacgaggaguucugcgacaugcugcgccucuucgacuucaacaagcaggccauccagcggcugaaggcggaggcccagaugagcauccagcugaucaacaaggccgugaacgcccucaucaacgaccagcugaucaugaagaaccaccuccgcgacaucauggggauccccuacugcaacuacuccaaguacugguaccugaaccacacgaccaccggcaagaccagccugcccaagugcuggcugguguccaacggcagcuaccucaacgagacgcacuucuccgacgacaucgagcagcaggccgacaacaugaucaccgagaugcugcagaaggaguacauggagcggcaggggaagacgccccugggccucgucgaccuguucguguucagcaccuccuucuaccugaucagcaucuuccugcaccucgugaagaucccgacccaccgccacaucgucgggaagcccugcccccggccccaccgccugaaccacaugggcaucugcuccugcgggcuguacaagcagccgggcgugcccgugaaguggaagcgguga

SEQ ID NO: 677 - RNA, 1476 nt, Artificial Sequence
  derived and/or modified protein sequence (opt1) from LASV(G1200-LIB-2010;Clade IV)__AIT17176__GPC
augggccagaucgugaccuucuuccaggaggucccccacgugaucgaggaggugaugaacaucguccugaucgcccucagccugcuggccgugcucaaggggcuguacaacguggcgaccugcggccugaucgggcucaucacguuccugcugcucugcggccgcuccugcaccaccaaccuguacaagggggucuacgagcugcaggcccucgagcugaacauggagacccugaacaugacgaugccgcucagcugcaccaagaacaacucccaccacuacaucauggugggcaacgagaccggccuggagcugacccucacgaacaccagcaucaucaaccacaaguucugcaaccuguccgacgcccacaagaagaaccuguacgaccacgcccucaugagcaucaucuccaccuuccaccugagcauccccaacuucaaccaguacgaggccauguccugcgacuucaacgggggccggaucagcgugcaguacaaccugucccacagcuacgcgggggacgccgccucccacugcggcaccaucgccaacgggguccuccagacguucaugcgcauggcguggggcggcagcuacaucgcccuggacuccgggcacggcgggugggacugcaucaugaccagcuaccaguaccugaucauccagaacaccaccugggaggaccacugccaguucucccggcccagccccaucggcuaccucggccugcugucccagcgcacgcgggacaucuacaucagccgccggcuccuggggaccuucaccuggacccugagcgacuccgagggcaaggacacgcccgggggcuacugccucacccgcuggaugcugaucgaggccgagcugaagugcuucgggaacaccgccguggccaagugcaacgagaagcacgacgaggaguucugcgacaugcuccggcuguucgacuucaacaagcaggcgauccagcgccugaaggccgaggcccagaugagcauccagcucaucaacaaggccgugaacgcccugaucaacgaccagcugaucaugaagaaccaccuccgggacaucaugggcaucccguacugcaacuacuccaaguacugguaccugaaccacaccgucacgggcaagaccagccugcccaagugcuggcucguguccaacgggagcuaccugaacgagacccacuucuccgacgacaucgagcagcaggcggacaacaugaucaccgagaugcugcagaaggaguacauggagcgccagggcaagacgccccucgggcugguggaccuguucgucuucagcaccuccuucuaccugaucagcaucuuccuccaccuggugaagaucccgacccaccggcacguggucggcaagcccugccccaagccccaccgccugaaccacauggggaucugcuccugcggccucuacaagcagccgggcgugcccgugcgguggaagcgcuga

SEQ ID NO: 678 - RNA, 1476 nt, Artificial Sequence
  derived and/or modified protein sequence (opt1) from LASV(G1442-SLE-2011;Clade IV)__AIT17180__GPC
augggccagaucgugaccuucuuccaggaggucccccacgugaucgaggaggugaugaacaucguccugaucgcccucagcauccuggccgugcugaaggggcucuacaacguggcgaccugcggccugaucgggcuggucacguuccuccugcugugcggccgcuccugcaccaccacccucuacaaggggguguacgagcugcagacgcuggagcucaacauggagacccugaacaugaccaugccgcugagcugcaccaagaacaacucccaccacuacauccgggugggcaacgagacgggccucgagcugacccugaccaacaccagcaucaucaaccacaaguucugcaaccucuccgacgcccacaagaagaaccuguacgaccacgcccugaugagcaucaucuccacguuccaccucagcauccccaacuucaaccaguacgaggccauguccugcgacuucaacgggggcaagaucagcguccaguacaaccugucccacagcuacgccggggacgcggccaaccacugcggcaccguggccaacggggugcugcagaccuucaugcgcauggccuggggcggcuccuacaucgcgcucgacagcgggcggggcaacugggacugcaucaugaccuccuaccaguaccugaucauccagaacacgaccugggacgaccacugccaguucagccgccccucccccaucggguaccugggccuccugagccagcggacccgcgacgucuacaucucccggcgccugcucggcaccuucacguggacccugagcgacagcgaggggaaggacaccccgggcggguacugccugacccgguggaugcucaucgaggccgagcugaagugcuucggcaacacggccguggccaagugcaacgagaagcacgacgaggaguucugcgacaugcugcgccucuucgacuucaacaagcaggccauccagcggcugaaggcggaggcccagauguccauccagcugaucaacaaggccgugaacgcccucaucaacgaccagcugaucaugaagaaccaccuccgcgacaucauggggauccccuacugcaacuacagcaaguacugguaccugaacaacaccgccaccggcaagaccucccugcccaagugcuggcugaucagcaacggcuccuaccucaacgagacgcacuucagcgacgacaucgagcaggaggcggacaacaugaucaccgagaugcugcagaaggaguacauggagcggcaggggaagacgccccugggccucgucgaccuguucguguucuccaccagcuucuaccugaucuccaucuuccugcaccucgugaagaucccgacccaccgccacaucgucggcaagagcugccccaagccccaccggcugaaccacauggggaucugcuccugcgggcuguacaagcagcccggcgugccggugcgcuggaagcgguga

SEQ ID NO: 679 - RNA, 1476 nt, Artificial Sequence
  derived and/or modified protein sequence (opt1) from LASV(G1529-SLE-2011;Clade IV)__AIT17184__GPC
augggccagaucgugaccuucuuccaggaggucccccacgugaucgaggaggugaugaacaucguccugaucgcccucagcauccuggccgugcugaaggggcucuacaacguggcgaccugcggccugaucgggcuggucaccuuccuccugcugugcggccgcuccugcaccaccacccucuacaaggggguguacgagcugcaggcccuggagcucaacauggagacgcugaacaugaccaugccgcugagcugcaccaagaacaacucccaccacuacauccgggugggcaacgagaccggccucgagcugacgcugaccaacaccagcaucaucgaccacaaguucugcaaccucuccgacgcccacaagaagaaccuguacgaccacgcccugaugagcaucaucuccaccuuccaccucagcauccccaacuucaaccaguacgaggccauguccugcgacuucaacgggggcaagaucagcguccaguacaaccugucccacagcuacgcgggggacgccgccaaccacugcggcacgguggccaacggggugcugcagaccuucaugcgcauggcguggggcggcuccuacaucgcccucgacagcgggcggaacggcugggacugcaucaugaccuccuaccaguaccugaucauccagaacaccacgugggacgaccacugccaguucagccgccccucccccaucggguaccugggccuccugagccagcggacccgcgacaucuacaucucccggcgccugcucggcaccuucaccuggacgcugagcgacagcgaggggaaggacaccccgggcggguacugccugacccgguggaugcucaucgaggccgagcugaagugcuucggcaacaccgccgucgccaagugcaacgagaagcacgacgaggaguucugcgacaugcugcgccucuucgacuucaacaagcaggcgauccggcgccugaaggccgaggcccagauguccauccagcugaucaacaaggccgugaacgcccucaucaacgaccagcugaucaugaagaaccaccuccgggacaucauggggauccccuacugcaacuacagcaaguacugguaccugaacaacacggcgaccggcaagaccucccugccccgcugcuggcuggugagcaacggcuccuaccucaacgagacccacuucagcgacgacaucgagcagcaggccgacaacaugaucacggagaugcugcagcgggaguacauggagcgccaggggaagacgccccugggccucgucgaccuguucguguucuccaccagcuucuaccugaucuccaucuuccugcaccucgugaagaucccgacccaccggcacaucgucgggaagcccugccccaagccccaccgccugaaccacaugggcaucugcagcugcgggcuguacaagcagccgggcgugcccgugaaguggaagcgguga

SEQ ID NO: 680 - RNA, 1476 nt, Artificial Sequence
  derived and/or modified protein sequence (opt1) from LASV(G1618-SLE-2011;Clade IV)__AIT17188__GPC
augggccagaucgugaccuucuuccaggaggucccccacgugaucgaggaggugaugaacaucguccugaucgcccucagcauccuggccgugcugaaggggcucuacaacuucgcgaccugcggcuucguggggcuggucuccuuccugcuccugugcggccgcagcugcacgaccucccuguacaaggggguguacgagcuccagacccuggagcugaacauggagacccucaacaugacgaugccgcugagcugcaccaagaacaacucccaccacuacaucauggugggcaacgagaccggccuggagcucacccugacgaacaccagcaucaucaaccacaaguucugcaaccuguccgacgcccacaagaagaaccucuacgaccacgcccugaugagcaucaucuccaccuuccaccugagcauccccaacuucaaccaguacgaggccauguccugcgacuucaacgggggcaagaucagcguccaguacaaccucucccacagcuacgccguggacgcggccaaccacugcgggaccguggccaacggcguccugcagacguucaugcggauggccuggggcggguccuacaucgcgcuggacagcggccacggguccugggacugcaucaugaccagcuaccaguaccucaucauccagaacaccaccugggaggaccacugccaguucucccgccccagccccaucggcuaccuggggcugcucagccagcggacgcgcgacaucuacaucucccggcgccugcugggcaccuucaccuggacccucagcgacuccgagggcaaggacacgcccgggggcuacugccugacccgguggaugcugaucgaggccgagcucaagugcuucgggaacaccgccguggccaagugcaacgagaagcacgacgaggaguucugcgacaugcugcgccuguucgacuucaacaagcaggccauccagcggcuccgcgcggaggcccagaugagcauccagcugaucaacaaggccgugaacgcccugaucaacgaccagcucaucaugaagaaccaccuccgggacaucaugggcauccccuacugcaacuacuccaaguacugguaccugaaccacaccacgaccgggcgcaccagccugcccaagugcuggcuggucuccaacggcagcuaccugaacgagacccacuucuccgacgacaucgagcagcaggccgacaacaugaucacggagaugcuccagaaggaguacauggagcggcagggcaagaccccgcuggggcugguggaccucuucguguucagcaccuccuucuaccugaucagcaucuuccugcaccuggucaagaucccgacccaccgccacaucgugggcaaguccugccccaagccccaccggcucaaccacauggggaucugcagcugcggccuguacgggcagcccggcgugccggucaaguggaagcgcuga

SEQ ID NO: 681 - RNA, 1476 nt, Artificial Sequence
  derived and/or modified protein sequence (opt1) from LASV(G1646-SLE-2011;Clade IV)__AIT17192__GPC
augggccagaucgugaccuucuuccaggaggucccccacgugaucgaggaggugaugaacaucguccugaucgcccucagcauccuggccgugcugaaggggcucuacaacuucgcgaccugcggcuucaucgggcugguguccuuccugcuccugugcggccgcagcugcacgaccucccuguacaagggggucuacgagcuccagacccuggagcugaacauggagacccucaacaugacgaugccgcugagcugcaccaagaacaacucccaccacuacaucauggugggcaacgagaccggccuggagcucacccugacgaacaccagcaucaucaaccacaaguucugcaaccuguccgacgcccacaagaagaaccucuacgaccacgcccugaugagcaucaucuccaccuuccaccugagcauccccaacuucaaccaguucgaggccauguccugcgacuucaacgggggcaagaucagcgugcaguacaaccucucccacagcuacgccgucgacgcggccaaccacugcgggaccguggccaacggcgugcugcagacguucaugcggauggccuggggcggguccuacaucgcgcuggacagcggccacggguccugggacugcaucaugaccagcuaccaguaccucaucauccagaacaccaccugggaggaccacugccaguucucccgccccagccccaucggcuaccuggggcugcucagccagcggacgcgcgacaucuacaucucccggcgccugcugggcaccuucaccuggacccucagcgacuccgagggcaaggacacgcccgggggcuacugccugacccgguggaugcugaucgaggccgagcucaagugcuucgggaacaccgccgucgccaagugcaacgagaagcacgacgaggaguucugcgacaugcugcgccuguucgacuucaacaagcaggccauccagcggcucaaggcggaggcccagaugagcauccagcugaucaacaaggccgugaacgcccugaucaacgaccagcucaucaugaagaaccaccuccgcgacaucaugggcauccccuacugcaacuacuccaaguacugguaccugaaccacaccacgaccgggcggaccagccugcccaagugcuggcugguguccaacggcagcuaccugaacgagacccacuucuccgacgacaucgagcagcaggccgacaacaugaucacggagaugcuccagaaggaguacauggagcgccagggcaagaccccgcuggggcuggucgaccucuucguguucagcaccuccuucuaccugaucagcaucuuccugcaccuggugaagaucccgacccaccggcacaucgucggcaaguccugccccaagccccaccgccucaaccacauggggaucugcagcugcggccuguacgggcagcccggcgugccggugaaguggaagcgguga

SEQ ID NO: 682 - RNA, 1476 nt, Artificial Sequence
  derived and/or modified protein sequence (opt1) from LASV(G1647-SLE-2011;Clade IV)__AIT17196__GPC
augggccagaucgugaccuucuuccaggaggucccccacgugaucgaggaggugaugaacaucguccugaucgcccucagcauccuggccgugcugaaggggcucuacaaccuggcgaccugcggccugguggggcucgucacguuccugcugcucugcggccgcuccugcaccaccagccuguacaaggggguguacgagcugcagacccucgagcugaacauggagacgcugaacaugaccaugccgcucuccugcaccaagaacaacagccaccacuacaucauggugggcaacgagaccggccuggagcugacgcucaccaacaccuccaucaucaaccacaaguucugcaaccugagcgacgcccacaagaagaaccuguacgaccacgcccucauguccaucaucagcaccuuccaccuguccauccccaacuucaaccaguacgaggccaugagcugcgacuucaacgggggcaagaucuccguccaguacaaccugagccacuccuacgccggggacgcggccaaccacugcggcacgguggccaacggggugcuccagaccuucaugcggauggccuggggcggcagcuacaucgcgcuggacuccgggcgcggccggugggacugcaucaugaccagcuaccaguaccugaucauccagaacaccacgugggaggaccacugccaguucucccgccccagccccaucggguaccucggccugcugucccagcggacccgcgacaucuacaucagccggcgccuccugggcaccuucaccuggacgcugagcgacuccgaggggaaggacaccccgggcggguacugccucacccgguggaugcugaucgaggccgagcugaagugcuucggcaacaccgccgucgccaagugcaacgagaagcacgacgaggaguucugcgacaugcuccgccuguucgacuucaacaagcaggccauccagcggcugaaggcggaggcccagaugaacauccagcucaucaacaaggccgugaacgcccugaucaacgaccagcugaucaugaagaaccaccuccgcgacaucauggggauccccuacugcaacuacagcaaguacugguaccugaaccacacgaccaccggcaagaccucccugccccggugcuggcucgugagcaacggcuccuaccugaacgagacgcacuucagcgacgacaucgagcagcaggccgacaacaugaucaccgagaugcugcagaaggaguacauggagcgccaggggaagacgccccucggccuggucgaccuguucguguucuccaccagcuucuaccugaucuccaucuuccuccaccuggugaagaucccgacccaccggcacaucgucgggaagcccugccccaagccccaccgccugaaccacaugggcaucugcagcugcggguucuacaagcagccgggcgugcccgugaaguggaagcgguga

SEQ ID NO: 683 - RNA, 1476 nt, Artificial Sequence
  derived and/or modified protein sequence (opt1) from LASV(G1774-SLE-2011;Clade IV)__AIT17204__GPC
augggccagaucgugaccuucuuccaggaggucccccacgugaucgaggaggugaugaacaucguccugaucgcccucagcauccuggccgugcugaaggggcucuacaaccuggcgaccugcggccugguggggcucgucacguuccugcugcucugcggccgcuccugcaccagcucccuguacaaggggguguacgagcugcagacccucgagcugaacauggagacccugaacaugacgaugccgcucagcugcaccaagaacuccagccaccacuacauccgggugggcaacgagaccggccuggagcugacccucacgaacaccuccaucaucaaccacaaguucugcaaccugagcgacgcccacaagaagaaccuguacgaccacgcccucauguccaucaucagcaccuuccaccuguccauccccaacuucaaccaguacgaggccaugagcugcgacuucaacgggggcaagaucuccguccaguacaaccugagccacuccuacgccggggacgcggccaaccacugcggcaccguggccaacggggugcuccagacguucaugcgcauggccuggggcggcagcuacaucgcgcuggacuccgggcacgaccggugggacugcaucaugaccagcuaccaguaccugaucauccagaacaccaccugggaggaccacugccaguucucccgccccagccccaucggcuaccucgggcugcugagccagcggacgcgcgacaucuacaucucccggcgccuccugggcaccuucaccuggacccugagcgacuccgagggcaaggacacgcccgggggcuacugccucacccgguggaugcugaucgaggccgagcugaagugcuucgggaacaccgccgucgccaagugcaacgagaagcacgacgaggaguucugcgacaugcuccgccuguucgacuucaacaagcaggccauccagcggcugaaggcggaggcccagaugagcauccagcucaucaacaaggccgugaacgcccugaucaacgaccagcugaucaugaagaaccaccuccgcgacaucaugggcaucccguacugcaacuacuccaaguacugguaccugaaccacaccaucacggggaagaccagccugcccaagugcuggcucguguccaacggcagcuaccugaacaagacccacuucuccgacgacaucgagcagcaggccgacaacaugaucaccgagaugcugcagaaggaguacauggagcggcagggcaagacgccccucgggcuggucgaccuguucguguucagcaccuccuucuaccugaucagcaucuuccuccaccugaucaagaucccgacccaccgccacaucgugggcaagcccugccccaagccccaccggcugaaccacauggggaucugcuccugcggccucuacaagcagccggggguccccgugaaguggaagcgcuga

SEQ ID NO: 684 - RNA, 1476 nt, Artificial Sequence
  derived and/or modified protein sequence (opt1) from LASV(G1792-SLE-2011;Clade IV)__AIT17208__GPC
augggccagaucgugaccuucuuccaggaggucccccacgugaucgaggaggugaugaacaucguccugaucgcccucagcauccuggccgugcugaaggggcucuacaacuucgcgaccugcggccugaucgggcuggugacguuccuccugcugugcggccgcuccugcaccaccagccucuacaagggggucuacgagcugcagacccuggagcucaacauggagacgcugaacaugaccaugccgcuguccugcaccaagaacaacagccaccacuacaucauggugggcaacgagaccggccucgagcugacgcugaccaacaccuccaucaucaaccacaaguucugcaaccucagcgacgcccacaagaagaaccuguacgaccacgcccugauguccaucaucagcaccuuccaccucuccauccccaacuucaaccaguacgaggccaugagcugcgacuucaacgggggcaagaucuccgugcaguacaaccugagccacuccuacgccggggacgcggccaaccacugcggcacggucgccaacggggugcugcagaccuucaugcggauggccuggggcggcagcuacaucgcgcucgacuccgggcgcggccagugggacugcaucaugaccagcuaccaguaccugaucauccagaacaccacgugggaggaccacugccaguucucccggcccagccccaucggguaccugggccuccugucccagcgcacccgggacaucuacaucagccgccggcugcucggcaccuucaccuggacgcugagcgacuccgaggggaaggacaccccgggcggguacugccugacccgcuggaugcucaucgaggccgagcugaagugcuucggcaacaccgccguggccaagugcaacgagaagcacgacgaggaguucugcgacaugcugcggcuguucgacuucaacaagcaggccauccagcgccugaaggcggaggcccagaugagcauccagcugaucaacaaggccgucaacgcccucaucaacgaccagcugaucaugaagaaccaccuccgggacaucauggggauccccuacugcaacuacuccaaguacugguaccucaaccacacgaccaccggcaagaccagccugcccaagugcuggcugguguccaacggcagcuaccucaacgagacgcacuucuccgacgacaucgagcagcaggccgacaacaugaucaccgagaugcugcagaaggaguacauggagcgccaggggaagacgccccugggccucguggaccuguucgucuucagcaccuccuucuaccugaucagcaucuuccugcaccucgugaagaucccgacccaccggcacaucguggggaaguccugccccaagccccaccgccugaaccacaugggcaucugcagcugcgggcuguacaagcagcccggcgucccggugaaguggaagcgguga

SEQ ID NO: 685 - RNA, 1476 nt, Artificial Sequence
  derived and/or modified protein sequence (opt1) from LASV(G1897-SLE-2011;Clade IV)__AIT17210__GPC
augggccagaucgugaccuucuuccaggaggucccccacgugaucgaggaggugaugaacaucguccugaucgcccucagcauccuggccgugcugaaggggcucuacaaccuggcgaccugcggccugguggggcucgucacguuccugcugcucugcggccgcuccugcaccaccagccuguacaaggggguguacgagcugcagacccucgagcugaacauggagacgcugaacaugaccaugccgcucuccugcaccaagaacaacagccaccacuacaucauggugggcaacgagaccggccuggagcugacgcucaccaacaccuccaucaucaaccacaaguucugcaaccugagcgacgcccacaagaagaaccuguacgaccacgcccucauguccaucaucagcaccuuccaccuguccauccccaacuucaaccaguacgaggccaugagcugcgacuucaacgggggcaagaucuccguccaguacaaccugagccacuccuacgccggggacgcggccaaccacugcggcacgguggccaacggggugcuccagaccuucaugcggauggccuggggcggcagcuacaucgcgcuggacuccgggcgcgaccggugggacugcaucaugaccagcuaccaguaccugaucauccagaacaccacgugggaggaccacugccaguucucccgccccagccccaucggcuaccucgggcugcugucccagcggacccgcgacaucuacaucagccggcgccuccugggcaccuucaccuggacgcugagcgacuccgagggcaaggacacccccgggggcuacugccucacccgguggaugcugaucgaggccgagcugaagugcuucgggaacaccgccgucgccaagugcaacgagaagcacgacgaggaguucugcgacaugcuccgccuguucgacuucaacaagcaggccauccagcggcugaaggcggaggcccagaugagcauccagcucaucaacaaggccgugaacgcccugaucaacgaccagcugaucaugaagaaccaccuccgcgacaucaugggcauccccuacugcaacuacuccaaguacugguaccugaaccacacgaccaccgggaagaccagccugcccaagugcuggcucguguccaacggcagcuaccugaacgagacgcacuucuccgacgacaucgagcagcaggccgacaacaugaucaccgagaugcugcagaaggaguacauggagcggcagggcaagaccccgcucgggcuggucgaccuguucguguucagcaccuccuucuaccugaucagcaucuuccuccgccuggugaagaucccgacgcaccggcacaucgucggcaagcccugccccaagccccaccgccugaaccacauggggaucugcuccugcggccucuacaagcagccgggggugcccgugaaguggaagcgguga

SEQ ID NO: 686 - RNA, 1476 nt, Artificial Sequence
  derived and/or modified protein sequence (opt1) from LASV(G1932-SLE-2011;Clade IV)__AIT17212__GPC
augggccagaucgugaccuucuuccaggaggucccccacgugaucgaggaggugaugaacaucguccugaucgcccucagcauccuggccgugcugaaggggcucuacaaccuggcgaccugcggccugguggggcucgucacguuccugcugcucugcggccgcuccugcaccaccagccuguacaaggggguguacgagcugcagacccucgagcugaacauggagacgcugaacaugaccaugccgcucuccugcaccaagaacaacagccaccacuacaucauggugggcaacgagaccggccuggagcugacgcucaccaacaccuccaucaucaaccacaaguucugcaaccugagcgacgcccaccggaagaaccuguacgaccacgcccucauguccaucaucagcaccuuccaccuguccauccccaacuucaaccaguacgaggccaugagcugcgacuucaacgggggcaagaucuccguccaguacaaccugagccacuccuacgccggggacgcggccaaccacugcggcacgguggccaacggggugcuccagaccuucaugcgcauggccuggggcggcagcuacaucgcgcuggacuccgggcggggcaagugggacugcaucaugaccagcuaccaguaccugaucauccagaacaccacgugggaggaccacugccaguucucccgccccagccccaucggguaccucggccugcugucccagcggacccgcgacaucuacaucagccggcgccuccugggcaccuucaccuggacgcugagcgacuccgaggggaaggacaccccgggcggguacugccucacccgguggaugcugaucgaggccgagcugaagugcuucggcaacaccgccgucgccaagugcaacgagaagcacgacgaggaguucugcgacaugcuccgccuguucgacuucaacaagcaggccauccagcggcugaaggcggaggcccagaugagcauccagcucaucaacaaggccgugaacgcccugaucaacgaccagcugaucaugaagaaccaccuccgcgacaucauggggauccccuacugcaacuacuccaaguacugguaccugaaccacacgaccaccggcaagaccagccugccccggugcuggcucguguccaacggcagcuaccugaacgagacgcacuucuccgacgacaucgagcagcaggccgacaacaugaucaccgagaugcugcagaaggaguacauggagcgccaggggaagacgccccucggccuggucgaccuguucguguucagcaccuccuucuaccugaucagcaucuuccuccaccuggugaagaucccgacccaccggcacaucgucgggaagcccugccccaagccccaccgccugaaccacaugggcaucugcuccugcgggcucuacaagcagccgggcgugcccgugaaguggaagcgguga

SEQ ID NO: 687 - RNA, 1476 nt, Artificial Sequence
  derived and/or modified protein sequence (opt1) from LASV(G1959-SLE-2011;Clade IV)__AIT17216__GPC
augggccagaucgugaccuucuuccaggaggucccccacgugaucgaggaggugaugaacaucguccugaucgcccucagcauccuggccgugcugaaggggcucuacaacuucgcgaccugcggccugguggggcuggucacguuccuccugcugugcggccgcuccugcaccaccagccucuacaaggggguguacgagcugcagacccuggagcucaacauggagacgcugaacaugaccaugccgcuguccugcaccaagaacaacagccaccacuacaucauggugggcaacgagaccggccucgagcugacgcugaccaacaccuccaucaucaaccacaaguucugcaaccucagcgacgcccacaagaagaaccuguacgaccacgcccugauguccaucaucagcaccuuccaccucuccauccccaacuucaaccaguacgaggccaugagcugcgacuucaacgggggcaagaucuccguccaguacaaccugagccacuccuacgccggggacgcggccaaccacugcggcacgguggccaacggggugcugcagaccuucaugcggauggccuggggcggcagcuacaucgcgcucgacuccgggcacggccgcugggacugcaucaugaccagcuaccaguaccugaucauccagaacaccacgugggaggaccacugccaguucucccggcccagccccaucggguaccugggccuccugucccagcgcacccgggacaucuacaucagccgccggcugcucggcaccuucaccuggacgcugagcgacuccgaggggaaggacaccccgggcggguacugccugacccgcuggaugcucaucgaggccgagcugaagugcuucggcaacaccgccgucgccaagugcaacgagaagcacgacgaggaguucugcgacaugcugcggcuguucgacuucaacaagcaggccauccagcgccugaaggcggaggcccagaugagcauccagcugaucaacaaggccgugaacgcccucaucaacgaccagcugaucaugaagaaccaccuccgggacaucauggggauccccuacugcaacuacuccaaguacugguaccucaaccacacgaccaccggcaagaccagccugcccaagugcuggcugguguccaacggcagcuaccucaacgagacgcacuucuccgacgacaucgagcagcaggccgacaacaugaucaccgagaugcugcagaaggaguacauggagcgccaggggaagacgccccugggccucgucgaccuguucguguucagcaccuccuucuaccugaucagcaucuuccugcaccucgugaagaucccgacccaccggcacaucgucgggaagcccugccccaagccccaccgccugaacuacaugggcaucugcuccugcgggcuguacaagcagccgggcgugcccgugcgguggaagcgcuga

SEQ ID NO: 688 - RNA, 1476 nt, Artificial Sequence
  derived and/or modified protein sequence (opt1) from LASV(G2141-SLE-2011;Clade IV)__AIT17224__GPC
augggccagaucgugaccuucuuccaggaggucccccacgugaucgaggaggugaugaacaucguccugaucgcccucagcauccuggccgugcugaaggggcucuacaacguggcgaccugcggccugaucgggcuggucacguuccuccugcugugcggccgcuccugcaccaccacccucuacaaggggguguacgagcugcaggcccuggagcucaacauggagacgcugaacaugaccaugccgcugagcugcaccaagaacaacucccaccacuacauccgggugggcaacgacaccggccucgagcugacgcugaccaacaccagcaucauccagcacaaguucugcaaccucuccgacgcccacaagaagaaccuguacgaccacacccugaugagcaucaucuccacguuccaccucagcauccccaacuucaaccaguacgaggccauguccugcgacuucaacgggggcaagaucagcguccaguacaaccugucccacagcuacgccggggacgcggccucccacugcggcaccguggccaacggggugcugcagaccuucaugcgcauggccuggggcggcagcuacaucgcgcucgacuccgggcggggcaacugggacugcaucaugaccagcuaccaguaccugaucauccagaacacgaccugggaggaccacugccaguucucccgccccagccccaucggguaccugggccuccugucccagcggacccgcgacaucuacaucagccggcgccugcucggcaccuucacguggacccugagcgacuccgaggggcgggacaccccgggcggguacugccugacccgcuggaugcucaucgaggccgagcugaagugcuucggcaacacggccgucgccaagugcaacgagaagcacgacgaggaguucugcgacaugcugcggcuguucgacuucaacaagcaggccauccagcgccugaagaccgaggcgcagaugagcauccagcugaucaacaaggccgugaacgcccucaucaacgaccagcugaucaugaagaaccaccuccgggacaucauggggauccccuacugcaacuacuccaaguacugguaccucaacaacaccaucaccggcaagagcucccugcccaagugcuggcuggugagcaacggcuccuaccucaacgagacgcacuucagcgacgacaucgagcaggaggccgacaacaugaucaccgagaugcugcagaaggaguacauggagcgccaggggaagacgccccugggccucgucgaccuguucguguucuccaccagcuucuaccugaucuccaucuuccugcaccucgugaagaucccgacccaccggcacaucgucgggaagcccugccccaagccccaccgccugaaccacaugggcgugugcagcugcgggcuguacaagcagccgggcgugcccguccgguggaagcgcuga

SEQ ID NO: 689 - RNA, 1476 nt, Artificial Sequence
  derived and/or modified protein sequence (opt1) from LASV(G2147-SLE-2011;Clade IV)__AIT17228__GPC
augggccagaucgugaccuucuuccaggaggucccccacgugaucgaggaggugaugaacaucguccugaucgcccucagcauccuggccgugcugaaggggcucuacaacuucgcgaccugcggccugguggggcugcucacguuccugcugcucugcggccgcuccugcaccaccagccuguacaagggggucuacgagcugcagacccucgagcugaacauggagacgcugaacaugaccaugccgcucuccugcaccaagaacaacagccaccacuacaucauggugggcaacgagaccggccuggagcugacgcucaccaacaccuccaucaucgaccacaaguucugcaaccugagcgacgcccacaagaagaaccuguacgaccacgcccucauguccaucaucagcaccuuccaccuguccauccccaacuucaaccaguacgaggccaugagcugcgacuucaacgggggcaagaucuccgugcaguacaaccugagccacuccuacgccggggacgcggccaaccacugcggcacggucgccaacggggugcuccagaccuucaugcggauggccuggggcggcagcuacaucgcgcuggacuccgggcgcggcgggugggacugcaucaugaccagcuaccaguaccugaucauccagaacaccacgugggaggaccacugccaguucucccggcccagccccaucggcuaccucggccugcugucccagcgcacccgggacaucuacaucagccgccggcuccuggggaccuucaccuggacgcugagcgacuccgagggcaaggacacccccgggggcuacugccucacccgcuggaugcugaucgaggccgagcugaagugcuucgggaacaccgccguggccaagugcaacgagaagcacgacgaggaguucugcgacaugcuccggcuguucgacuucaacaagcaggccauccagcgccugaaggcggaggcccagaugagcauccagcucaucaacaaggccgucaacgcccugaucaacgaccagcugaucaugaagaaccaccuccgggacaucaugggcauccccuacugcaacuacuccaaguacugguaccugaaccacacgaccaccggcaagaccagccugcccaagugcuggcucguguccaacgggagcuaccugaacgagacgcacuucuccgacgacaucgagcagcaggccgacaacaugaucaccgagaugcugcagaaggaguacauggagcgccagggcaagaccccgcucgggcugguggaccuguucgucuucagcaccuccuucuaccugaucagcaucuuccuccaccuggugaagaucccgacgcaccggcacaucgugggcaaguccugccccaagccccaccgccugaaccacauggggaucugcagcugcggccucuacaagcagcccggcgucccggugaaguggaagcgguga

SEQ ID NO: 690 - RNA, 1476 nt, Artificial Sequence
  derived and/or modified protein sequence (opt1) from LASV(G2165-SLE-2011;Clade IV)__AIT17232__GPC
augggccagaucgugaccuucuuccaggaggucccccacgugaucgaggaggugaugaacaucguccugaucgcccucagcauccuggccgugcugaaggggcucuacaacuucgcgaccugcggccugguggggcuggucacguuccuccugcugugcggccgcuccugcaccaccagccucuacaaggggguguacgagcugcagacccuggagcucaacauggagacgcugaacaugaccaugccgcuguccugcaccaagaacaacagccaccacuacauccgggugggcaacgagaccggccucgagcugacgcugaccaacaccuccaucaucaaccacaaguucugcaaccucagcgacgcccacaagaagaaccuguacgaccacgcccugauguccaucaucagcaccuuccaccucuccauccccaacuucaaccaguacgaggccaugagcugcgacuucaacgaggggaagaucuccguccaguacaaccugagccacuccuacgccggcgacgcggccaaccacugcgggacgguggccaacggcgugcugcagaccuucaugcgcauggccuggggcgggagcuacaucgcgcucgacuccggccgggggaagugggacugcaucaugaccagcuaccaguaccugaucauccagaacaccacgugggaggaccacugccaguucucccgccccagccccaucggcuaccuggggcuccugucccagcggacccgcgacaucuacaucagccggcgccugcucggcaccuucaccuggacgcugagcgacuccgagggcaaggacacccccgggggcuacugccugacccgguggaugcucaucgaggccgagcugaagugcuucgggaacaccgccgucgccaagugcaacgagaagcacgacgaggaguucugcgacaugcugcgccucuucgacuucaacaagcaggccaucgagcggcugaaggcggaggcccagaugagcauccagcugaucaacaaggccgugaacgcccucaucaacgaccagcugaucaugaagaaccaccuccgcgacaucaugggcauccccuacugcaacuacuccaaguacugguaccugaaccacacgaccaccgggaagaccagccugcccaagugcuggcugguguccaacggcagcuaccucaacgagacgcacuucuccgacgacaucgagcagcaggccgacaacaugaucaccgagaugcugcagaaggaguacauggagcggcagggcaagaccccgcuggggcucgucgaccuguucguguucagcaccuccuucuaccugaucagcaucuuccugcaccucgugaagaucccgacgcaccgccacaucgucggcaaguccugccccaagccccaccggcugaaccacauggggaucugcagcugcggccuguacaagcagcccggggugccggugaaguggaagcgcuga

SEQ ID NO: 691 - RNA, 1476 nt, Artificial Sequence
  derived and/or modified protein sequence (opt1) from LASV(G2184-SLE-2011;Clade IV)__AIT17236__GPC
augggccagaucgugaccuucuuccaggaggucccccacgugaucgaggaggugaugaacaucguccugaucgcccucagcauccuggccgugcugaaggggcucuacaacuucgcgaccugcggccugguggggcuggucacguuccuccugcugugcggccgcuccugcaccaccagccucuacaaggggguguacgagcugcagacccuggagcucaacauggagacgcugaacaugaccaugccgcuguccugcaccaagaacaacagccaccacuacaucauggugggcaacgagaccggccucgagcugacgcugaccaacaccuccaucaucaaccacaaguucugcaaccucagcgacgcccacaagaagaaccuguacgaccacgcccugauguccaucaucagcaccuuccaccucuccauccccaacuucaaccaguacgaggccaugagcugcgacuucaacgggggccggaucuccguccaguacaaccugagccacuccuacgccggggaggcggccaaccacugcggcacgguggccaacggggugcugcagaccuucaugcgcauggccuggggcggcagcuacaucgcgcucgacuccgggcggggcaagugggacugcaucaugaccagcuaccaguaccugaucauccagaacaccacgugggaggaccacugccaguucucccgccccagccccaucggguaccugggccuccugucccagcggacccgcgacaucuacaucagccggcgccugcucggcaccuucaccuggacgcugagcgacuccgaggggaaggacaccccgggcggguacugccugacccgguggaugcucaucgaggccgagcugaagugcuucggcaacaccgccgucgccaagugcaacgagaagcacgacgaggaguucugcgacaugcugcgccucuucgacuucaacaagcaggccauccagcggcugaaggcggaggcccagaugagcauccagcugaucaacaaggccgugaacgcccucaucaacgaccagcugaucaugaagaaccaccuccgcgacaucauggggauccccuacugcaacuacucccgguacugguaccugaaccacacgaccaccggcaagaccagccugcccaagugcuggcugguguccaacggcagcuaccucaacgagacgcacuucuccgacgacaucgagcagcaggccgacaacaugaucaccgagaugcugcagaaggaguacauggagcgccaggggaagacgccccugggccucgucgaccuguucguguucagcaccuccuucuaccugaucagcaucuuccugcaccucgugaagaucccgacccaccggcacaucgucgggaaguccugccccaagccccaccgccugaaccacaugggcaucugcagcugcgggcuguacaagcagcccggcgugccggugaaguggaagcgguga

SEQ ID NO: 692 - RNA, 1476 nt, Artificial Sequence
  derived and/or modified protein sequence (opt1) from LASV(G2197-SLE-2011;Clade IV)__AIT17240__GPC
augggccagaucgugaccuucuuccaggaggucccccacgugaucgaggaggugaugaacaucguccugaucgcccucagcauccuggccgugcugaaggggcucuacaaccuggcgaccugcggccugguggggcucgucacguuccugcugcucugcggccgcuccugcaccaccagccuguacaagggguucuacgagcugcagacccucgagcugaacauggagacgcugaacaugaccaugccgcucuccugcaccaagaacaacagccaccacuacauccgggugggcaacgagaccggccuggagcugacgcucaccaacaccuccaucaucgaccacaaguucugcaaccugagcgacgcccacaagaagaaccuguacgaccacgcccucauguccaucaucagcaccuuccaccuguccauccccaacuucaaccaguacgaggccaugagcugcgacuucaacgggggcaagaucuccgugcaguacaaccugagccacuccuacgccggggacgcggccaaccacugcggcacggucgccaacggggugcuccagaccuucaugcgcauggccuggggcggcagcuacaucgcgcuggacuccgggcggggccgcugggacugcaucaugaccagcuaccaguaccugaucauccagaacaccacgugggaggaccacugccaguucucccggcccagccccaucggguaccucggccugcugucccagaagacccgcgacaucuacaucagccggcgccuccugggcaccuucaccuggacgcugagcgacuccgaggggaaggacaccccgggcggguacugccucacccgguggaugcugaucgaggccgagcugaagugcuucggcaacaccgccguggccaagugcaacgagaagcacgacgaggaguucugcgacaugcuccgccuguucgacuucaacaagcaggccauccagcggcugaaggcggaggcccagaugagcauccagcucaucaacaaggccgucaacgcccugaucaacgaccagcugaucaugaagaaccaccuccgcgacaucauggggauccccuacugcaacuacuccaaguacugguaccugaaccacacgaccaccggcaagaccagccugcccaagugcuggcucguguccaacggcagcuaccugaacgagacgcacuucuccgacgacaucgagcagcaggccgacaacaugaucaccgagaugcugcagaaggaguacauggagcggcaggggaagacgccccucggccugguggaccuguucgucuucagcaccuccuucuaccugaucagcaucuuccuccaccuggugaagaucccgacccaccgccacaucguggggaaguccugccccaagccccaccggcugaaccacaugggcaucugcagcugcgggcucuacaagcagcccggcgucccggugaaguggaagcgcuga

SEQ ID NO: 693 - RNA, 1476 nt, Artificial Sequence
  derived and/or modified protein sequence (opt1) from LASV(G2222-SLE-2011;Clade IV)__AIT17244__GPC
augggccagaucgugaccuucuuccaggaggucccccacgugaucgaggaggugaugaacaucguccugaucgcccucagcauccuggccgugcugaaggggcucuacaaccuggcgaccugcggccugguggggcucgucaccuuccugcugcucugcggccgcuccugcaccaccaaccuguacaaggggguguacgagcugcagacccucgagcugaacauggagacgcugaacaugaccaugccgcucagcugcaccaagaacuccagccaccacuacauccgggugggcaacgagaccggccuggagcugacgcucaccaacaccuccaucaucgaccacaaguucugcaaccugagcgacgcccacaagaagaaccuguacgaccacgcccucauguccaucaucagcaccuuccaccuguccauccccaacuucaaccaguacgaggccaugagcugcgacuucaacgggggcaagaucuccguccaguacaaccugagccacuccuacgugggggacgccgcggaccacugcggcacgguggccaacgggguccuccagaccuucaugcgcauggccuggggcggcagcuacaucgcccuggacuccgggcggggcaagugggacugcaucaucaccagcuaccaguaccugaucauccagaacaccacgugggaggaccacugccaguucucccgccccagccccaucggguaccucggccugcugucccagcggacccgcgacaucuacaucagccggcgccuccugggcaccuucaccuggacgcugagcgacuccgaggggaaggacaccccgggcggguacugccucacccgguggaugcugaucgaggcggagcugaagugcuucggcaacaccgccguggccaagugcaacgagaagcacgacgaggaguucugcgacaugcuccgccuguucgacuucaacaagcaggccauccagcggcugaaggccgaggcgcagaugagcauccagcucaucaacaaggccgugaacgcccugaucaacgaccagcugaucaugaagaaccaccuccgcgacaucauggggauccccuacugcaacuacuccaaguacugguaccugaaccacacgaucaccggcaagaccagccugccccggugcuggcucgucuccaacggcagcuaccugaacgagacccgcuucuccgacgacaucgagcagcaggccgacaacaugaucacggagaugcugcagaaggaguacauggagcggcaggggaagacgccccucggccugguggaccuguucguguucagcaccuccuucuaccugaucagcaucuuccuccaccuggucaagaucccgacccaccgccacaucguggggaagcccugccccaagccccaccggcugaaccacaugggcaucugcuccugcgggcucuacaagcagccgggcgugcccgucaaguggaagcgcuga

SEQ ID NO: 694 - RNA, 1476 nt, Artificial Sequence
  derived and/or modified protein sequence (opt1) from LASV(G2230-SLE-2012;Clade IV)__AIT17246__GPC
augggccagaucgugaccuucuuccaggaggucccccacgugaucgaggaggugaugaacaucguccugaucgcccucagccugcuggccgugcucaaggggcuguacaacguggcgaccugcggccugaucgggcucaucacguuccugcugcucugcggccgcuccugcaccaccaaccuguacaagggggucuacgagcugcagacccucgagcugaacauggagacgcugaacaugaccaugccgcucagcugcaccaagaacuccagccaccacuacaucauggugggcaacgagaccggccuggagcugacgcucaccaacaccuccaucaucaaccacaaguucugcaaccugagcgacgcccacaagaagaaccuguacgaccacacccucauguccaucaucagcacguuccaccuguccauccccaacuucaaccaguacgaggccaugagcugcgacuucaacgggggcaagaucuccgugcaguacaaccugagccacuccuacgccgucgacgccgcgaaccacugcgggaccguggccaacggcauccuccagaccuucaugcggauggccuggggcgggagcuacaucgcccuggacuccggccgcgggaacugggacugcaucaugaccagcuaccaguaccugaucauccagaacacgaccugggaggaccacugccaguucucccggcccagccccaucggcuaccucgggcugcugucccagcgcacccgggacaucuacaucagccgccggcuccugggcaccuucacguggacccugagcgacuccgagggcaacgacacccccgggggcuacugccucacccgcuggaugcugaucgaggcggagcugaagugcuucgggaacacggccguggccaagugcaacgagaagcacgacgaggaguucugcgacaugcuccggcuguucgacuucaacaagcaggccauccagcgccugaaggccgaggcgcagaugagcauccagcucaucaacaaggccgucaacgcccugaucaacgaccagcugaucaugaagaaccaccuccgggacaucaugggcauccccuacugcaacuacuccaaguacugguaccugaaccacaccaccaccgggaagacgagccugcccaagugcuggcucguguccaacggcagcuaccugaacgagacccacuucuccgacgacaucgagcagcaggccgacaacaugaucaccgagaugcugcagaaggaguacauggagcgccagggcaagaccccgcucgggcugguggaccuguucgucuucagcacguccuucuaccugaucagcaucuuccuccaccuggugaagaucccgacccaccggcacaucgugggcaagcccugccccaagccccaccgccugaaccacauggggaucugcuccugcggccucuacaagcagccggggguccccgugcgguggaagcgcuga

SEQ ID NO: 695 - RNA, 1476 nt, Artificial Sequence
  derived and/or modified protein sequence (opt1) from LASV(G2259-SLE-2012;Clade IV)__AIT17250__GPC
augggccagaucgugaccuucuuccaggaggucccccacgugaucgaggaggugaugaacaucguccugaucgcccucagccugcuggccgugcucaaggggcuguacaacguggcgaccugcggccugaucgggcucgucacguuccugcugcucugcggccgcuccugcaccaccaaccuguacaaggggguguacgagcugcagacccucgagcugaacauggagacgcugaacaugaccaugccgcucagcugcaccaagaacaacucccaccacuacaucauggugggcaacgagaccggccuggagcugacgcucaccaacaccagcaucaucaaccacaaguucugcaaccuguccgacgcccacaagaagaaccuguacgaccacacccucaugagcaucaucuccacguuccaccugagcauccccaacuucaaccaguacgaggccauguccugcgacuucaacgggggcaagaucagcguccaguacaaccugucccacagcuacgccguggacgccgcgaaccacugcgggaccguggccaacggcguccuccagaccuucaugcggauggccuggggcggguccuacaucgcccuggacagcggccgcgggaacugggacugcaucaugaccuccuaccaguaccugaucauccagaacacgaccugggaggaccacugccaguucagccggcccucccccaucggcuaccucgggcugcugagccagcgcacccgggacaucuacaucucccgccggcuccugggcaccuucacguggacccugagcgacagcgagggcaacgacacccccgggggcuacugccucacccgcuggaugcugaucgaggcggagcugaagugcuucgggaacacggccguggccaagugcaacgagaagcacgacgaggaguucugcgacaugcuccggcuguucgacuucaacaagcaggccauccagcgccugaaggccgaggcgcagauguccauccagcucaucaacaaggccgugaacgcccugaucaacgaccagcugaucaugaagaaccaccuccgggacaucaugggcauccccuacugcaacuacagcaaguacugguaccugaaccacaccaccaccgggaagacgucccugcccaagugcuggcucgucagcaacggcuccuaccugaacgagacccacuucagcgacgacaucgagcagcaggccgacaacaugaucaccgagaugcugcagaaggaguacauggagcgccagggcaagaccccgcucgggcugguggaccuguucguguucuccacgagcuucuaccugaucuccaucuuccuccaccuggucaagaucccgacccaccggcacaucgugggcaagcccugccccaagccccaccgccugaaccacauggggaucugcagcugcggccucuacaagcagccgggggugcccguccgguggaagcgcuga

SEQ ID NO: 696 - RNA, 1476 nt, Artificial Sequence
  derived and/or modified protein sequence (opt1) from LASV(G2263-SLE-2012;Clade IV)__AIT17254__GPC
augggccagaucgugaccuucuuccaggaggucccccacgugaucgaggaggugaugaacaucguccugaucgcccucagcauccuggccgugcugaaggggcucuacaacuucgcgaccugcggcaucguggggcuggucacguuccugcuccugugcggccgcuccugcaccaccagccuguacaaggggguguacgagcuccagacccuggagcugaacauggagacgcucaacaugaccaugccgcuguccugcaccaagaacaacagccaccacuacaucauggugggcaacgagaccggccuggagcucacgcugaccaacaccuccaucaucaaccacaaguucugcaaccugagcgacgcccacaagaagaaccucuacgaccacgcccugauguccaucaucagcaccuuccaccuguccauccccaacuucaaccaguacgaggccaugagcugcgacuucaacgggggcaagaucuccguccaguacaaccucagccacuccuacgccggggacgcggccaaccacugcggcacgguggccaacggggugcugcagaccuucaugcggauggccuggggcggcagcuacaucgcgcuggacuccgggcgcgaccggugggacugcaucaugaccagcuaccaguaccucaucauccagaacaccacgugggaggaccacugccaguucucccgccccagccccaucggcuaccuggggcugcucucccagcggacccgcgacaucuacaucagccggcgccugcugggcaccuucaccuggacgcucagcgacuccgagggcaagaacacccccgggggcuacugccugacccgguggaugcugaucgaggccgagcucaagugcuucgggaacaccgccgucgccaagugcaacgagaagcacgacgaggaguucugcgacaugcugcgccuguucgacuucaacaagcaggccauccagcggcucaaggcggaggcccagaugagcaucucccugaucaacaaggccgugaacgcccugaucaacgaccagcucaucaugaagaaccaccuccgcgacaucaugggcauccccuacugcaacuacagcaaguacugguaccugaaccacacgaccaccgggaagaccucccugccccggugcuggcuggugagcaacggcuccuaccugaacgagacgcacuucagcgacgacaucgagcagcaggccgacaacaugaucaccgagaugcuccagaaggaguacauggaccgccagggcaagaccccgcuggggcuggucgaccucuucguguucuccaccagcuucuaccugaucuccaucuuccugcaccuggugaagaucccgacgcaccggcacaucgucggcaagaccugccccaagccccaccgccucaaccacauggggaucugcagcugcggccuguacaagcagcccggggugccggugaaguggaagcgguga

SEQ ID NO: 697 - RNA, 1476 nt, Artificial Sequence
  derived and/or modified protein sequence (opt1) from LASV(G2280-SLE-2012;Clade IV)__AIT17258__GPC
augggccagaucgugaccuucuuccaggaggucccccacgugaucgaggaggugaugaacaucguccugaucgcccucagcauccuggccgugcugaaggggcucuacaacaucgcgaccugcggccugguggggcuggucaccuuccuccugcugugcggccgcuccugcaccaccagccucuacaaggggguguacgagcugcagacccuggagcucaacauggagacgcugaacaugaccaugccgcuguccugcaccaagaacaacagccaccacuacaucauggugggcaacgagaccggccucgagcugacgcugaccaacaccuccaucaucaaccacaaguucugcaaccucagcgacgcccacaagaagaaccuguacgaccacgcccugauguccaucgucagcaccuuccaccucuccauccccaacuucaaccaguacgaggccaugagcugcgacuucaacgggggcaagaucuccgugcaguacaaccugagccacuccuacgccguggacgcggccaaccacugcgggacggucgccaacggcgugcugcagaccuucaugcggauggccuggggcgggagcuacaucgcgcucgacuccggccgcgggggcugggacugcaucaugaccagcuaccaguaccugaucauccagaacgugaccugggaggaccacugccaguucucccggcccagccccaucggguaccugggccuccugucccagcgcacgcgggacgucuacaucagccgccggcugcucggcaccuucaccuggacccugagcgacuccgaggggaacgacacgccgggcggguacugccugacccgcuggaugcucaucgaggccgagcugaagugcuucggcaacaccgccguggccaagugcaacgagaagcacgacgaggaguucugcgacaugcugcggcuguucgacuucaacaagcaggccauccagcgccugaaggcggaggcccagaugagcauccagcugaucaacaaggccgugaacgcccucaucaacgaccagcugaucaugaagaaccaccuccgggacaucauggggauccccuacugcaacuacuccaaguacugguaccucaaccacaccacgaccggcaagaccagccugcccaagugcuggcuggucuccaacggcagcuaccucaacgagacccacuucuccgacgacaucgagcagcaggccgacaacaugaucacggagaugcugcagaaggaguacauggagcgccaggggaagacgccccugggccucguggaccuguucguguucagcaccuccuucuaccugaucagcaucuuccugcaccucgucaagaucccgacccaccggcacaucguggggaagcccugccccaagccccaccgccugaaccacaugggcaucugcuccugcgggcuguacaagcagccgggcgugcccgucaaguggaagcgguga

SEQ ID NO: 698 - RNA, 1476 nt, Artificial Sequence
  derived and/or modified protein sequence (opt1) from LASV(G2295-SLE-2012;Clade IV)__AIT17262__GPC
augggccagaucgugaccuucuuccaggaggucccccacgugaucgaggaggugaugaacaucguccugaucgcccucagcauccuggccgugcugaaggggcucuacaaccuggcgaccugcggccugguggggcucgucacguuccugcugcucugcggccgcuccugcaccaccagccuguacaaggggguguacgagcugcagacccucgagcugaacauggagacgcugaacaugaccaugccgcucuccugcaccaagaacaacagccaccacuacaucauggugggcaacgagaccggccuggagcugacgcucaccaacaccuccaucaucaaccacaaguucugcaaccugagcgacgcccacaagaagaaccuguacgaccacgcccucauguccaucaucagcaccuuccaccuguccauccccaacuucaaccaguacgaggccaugagcugcgacuucaacgggggcaagaucuccguccaguacaaccugagccacuccuacgccggggacgcggccacgcacugcggcaccguggccaacggggugcuccagaccuucaugcggauggccuggggcggcagcuacaucgcgcuggacuccgggcgcggcaagugggacugcaucaugaccagcuaccaguaccugaucauccagaacacgaccugggaggaccacugccaguucucccggcccagccccaucggguaccucggccugcugucccagcgcacccgggacaucuacaucagccgccggcuccugggcaccuucacguggacccugagcgacuccgaggggaaggacaccccgggcggguacugccucacccgcuggaugcugaucgaggccgagcugaagugcuucggcaacacggccgucgccaagugcaacgagaagcacgacgaggaguucugcgacaugcuccggcuguucgacuucaacaagcaggccauccagcgccugaagaccgaggcgcagaugagcauccagcucaucaacaaggccgugaacgcccugaucaacgaccagcugaucaugaagaaccaccuccgggacaucauggggauccccuacugcaacuacuccaaguacugguaccugaaccacaccaccacgggcaagaccagccugccccgcugcuggcucguguccaacggcagcuaccugaacgagacccacuucuccgacgacaucgagcagcaggccgacaacaugaucaccgagaugcugcagaaggaguacauggagcggcaggggaagacgccccucggccuggucgaccuguucguguucagcaccuccuucuaccugaucagcaucuuccuccaccuggugaagaucccgacccaccgccacaucgucgggaagcccugccccaagccccaccggcugaaccacaugggcaucugcuccugcgggcucuacaagcagccgggcgugcccgugaaguggaagcgcuga

SEQ ID NO: 699 - RNA, 1476 nt, Artificial Sequence
  derived and/or modified protein sequence (opt1) from LASV(G2315-SLE-2012;Clade IV)__AIT17266__GPC
augggccagaucgugaccuucuuccaggaggucccccacgugaucgaggaggugaugaacaucguccugaucgcccucagcauccuggccgugcugaaggggcucuacaaccuggcgaccugcggccugguggggcucgucacguuccugcugcucugcggccgcuccugcaccaccagccuguacaaggggguguacgagcugcagacccucgagcugaacauggagacgcugaacaugaccaugccgcucuccugcaccaagaacaacagccaccacuacaucauggugggcaacgagaccggccuggagcugacgcucaccaacaccucccugaucaaccacaaguucugcaaccugagcgacgcccacaagaagaaccucuacgaccacgcccugauguccaucaucagcaccuuccaccuguccauccccaacuucaaccaguacgaggccaugagcugcgacuucaacgggggcaagaucuccguccaguacaaccucagccacuccuacgccguggacgcggccaaccacugcgggacgguggccaacggcguccugcagaccuucaugcggauggccuggggcgggagcuacaucgcgcuggacuccggccgcgggggcugggacugcaucaugaccagcuaccaguaccucaucauccagaacaccacgugggaggaccacugccaguucucccggcccagccccaucggguaccugggccugcucucccagcgcacccgggacaucuacaucagccgccggcugcugggcaccuucaccuggacgcucagcgacuccgaggggaaggacaccccgggcggguacugccugacccgcuggaugcugaucgaggccgagcucaagugcuucggcaacaccgccguggccaagugcaacgagaagcacgacgaggaguucugcgacaugcugcggcuguucgacuucaacaagcaggccauccagcgccucaaggcggaggcccagaugagcauccagcugaucaacaaggccgugaacgcccugaucaacgaccagcucaucaugaagaaccaccuccgggacaucauggggauccccuacugcaacuacuccaaguacugguaccugaaccacacgaccaccggccgcaccagccugccccggugcuggcuggucuccaacggcagcuaccugaacgagacgcacuucuccgacgacaucgagcagcaggccgacaacaugaucaccgagaugcuccagaaggaguacauggagcgccaggggaagacgccccugggccugguggaccuguucguguucagcaccuccuucuaccucaucagcaucuuccugcaccuggucaagaucccgacccaccggcacaucguggggaaguccugccccaagccccaccgccucaaccacaugggcaucugcagcugcgggcuguacaagcagcccggcgugccggucaaguggaagcgguga

SEQ ID NO: 700 - RNA, 1476 nt, Artificial Sequence
  derived and/or modified protein sequence (opt1) from LASV(G2318-SLE-2012;Clade IV)__AIT17270__GPC
augggccagaucgugaccuucuuccaggaggucccccacgugaucgaggaggugaugaacaucguccugaucgcccucagcgugcuggccgugcugaaggggcucuacaacuucgcgaccugcggccuggucgggcuggugaccuuccuccugcugugcggccgcuccugcagcaccuccguguacaagggggucuacgagcuccagacccuggagcugaacauggagacccucaacaugacgaugccgcugagcugcaccaagaacaacucccaccacuacaucauggugggcaacgagaccggccuggagcucacccugacgaacaccagcaucaucaaccacaaguucugcaaccuguccgacgcccacaagaagaaccucuacgaccacgcccugaugagcaucaucuccaccuuccaccugagcauccccaacuucaaccaguacgaggccauguccugcgacuucaacgggggcaagaucagcgugcaguacaaccucucccacagcuacgccgucgacgcggccaaccacugcgggaccguggccaacggcgugcugcagacguucaugcggauggccuggggcggguccuacaucgcgcuggacagcggccacgggggcugggacugcaucaugaccaacuaccaguaccucaucauccagaacaccaccugggaggaccacugccaguucucccgccccagccccaucggguaccugggccugcucucccagcggacgcgcgacaucuacaucagccggcgccugcugggcaccuucaccuggacccucagcgacuccgaggggaaggacacgccgggcggguacugccugacccgguggaugcugaucgaggccgagcucaagugcuucggcaacaccgccgucgccaagugcaacgagaagcacgacgaggaguucugcgacaugcugcgccuguucgacuucaacaagcaggccauccagcggcucaaggcggaggcccagaugagcauccagcugaucaacaaggccgugaacgcccugaucaacgaccagcucaucaugaagaaccaccuccgcgacaucauggggauccccuacugcaacuacuccaaguacugguaccugaaccacaccacgaccggccggaccagccugcccaagugcuggcugguguccaacggcagcuaccugaacgagacccacuucuccgacgacaucgagcagcaggccgacaacaugaucacggagaugcuccagcgcgaguacauggagcggcaggggaagacgccccugggccuggucgaccucuucguguucagcaccuccuucuaccugaucagcaucuuccugcaccuggugaagaucccgacccaccgccacaucgucgggaaguccugccccaagccccaccggcucaaccacaugggcaucugcagcugcgggcuguacaagcagcccggcgugccggugaaguggaagcgcuga

SEQ ID NO: 701 - RNA, 1476 nt, Artificial Sequence
  derived and/or modified protein sequence (opt1) from LASV(G2363-SLE-2012;Clade IV)__AIT17274__GPC
augggccagaucgugaccuucuuccaggaggucccccacgugaucgaggaggugaugaacaucguccugaucgcccucagcauccuggccgugcugaaggggcucuacaacguggcgaccugcggccugacggggcuggucgccuuccuccugcugugcggccgcuccugcaccaccacccucuacaaggggguguacgagcugcaggcccuggagcucaacauggagacgcugaacaugaccaugccgcugagcugcaccaagaacaacucccaccacuacauccgggugggcaacgagaccggccucgagcugacgcugaccaacaccagcaucaucgagcaccgcuucugcaaccucuccgacgcccacaagaagaaccuguacgaccacgcccugaugagcaucaucuccaccuuccaccucagcauccccaacuucaaccaguacgaggcgauguccugcgacuucaacgggggcaagaucagcguccaguacaaccugucccacagcuacgccguggacgccgccaaccacugcgggacgguggcgaacggcguccugcagaccuucaugcggauggccuggggcggguccuacaucgcccucgacagcggccgcaacgggugggacugcaucaugaccuccuaccaguaccugaucauccagaacaccacgugggaggaccacugccaguucagccggcccucccccaucggcuaccuggggcuccugagccagcgcacccgggacaucuacaucucccgccggcugcucggcaccuucaccuggacgcugagcgacagcgagggcaaggacacccccgggggcuacugccugacccgcuggaugcucaucgaggccgagcugaagugcuucgggaacaccgccguggcgaagugcaacgagaagcacgacgaggaguucugcgacaugcugcggcuguucgacuucaacaagcaggccauccagcgccugaaggccgaggcccagauguccauccagcugaucaacaaggccgugaacgcgcucaucaacgaccagcugaucaugaagaaccaccuccgggacaucaugggcauccccuacugcaacuacagcaaguacugguaccucaacaacacggccaccgggaagaccucccugccccgcugcuggcuggucagcaacggcuccuaccucaacgagacccacuucagcgacgacaucgagcagcaggccgacaacaugaucacggagaugcugcagaaggaguacauggagcggcagggcaagaccccgcuggggcucguggaccuguucguguucuccaccagcuucuaccugaucuccaucuuccugcaccucgucaagaucccgacccaccgccacaucgugggcaagcccugccccaagccccaccggcugaaccacauggggaucugcagcugcggccuguacaagcagccgggggcccccgugcgcuggaagcgguga

SEQ ID NO: 702 - RNA, 1476 nt, Artificial Sequence
  derived and/or modified protein sequence (opt1) from LASV(G2384-SLE-2012;Clade IV)__AIT17276__GPC
augggccagaucgugaccuucuuccaggaggucccccacgugaucgaggaggugaugaacaucguccugaucgcccucagcauccuggccgugcugaaggggcucuacaacuucgcgaccugcggccugguggggcuggucacguuccuccugcugugcggccgcuccugcaccaccagccucuacaaggggguguacgagcugcagacccuggagcucaacauggagacgcugaacaugaccaugccgcuguccugcaccaagaacaacagccaccacuacaucauggugggcaacgagaccggccucgagcugacgcugaccaacaccuccaucaucaaccacaaguucugcaaccucagcgacgcccacaagaagaaccuguacgaccacgcccugauguccaucaucagcaccuuccaccucuccauccccaacuucaaccaguacgaggccaugagcugcgacuucaacgggggcaagaucuccguccaguacaaccugagccacuccuacgccggggacgcggccaaccacugcggcacgguggccaacggggugcugcagaccuucaugcggauggccuggggcggcagcuacaucgcgcucgacuccgggcacggcaagugggacugcaucaugaccagcuaccaguaccugaucauccagaacaccacgugggaggaccacugccaguucucccgccccagccccaucggguaccugggccuccugucccagcggacccgcgacaucuacaucagccggcgccugcucggcaccuucaccuggacgcugagcgacuccgaggggaaggacaccccgggcggguacugccugacccgguggaugcucaucgaggccgagcugaagugcuucggcaacaccgccgucgccaagugcaacgagaagcacgacgaggaguucugcgacaugcugcgccucuucgacuucaacaagcaggccauccagcggcugaaggcggaggcccagaugagcauccagcugaucaacaaggccgugaacgcccucaucaacgaccagcugaucaugaagaaccaccuccgcgacaucauggggauccccuacugcaacuacuccaaguacugguaccugaaccacacgaccaccggcaagaccagccugcccaagugcuggcugguguccaacggcagcuaccucaacgagacgcacuucuccgacgacaucgagcagcaggccgacaacaugaucaccgagaugcugcagaaggaguacauggagcggcaggggaagacgccccugggccucgucgaccuguucguguucagcaccuccuucuaccugaucagcaucuuccugcaccucgugaagaucccgacccaccgccacaucgucgggaaguccugccccaagccccaccggcugaaccacaugggcaucugcagcugcgggcuguacaagcagcccggcgugccggugcgcuggaagcgguga

SEQ ID NO: 703 - RNA, 1473 nt, Artificial Sequence
  derived and/or modified protein sequence (opt1) from LASV(G2392-SLE-2012;Clade IV)__AIT17280__GPC
augggccagaucgugaccuucuuccaggaggucccccacgugaucgaggaggugaugaacaucguccugaucgcccucagcauccuggccgugcugaaggggcucuacaacuucgcgaccugcggccugguggggcuggucacguuccuccugcugugcggccgcuccugcaccaccagccucuacaaggggguguacgagcugcagacccuggagcucaacauggagacgcugaacaugaccaugccgcuguccugcaccaagaacaacagccaccacuacauccgggugggcaacgagaccggccucgagcugacgcugaccaacaccuccaucaucgaccacaaguucugcaaccucagcgacgcccacaagaagaaccuguacgaccacgcccugauguccaucaucagcaccuuccaccucuccauccccaacuucaaccaguacgaggccaugagcugcgacuucaacgggggcaagaucuccguccaguacaaccugagccacuccuacgccggggacgcggccaaccacugcggcacgguggccaacggggugcugcagaccuucaugcgcauggccuggggcggcagcuacaucgcgcucgacuccgggcacgagugggacugcaucaugaccagcuaccaguaccugaucauccagaacaccacgugggacaaccacugccaguucucccggcccagccccaucggcuaccuggggcuccugucccagcgcacccgggacaucuacaucagccgccggcugcucggcaccuucaccuggacgcugagcgacuccgagggcaaggacacccccgggggcuacugccugacccgcuggaugcucaucgaggccgagcugaagugcuucgggaacaccgccgucgccaagugcaacgagaagcacgacgaggaguucugcgacaugcugcggcuguucgacuucaacaagcaggccauccagcgccugaagguggaggcgcagaugagcauccagcugaucaacaaggccgugaacgcccucaucaacgaccagcugaucaugaagaaccaccuccgggacaucaugggcauccccuacugcaacuacuccaaguacugguaccucaaccacacgaccaccgggaagaccagccugcccaagugcuggcuggucuccaacggcagcuaccucaacgagacgcacuucuccgacgacaucgagcagcaggccgacaacaugaucaccgagaugcugcagaaggaguacauggagcgccagggcaagaccccgcuggggcucguggaccuguucguguucagcaccuccuucuaccugaucagcaucuuccugcaccucgucaagaucccgacgcaccggcacaucgugggcaaguccugccccaagccccaccgccugaaccacauggggaucugcagcugcggcuucuacaagcagcccggggugccggucaaguggaagcgguga

SEQ ID NO: 704 - RNA, 1476 nt, Artificial Sequence
  derived and/or modified protein sequence (opt1) from LASV(G2405-SLE-2012;Clade IV)__AIT17284__GPC
augggccagaucgugaccuucuuccaggaggucccccacgugaucgaggaggugaugaacaucguccugaucgcccucagcgugcuggccgugcugaaggggcucuacaacuucgcgaccugcggcaucgucgggcuggugacguuccugcuccugugcggccgcuccugcaccaccagccuguacaaggggguguacgagcuccagacccuggagcugaacauggagacgcucaacaugaccaugccgcuguccugcaccaagaacaacagccaccacuacaucauggucggcaacgacaccggccuggagcucacgcugaccaacaccuccaucaucaaccacaaguucugcaaccugagcgacgcccacaagaagaaccucuacgaccacgcccugauguccaucaucagcaccuuccaccuguccauccccaacuucaaccaguacgaggccaugagcugcgacuucaacgggggcaagaucuccgugcaguacaaccucagccacuccuacgccggggacgcggccgaccacugcggcacgguggccaacgggguccugcagaccuucaugcggauggccuggggcggcagcuacaucgcgcuggacuccgggcgcggccggugggacugcaucaugaccagcuaccaguaccucaucauccagaacaccacgugggaggaccacugccaguucucccgccccagccccaucggguaccugggccugcucucccagcggacccgcgacaucuacaucagccggcgccugcugggcaccuucaccuggacgcucagcgacuccgaggggaaggacaccccgggcggguacugccugacccgguggaugcugaucgaggccgagcucaagugcuucggcaacaccgccguggccaagugcaacgagaagcacgacgaggaguucugcgacaugcugcgccuguucgacuucaacaagcaggccauccagcggcucaaggcggaggcccagaugagcauccagcugaucaacaaggccgugaacgcccugaucaacgaccagcucaucaugaagaaccaccuccgcgacaucauggggauccccuacugcaacuacuccaaguacugguaccugaaccacacgaccaccggcaagaccagccugcccaagugcuggcuggucuccaacggcagcuaccugaacgagacgcacuucuccgacgacaucgagcagcaggccgacaacaugaucaccgagaugcuccagaaggaguacauggagcggcaggggaagacgccccugggccugguggaccucuucguguucagcaccuccuucuaccugaucagcaucuuccugcaccuggucaagaucccgacccaccgccacaucguggggaagcccugccccaagccccaccggcucaaccacaugggcaucugcuccugcgggcuguacaagcagccgggcgugcccgucaaguggaagcgcuga

SEQ ID NO: 705 - RNA, 1476 nt, Artificial Sequence
  derived and/or modified protein sequence (opt1) from LASV(G2427-SLE-2012;Clade IV)__AIT17288__GPC
augggccagaucgugaccuucuuccaggaggucccccacgugaucgaggaggugaugaacaucguccugaucgcccucagcauccuggccgugcugaaggggcucuacaacuucgcgaccugcggccugguggggcuggucaccuuccuccugcugugcggccgcuccugcaccaccagccucuacaaggggguguacgagcugcagacccuggagcucaacauggagacgcugaacaugaccaugccgcuguccugcaccaagaacaacagccaccacuacaucauggugggcaacgagaccggccucgagcugacgcugaccaacaccuccaucaucaaccacaaguucugcaaccucagcgacgcccacaagaagaaccuguacgaccacgcccugauguccaucaucagcaccuuccaccucuccauccccaacuucaaccaguacgaggccaugagcugcgacuucaacgggggcaagaucuccguccaguacaaccugagccacuccuacgccguggacgcggccaaccacugcgggacgguggccaacggcguccugcagaccuucaugcggauggccuggggcgggggcuacaucgcgcucgacagcgggcgcggcaacugggacugcaucaugaccuccuaccaguaccugaucauccagaacaccacgugggaggaccacugccaguucagccggcccucccccaucggguaccugggccuccugagccagcgcacccgggacaucuacaucucccgccggcugcucggcaccuucaccuggacgcugagcgacagcgaggggaaggacaccccgggcggguacugccugacccgcuggaugcucaucgaggccgagcugaagugcuucggcaacaccgccguggccaagugcaacgagaagcacgacgaggaguucugcgacaugcugcggcuguucgacuucaacaagcaggccauccagcgccugaaggcggaggcccagauguccauccagcugaucaacaaggccgugaacgcccucaucaacgaccagcugaucaugaagaaccaccuccgggacaucauggggauccccuacugcaacuacagcaaguacugguaccucaaccacacggucaccggcaagaccucccugcccaagugcuggcuggugagcaacggcuccuaccucaacgagacccacuucagcgacgacaucgagcagcaggccgacaacaugaucacggagaugcugcagaaggaguacauggagcgccaggggaagacgccccugggccucguggaccuguucgucuucuccaccagcuucuaccugaucuccaucuuccugcaccucgugaagaucccgacccaccggcacaucgugggcaagagcugccccaagccccaccgccugaaccacauggggaucugcuccugcgggcuguacaagcagcccggcgucccggugcgguggaagcgcuga

SEQ ID NO: 706 - RNA, 1476 nt, Artificial Sequence
  derived and/or modified protein sequence (opt1) from LASV(G2431-SLE-2012;Clade IV)__AIT17292__GPC
augggccagaucgugaccuucuuccaggaggucccccacgugaucgaggaggugaugaacaucguccugaucgcccucagcaucauggccgugcugaaggggcuguacaacaucgcgaccugcggccucguggggcuggucacguuccugcuccugugcggccgcuccugcaccaccacccuguacaaggggguguacgagcuccagacgcuggagcugaacauggagacccucaacaugaccaugccgcugagcugcaccaagaacaacucccaccacuacaucauggugggcaacgagacgggccuggagcucacccugaccaacaccagcaucaucaaccacaaguucugcaaccuguccgacgcccacaagaagaaccucuacgaccacgcccugaugagcaucaucuccacguuccaccugagcauccccaacuucaaccaguacgaggccauguccugcgacuucaacgggggcaagaucagcguccaguacaaccucucccacagcuacgccggggacgcggccaaccacugcggcaccguggccaacggggugcugcagaccuucaugcggauggccuggggcggcuccuacaucgcgcuggacagcgggcacggcgggugggacugcaucaugaccuccuaccaguaccucaucauccagaacacgaccugggaggaccacugccaguucacccgccccagccccaucggcuaccugggccugcucucccagcggacccgcgacaucuacaucagccggcgccugcuggggacguucaccuggacccucuccgacagcgagggcaacgacacccccgggggcuacugccugacgcgguggaugcugaucgaggccgagcucaagugcuucgggaacaccgccgucgccaagugcaacgagaagcacgacgaggaguucugcgacaugcugcgccuguucgacuucaacaagcaggccauccagcggcuccgcgcggaggcccagaugagcauccagcugaucaacaaggccgugaacgcccugaucaacgaccagcucaucaugaagaaccaccuccgggacaucaugggcaucccguacugcaacuacuccaaguacugguaccugaaccacaccaccacgggccgcaccagccugccccggugcuggcugguguccaacgggagcuaccugaacgagacccacuucuccgacgacaucgagcagcaggccgacaacaugaucaccgagaugcuccagaaggaguacauggagcgccagggcaagacgccccuggggcuggucgaccucuucguguucagcaccuccuucuaccugaucagcaucuuccugcaccugaucaagaucccgacccaccggcacaucgugggcaagcccugccccaagccccaccgccucaaccacaugggggucugcuccugcggccuguacaagcagccgggcgugcccgugcgguggaagcgcuga

SEQ ID NO: 707 - RNA, 1476 nt, Artificial Sequence
  derived and/or modified protein sequence (opt1) from LASV(G2511-SLE-2012;Clade IV)__AIT17294__GPC
augggccagaucgugaccuucuuccaggaggucccccacgugaucgaggaggugaugaacaucguccugaucgcccucagcauccuggccgugcugaaggggcucuacaaccuggcgaccugcggccugguggggcucgucacguuccugcugcucugcggccgcuccugcaccaccagccuguacaaggggguguacgagcugcagacccucgagcugaacauggagacgcugaacaugaccaugccgcucuccugcaccaagaacaacagccaccacuacaucauggugggcaacgagaccggccuggagcugacgcucaccaacaccuccaucaucgaccacaaguucugcaaccugagcgacgcccacaagaagaaccuguacgaccacgcccucauguccaucaucagcaccuuccaccuguccauccccaacuucaaccaguacgaggccaugagcugcgacuucaacgggggcaagaucuccguccaguacaaccugagccacuccuacgccggggacgcggccaaccacugcggcacgguggccaacggggugcuccagaccuucaugcggauggccuggggcggcagcuacaucgcgcuggacuccgggcgcggcgggugggacugcaucaugaccagcuaccaguaccugaucauccagaacaccacgugggaggaccacugccaguucucccggcccagccccgucggcuaccucggccugcugucccagcgcacccgggacaucuacaucagccgccggcuccuggggaccuucaccuggacgcugagcgacuccgagggcaaggacacccccgggggcuacugccucacccgcuggaugcugaucgaggccgagcugaagugcuucgggaacaccgccguggccaagugcaacgagaagcacgacgaggaguucugcgacaugcuccggcuguucgacuucaacaagcaggccauccagcgccugaagacggaggcgcagaugagcauccagcucaucaacaaggccgugaacgcccugaucaacgaccagcugaucaugaagaaccaccuccgggacaucaugggcauccccuacugcaacuacuccaaguacugguaccugaaccacaccaccaccggcaagacgagccugccccgcugcuggcucgucuccaacgggagcuaccugaacgagacccacuucuccgacgacaucgagcagcaggccgacaacaugaucaccgagaugcugcagaaggaguacauggagcggcagggcaagaccccgcucgggcugguggaccuguucguguucagcacguccuucuaccugaucagcaucuuccuccaccuggucaagaucccgacccaccgccacaucgugggcaagcccugccccaagccccaccggcugaaccacauggggaucugcuccugcggccucuacaagcagccgggcgugcccgucaaguggaagcgcuga

SEQ ID NO: 708 - RNA, 1476 nt, Artificial Sequence
  derived and/or modified protein sequence (opt1) from LASV(G2554-SLE-2012;Clade IV)__AIT17298__GPC
augggccagaucgugaccuucuuccaggaggucccccacgugaucgaggaggugaugaacaucguccugaucgcccucagcauccuggccgugcugaaggggcucuacaacaucgcgaccugcggccugcuggggcucgugugcuuccugcugcucugcggccgcuccugcaccaccagccuguacaagggggucuacgagcugcagacccucgagcugaacauggagacccugaacaugacgaugccgcucuccugcaccaagaacaacagccaccacuacaucauggugggcaacgagaccggccuggagcugacccucacgaacaccuccaucaucaaccacaaguucugcaaccugagcgacgcccacaagaagaaccuguacgaccacgcccucauguccaucaucagcaccuuccaccuguccauccccaacuucaaccaguacgaggccaugagcugcgacuucaacgggggcaagaucuccgugcaguacaaccugagccacuccuacgccgucgacgcggccagccacugcgggaccaucgccaacggcgugcuccagacguucaugcggauggccuggggcggguccuacaucgcgcuggacagcggccacgggggcugggacugcaucaugaccuccuaccaguaccugaucauccagaacaccaccugggaggaccacugccaguucagccgccccucccccaucggguaccucggccugcugagccagcggacgcgcgacaucuacaucagccggcgccuccugggcaccuucaccuggacccuguccgacagcgaggggaaggacacgccgggcggguacugccucacccgguggaugcugaucgaggccgagcugaagugcuucggcaacaccgccguggccaagugcaacgagaagcacgacgaggaguucugcgacaugcuccgccuguucgacuucaacaagcaggccauccagcggcugaaggcggaggcccagauguccauccagcucaucaacaaggccgucaacgcccugaucaacgaccagcugaucaugaagaaccaccuccgcgacaucauggggauccccuacugcaacuacagcaaguacugguaccugaaccacaccacgaccggcaagaccucccugcccaagugcuggcucgugagcaacggcuccuaccugaacgagacccacuucagcgacgacaucgagcagcaggccgacaacaugaucacggagaugcugcagaaggaguacauggagcggcaggggaagacgccccucggccugguggaccuguucgucuucuccaccagcuucuaccugaucuccaucuuccuccaccuggugaagaucccgacccaccgccacguggucgggaagcccugccccaagccccaccggcugaaccacaugggcaucugcagcugcgggcucuacggccagccgggcgugcccgugaaguggaagcgcuga

SEQ ID NO: 709 - RNA, 1476 nt, Artificial Sequence
  derived and/or modified protein sequence (opt1) from LASV(G2557-SLE-2012;Clade IV)__AIT17302__GPC
augggccagaucgugaccuucuuccaggaggucccccacgugaucgaggaggugaugaacaucguccugaucgcccucagccugcuggccgugcucaaggggcuguacaacguggcgaccugcggccugaucgggcucgucacguuccugcugcucugcggccgcuccugcaccaccaaccuguacaaggggguguacgagcugcagacccucgagcugaacauggagacgcugaacaugaccaugccgcucagcugcaccaagaacaacucccaccacuacaucauggugggcaacgagaccggccuggagcugacgcucaccaacaccagcaucaucucccacaaguucugcaaccugagcgacgcccacaagaagaaccuguacgaccacacccucauguccaucaucagcacguuccaccuguccauccccaacuucaaccaguacgaggccaugagcugcgacuucaacgggggcaagaucuccguccaguacaaccugagccacuccuacgccguggacgccgcgaaccacugcgggaccguggccaacggcguccuccagaccuucaugcggauggccuggggcgggagcuacaucgcccuggacuccggccgcgggaacugggacugcaucaugaccagcuaccaguaccugaucauccagaacacgaccugggaggaccacugccaguucucccggcccagccccaucggcuaccucgggcugcugucccagcgcacccgggacaucuacaucagccgccggcuccugggcaccuucacguggacccugagcgacuccgagggcaacgacacccccgggggcuacugccucacccgcuggaugcugaucgaggcggagcugaagugcuucgggaacacggccguggccaagugcaacgagaagcacgacgaggaguucugcgacaugcuccggcuguucgacuucaacaagcaggccauccagcgccugaaggccgaggcgcagaugagcauccagcucaucaacaaggccgugaacgcccugaucaacgaccagcugaucaugaagaaccaccuccgggacaucaugggcauccccuacugcaacuacuccaaguacugguaccugaaccacaccaccaccgggaagacgagccugcccaagugcuggcucgucuccaacggcagcuaccugaacgagacccacuucuccgacgacaucgagcagcaggccgacaacaugaucaccgagaugcugcagaaggaguacauggagcgccagggcaagaccccgcucgggcugguggaccuguucguguucagcacguccuucuaccugaucagcaucuuccuccaccuggucaagaucccgacccaccggcacaucgugggcaagcccugccccaagccccaccgccugaaccacauggggaucugcuccugcggccucuacaagcagccgggggugcccguccgguggaagcgcuga

SEQ ID NO: 710 - RNA, 1476 nt, Artificial Sequence
  derived and/or modified protein sequence (opt1) from LASV(G2587-SLE-2012;Clade IV)__AIT17310__GPC
augggccagaucgugaccuucuuccaggaggucccccacgugaucgaggaggugaugaacaucguccugaucgcccucagcauccuggccgugcugaaggggcucuacaaccuggcgaccugcggccugguggggcucgucacguuccugcugcucugcggccgcuccugcaccaccagccuguacaaggggguguacgagcugcagacccucgagcugaacauggagacgcugaacaugaccaugccgcucuccugcaccaagaacaacagccaccacuacaucauggugggcaacgagaccggccuggagcugacgcucaccaacaccuccaucaucaaccacaaguucugcaaccugagcgacgcccacaagaagaaccuguacgaccacgcccucauguccaucaucagcaccuuccaccuguccauccccaacuucaaccaguacgaggccaugagcugcgacuucaacgggggcaagaucuccguccaguacaaccugagccacuccuacgccggggacgcggccacgcacugcggcaccguggccaacggggugcuccagaccuucaugcggauggccuggggcggcagcuacaucgcgcuggacuccgggcgcggcaagugggacugcaucaugaccagcuaccaguaccugaucauccagaacacgaccugggaggaccacugccaguucucccggcccagccccaucggguaccucggccugcugucccagcgcacccgggacaucuacaucagccgccggcuccugggcaccuucacguggacccugagcgacuccgaggggaaggacaccccgggcggguacugccucacccgcuggaugcugaucgaggccgagcugaagugcuucggcaacacggccgucgccaagugcaacgagaagcacgacgaggaguucugcgacaugcuccggcuguucgacuucaacaagcaggccauccagcgccugaagaccgaggcgcagaugagcauccagcucaucaacaaggccgugaacgcccugaucaacgaccagcugaucaugaagaaccaccuccgggacaucauggggauccccuacugcaacuacuccaaguacugguaccugaaccacaccaccacgggcaagaccagccugccccgcugcuggcucguguccaacggcagcuaccugaacgagacccacuucuccgacgacaucgagcagcaggccgacaacaugaucaccgagaugcugcagaaggaguacauggagcggcaggggaagacgccccucggccuggucgaccuguucguguucagcaccuccuucuaccugaucagcaucuuccuccaccuggugaagaucccgacccaccgccacaucgucgggaagcccugccccaagccccaccggcugaacuacaugggcaucugcuccugcgggcucuacaagcagccgggcgugcccgugaaguggaagcgcuga

SEQ ID NO: 711 - RNA, 1476 nt, Artificial Sequence
  derived and/or modified protein sequence (opt1) from LASV(G2612-SLE-2012;Clade IV)__AIT17314__GPC
augggccagaucgugaccuucuuccaggaggucccccacgugaucgaggaggugaugaacaucguccugaucacccucagcauccuggccgugcugaaggggcucuacaacguggccacgugcggccuggucgggcuggugaccuuccuccugcugugcggccgcuccugcaccaccagccucuacaaggggguguacgagcugcagacgcuggagcucaacauggagacccugaacaugaccaugccgcuguccugcaccaagaacaacagccaccacuacaucauggucggcaacgagacgggccucgagcugacccugaccaacaccuccaucaucaaccacaaguucugcaaccucagcgacgcgcacaagaaggaccuguacgaccacgcccugauguccaucaucagcacguuccaccucuccauccccaacuucaaccaguacgaggccaugagcugcgacuucaacgggggcaagaucuccgugcaguacaaccugagccacuccuacgccguggacgccgcgaaccacugcgggaccgucgccaacggcgugcugcagaccuucaugcggauggccuggggcgggagcuacaucgcccucgacuccggccgcgggggcugggacugcaucaugaccagcuaccaguaccugaucauccagaacacgaccugggaggaccacugccaguucucccggcccagccccaucggguaccugggccuccugucccagcgcacccgggacaucuacaucagccgccggcugcucggcaccuucacguggacccugagcgacuccgaggggaacgacaccccgggcggguacugccugacccgcuggaugcucaucgaggcggagcugaagugcuucggcaacacggccguggccaagugcaacgagaagcacgacgaggaguucugcgacaugcugcggcuguucgacuucaacaagcaggccauccagcgccugaaggccgaggcgcagaugagcauccagcugaucaacaaggccgucaacgcccucaucaacgaccagcugaucaugaagaaccaccuccgggacaucauggggauccccuacugcaacuacuccaaguacugguaccucaaccacaccaccaccggcaagacgagccugcccaagugcuggcugguguccaacggcagcuaccucaacgagacccacuucuccgacgacaucgagcagcaggccgacaacaugaucaccgagaugcugcagaaggaguacauggagcgccaggggaagacgccccugggccucguggaccuguucgucuucagcaccuccuucuaccugaucagcaucuuccugcaccucgugaagaucccgacccaccggcacaucguggggaagcccugccccaagccccaccgccugaaccacaugggcaucugcuccugcgggcuguacaagcagccgggcguccccgugaaguggaagcgguga

SEQ ID NO: 712 - RNA, 1476 nt, Artificial Sequence
  derived and/or modified protein sequence (opt1) from LASV(G2615-SLE-2012;Clade IV)__AIT17318__GPC
augggccagaucgugaccuucuuccaggaggucccccacgugaucgaggaggugaugaacaucguccugaucgcccucagccugcuggccgugcucaaggggcuguacaacguggcgaccugcggccugaucgggcucgucacguuccugcugcucugcggccgcuccugcaccaccaaccuguacaaggggguguacgagcugcagacccucgagcugaacauggagacgcugaacaugaccaugccgcucagcugcaccaagaacaacucccaccacuacaucauggugggcaacgagaccggccuggagcugacgcucaccaacaccagcaucaucaaccacaaguucugcaaccuguccgacgcccacaagaagaaccuguacgaccacgcccucaugagcaucaucuccaccuuccaccugagcauccccaacuucaaccaguacgaggccauguccugcgacuucaacgggggcaagaucagcguccaguacaaccugucccacagcuacgccguggacgcggccaaccacugcgggacgguggccaacggcguccuccagaccuucaugcggauggccuggggcggguccuacaucgcgcuggacagcggccgcgggaacugggacugcaucaugaccuccuaccaguaccugaucauccagaacaucaccugggaggaccacugccaguucagccggcccucccccaucggcuaccucgggcugcugagccagcgcacgcgggacaucuacaucucccgccggcuccugggcaccuucaccuggacccugagcgacagcgagggcaacgacacgcccgggggcuacugccucacccgcuggaugcugaucgaggccgagcugaagugcuucgggaacaccgccguggccaagugcaacgagaagcacgacgaggaguucugcgacaugcuccggcuguucgacuucaacaagcaggccauccagcgccugaaggcggaggcccagauguccauccagcucaucaacaaggccgugaacgcccugaucaacgaccagcugaucaugaagaaccaccuccgggacaucaugggcauccccuacugcaacuacagcaaguacugguaccugaaccacaccacgaccgggaagaccucccugcccaagugcuggcucgucagcaacggcuccuaccugaacgagacccacuucagcgacgacaucgagcagcaggccgacaacaugaucacggagaugcugcagaaggaguacauggagcgccagggcaagaccccgcucgggcugguggaccuguucguguucuccaccagcuucuaccugaucuccaucuuccuccaccuggucaagaucccgacccaccggcacaucgugggcaagcccugccccaagccccaccgccugaaccacauggggaucugcagcugcggccucuacaagcagccgggggugcccguccgguggaagcgcuga

SEQ ID NO: 713 - RNA, 1476 nt, Artificial Sequence
  derived and/or modified protein sequence (opt1) from LASV(G2723-SLE-2012;Clade IV)__AIT17322__GPC
augggccagaucgugaccuucuuccaggaggucccccacgugaucgaggaggugaugaacaucguccugaucgcccucagccugcuggccgugcucaaggggcuguacaacguggcgaccugcggccugaucgggcucgucacguuccugcugcucugcggccgcuccugcaccaccaaccuguacaagggggccuacgagcugcagacccucgagcugaacauggagacgcugaacaugaccaugccgcucagcugcaccaagaacaacucccaccacuacaucauggugggcaacgagaccggccuggagcugacgcucaccaacaccagcaucaucaaccacaaguucugcaaccuguccgacgcccacaagaagaaccuguacgaccacacccucaugagcaucaucuccacguuccaccugagcauccccaacuucaaccaguacgaggccauguccugcgacuucaacgggggcaagaucagcgugcaguacaaccugucccacagcuacgccgucgacgcggccaaccacugcgggaccguggccaacggcgugcuccagaccuucaugcggauggccuggggcggguccuacaucgcgcuggacagcggccgcgggaacugggacugcaucaugaccuccuaccaguaccugaucauccagaacacgaccugggaggaccacugccaguucagccggcccucccccaucggcuaccucgggcugcugagccagcgcacccgggacaucuacaucucccgccggcuccugggcaccuucacguggacccugagcgacagcgagggcaacgacacccccgggggcuacugccucacccgcuggaugcugaucgaggccgagcugaagugcuucgggaacacggccgucgccaagugcaacgagaagcacgacgaggaguucugcgacaugcuccggcuguucgacuucaacaagcaggccauccagcgccugaaggcggaggcccagauguccauccagcucaucaacaaggccgugaacgcccugaucaacgaccagcugaucaugaagaaccaccuccgggacaucaugggcauccccuacugcaacuacagcaaguacugguaccugaaccacaccaccaccgggaagacgucccugcccaagugcuggcucgugagcaacggcuccuaccugaacgagacccacuucagcgacgacaucgagcagcaggccgacaacaugaucaccgagaugcugcagaaggaguacauggagcgccagggcaagaccccgcucgggcuggucgaccuguucguguucuccacgagcuucuaccugaucuccaucuuccuccaccuggugaagaucccgacccaccggcacaucgucggcaagcccugccccaagccccaccgccugaaccacauggggaucugcagcugcggccucuacaagcagccgggggugcccgugcgguggaagcgcuga

SEQ ID NO: 714 - RNA, 1476 nt, Artificial Sequence
  derived and/or modified protein sequence (opt1) from LASV(G2868-SLE-2012;Clade IV)__AIT17328__GPC
augggccagaucgugaccuucuuccaggaggucccccacgugaucgaggaggugaugaacaucguccugaucacccucagcauccuggccgugcugaaggggcucuacaacaucgccacgugcggccugguggggcuggucaccuuccuccugcugugcggcaaguccugcaccaccagccucuacaaggggguguacgagcugcagacgcuggagcucaacauggagacccugaacaugaccaugccgcuguccugcaccaagaacaacagccaccacuacauccgcgugggcaacgagacgggccucgagcugacccugaccaacaccuccaucaucaaccacaaguucugcaaccucagcgacgcgcacaagaagaaccuguacgaccacgcccugauguccaucaucagcacguuccaccucuccauccccaacuucaaccaguacgaggccaugagcugcgacuucaacgggggcaagaucuccguccaguacaaccugagccacuccuacgccguggacgccgcgaaccacugcgggaccguggccaacggcguccugcagaccuucaugcggauggccuggggcgggagcuacaucgcccucgacuccggccacgggaacugggacugcaucaugaccagcuaccaguaccugaucauccagaacacgaccugggaggaccacugccaguucucccgccccagccccaucggcuaccuggggcuccugucccagcggacccgcgacaucuacaucagccggcgccugcucggcaccuucacguggacccugagcgacuccgagggcaacgacgcgcccgggggcuacugccugacccgguggaugcucaucgaggccgagcugaagugcuucgggaacaccgccguggccaagugcaacgagaagcacgacgaggaguucugcgacaugcugcgccucuucgacuucaacaagcaggccauccagcggcugaaggcggaggcccagaugagcauccagcugaucaacaaggccgugaacgcccucaucaacgaccagcugaucaugaagaaccaccuccgcgacaucaugggcauccccuacugcaacuacuccaaguacugguaccugaaccacacgaccaccgggaagaccagccugcccaagugcuggcuggucuccaacggcagcuaccucaacgagacgcacuucuccgacgacaucgagcagcaggccgacaacaugaucaccgagaugcugcagaaggaguacauggagcggcagggcaagaccccgcuggggcucguggaccuguucguguucagcaccuccuucuaccugaucagcaucuuccugcaccucgucaagaucccgacgcaccgccacguggugggcaaguccugccccaagccccaccggcugaaccacauggggaucugcagcugcggccuguacaagcagcccggggucccggugaaguggaagcgcuga

SEQ ID NO: 715 - RNA, 1476 nt, Artificial Sequence
  derived and/or modified protein sequence (opt1) from LASV(G2903-SLE-2012;Clade IV)__AIT17332__GPC
augggccagaucgugaccuucuuccaggaggucccccacgugaucgaggaggugaugaacaucguccugaucgcccucagcauccuggccgugcugaaggggcucuacaaccuggcgaccugcggccugguggggcucgucacguuccugcugcucugcggccgcuccugcaccaccagccuguacaaggggguguacgagcugcagacccucgagcugaacauggagacgcugaacaugaccaugccgcucuccugcaccaagaacaacagccaccacuacauccgggugggcaacgagaccggccuggagcugacgcucaccaacaccuccaucaucaaccacaaguucugcaaccugagcgacgcccacaagaagaaccuguacgaccacgcccucauguccaucaucagcaccuuccaccuguccauccccaacuucaaccaguacgaggccaugagcugcgacuucaacgggggcaagaucuccguccaguacaaccugagccacuccuacgccguggacgcggccaaccacugcgggacgguggccaacggcguccuccagaccuucaugcgcauggccuggggcgggagcuacaucgcgcuggacuccggccacgggcggugggacugcaucaugaccagcuaccaguaccugaucauccagaacaccacgugggaggaccacugccucuucucccgccccagccccaucggcuaccuggggcugcucucccagcggacccgcgacaucuacaucagccggcgccugcugggcaccuucaccuggacgcucagcgacuccgagggccgggacacccccgggggcuacugccugacccgcuggaugcugaucgaggccgagcucaagugcuucgggaacaccgccguggccaagugcaacgagaagcacgacgaggaguucugcgacaugcugcggcuguucgacuucaacaagcaggccauccagcgccucaaggcggaggcccagaugagcauccagcugaucaacaaggccgugaacgcccugaucaacgaccagcucaucaugaagaaccaccuccgggacaucaugggcauccccuacugcaacuacuccaaguacugguaccugaaccacacgaccaccgggcgcaccagccugccccggugcuggcuggucuccaacggcagcuaccugaacgagacgcacuucuccgacgacaucgagcagcaggccgacaacaugaucaccgagaugcuccagaaggaguacauggagcgccagggcaagaccccgcuggggcugguggaccuguucguguucagcaccuccuucuaccucaucagcaucuuccugcaccuggucaagaucccgacgcaccggcacaucgugggcaaguccugccccaagccccaccgccucaaccacauggggaucugcagcugcggccuguacaagcagcccggggugccggucaaguggaagcgguga

SEQ ID NO: 716 - RNA, 1476 nt, Artificial Sequence
  derived and/or modified protein sequence (opt1) from LASV(G2944-SLE-2012;Clade IV)__AIT17340__GPC
augggccagaucgugaccuucuuccaggaggucccccacgugaucgaggaggugaugaacaucguccugaucgcccucagcauccuggccgugcugaaggggcucuacaacuucgcgaccugcggccugguggggcuggucaccuuccuccugcugugcggccgcuccugcaccaccagccucuacaaggggguguacgagcugcagacccuggagcucaacauggagacgcugaacaugaccaugccgcuguccugcaccaagaacaacagccaccacuacaucauggugggcaacgagaccggccucgagcugacgcugaccaacaucuccaucaucaaccacaaguucugcaaccucagcgacgcccacaagaagaaccuguacgaccacgcccugauguccaucaucagcaccuuccaccucuccauccccaacuucaaccaguacgaggccaugagcugcgacuucaacgggggcaagaucuccguccaguacaaccugagccacuccuacgccggggacgcggccaaccacugcggcaccguggccaacggggugcugcagacguucaugcggauggccuggggcggcagcuacaucgcgcucgacuccgggcgcggcgagugggacugcaucaugaccagcuaccaguaccugaucauccagaacaccaccugggaggaccacugccaguucucccggcccagccccaucggguaccugggccuccugucccagcgcacgcgggacaucuacaucagccgccggcugcucggcaccuucaccuggacccugagcgacuccgaggggaaggacacgccgggcggguacugccugacccgcuggaugcucaucgaggccgagcugaagugcuucggcaacaccgccgucgccaagugcaacgagaagcacgacgaggaguucugcgacaugcugcggcuguucgacuucaacaagcaggccauccagcgccugaaggcggaggcccagaugagcauccagcugaucaacaaggccgugaacgcccucaucaacgaccagcugaucaugaagaaccaccuccgggacaucauggggauccccuacugcaacuacuccaaguacugguaccucaaccacaccacgaccggcaagaccagccugcccaagugcuggcugguguccaacggcagcuaccucaacgagacccacuucuccgacgacaucgagcagcaggccgacaacaugaucacggagaugcugcagaaggaguacauggagcgccaggggaagacgccccugggccucgucgaccuguucguguucagcaccuccuucuaccugaucagcaucuuccugcaccucgugaagaucccgacccaccggcacaucgucgggaagcccugcccccgcccccaccggcugaaccacaugggcaucugcuccugcgggcuguacaagcagccgggcgugcccgugaaguggaagcgcuga

SEQ ID NO: 717 - RNA, 1476 nt, Artificial Sequence
  derived and/or modified protein sequence (opt1) from LASV(G3010-SLE-2013;Clade IV)__AIT17344__GPC
augggccagaucgugaccuucuuccaggaggucccccacgugaucgaggaggugaugaacaucguccugaucgcccucagcauccuggccgugcugaaggggcucuacaacuucgcgaccugcggccugguggggcuggucacguuccuccugcugugcggccgcuccugcaccaccagccucuacaaggggguguacgagcugcagacccuggagcucaacauggagacgcugaacaugaccaugccgcuguccugcaccaagaacaacagccaccacuacaucauggugggcaacgagaccggccucgagcugacgcugaccaacaccuccaucaucaaccacaaguucugcaaccucagcgacgcccacaagaagaaccuguacaaccacgcccugauguccaucaucagcaccuuccaccucuccauccccaacuucaaccaguacgaggccaugagcugcgacuucaacgggggcaagaucuccguccaguacaaccugagccacuccuacgccggggacgcggccagccacugcggcacgguggccaacggggugcugcagaccuucaugcggauggccuggggcggcuccuacaucgcgcucgacagcggguacggcaagugggacugcaucaugaccuccuaccaguaccugaucauccagaacaccacgugggaggaccacugccaguucagccgccccucccccaucggguaccugggccuccugagccagcggacccgcgacaucuacaucagccggcgccugcucggcaccuucaccuggacgcuguccgacagcgaggggaaggacaccccgggcggguacugccugacccgguggaugcucaucgaggccgagcugaagugcuucggcaacaccgccgucgccaagugcaacgagaagcacgacgaggaguucugcgacaugcugcgccucuucgacuucaacaagcaggccauccagcggcugaagacggaggcgcagauguccauccagcugaucaacaaggccgugaacgcccucaucaacgaccagcugaucaugaagaaccaccuccgcgacaucauggggauccccuacugcaacuacagcaaguacugguaccugaaccacaccaccaccggcaagacgucccugcccaagugcuggcuggugagcaacggcuccuaccucaacgagacccacuucagcgacgacaucgagcagcaggccgacaacaugaucaccgagaugcugcagaaggaguacauggagcggcaggggaagacgccccugggccucgucgaccuguucguguucuccaccagcuucuaccugaucuccaucuuccugcaccucgugaagaucccgacccaccgccacaucgucggcaagagcugccccaagccccaccggcugaaccacauggggaucugcuccugcgggcuguacaagcagcccggcgugccggugcgcuggaagcgguga

SEQ ID NO: 718 - RNA, 1476 nt, Artificial Sequence
  derived and/or modified protein sequence (opt1) from LASV(G3016-SLE-2013;Clade IV)__AIT17348__GPC
augggccagaucgugaccuucuuccaggaggucccccacgugaucgaggaggugaugaacaucguccugaucgcccucagcauccuggccgugcugaaggggcucuacaacaucgcgaccugcggccugaucgggcuggugacguuccuccugcugugcggccgcuccugcaccaccagccucuacaagggggucuacgagcugcagacccuggagcucaacauggagacgcugaacaugaccaugccgcuguccugcaccaagaacaacagccaccacuacaucauggugggcaacgagaccggccucgagcugacgcugaccaacaccuccaucaucaaccacaaguucugcaaccucagcgacgcccacaagaagaaccuguacgaccacgcccugauguccaucaucagcaccuuccaccucuccauccccaacuucaaccaguacgaggccaugagcugcgacuucaacgggggcaagaucuccgugcaguacaaccugagccacuccuacgccggggacgcggccaaccacugcggcacggucgccaacggggugcugcagaccuucaugcggauggccuggggcggcagcuacaucgcgcucgacuccgggcgcggccggugggacugcaucaugaccagcuaccaguaccugaucauccagaacaccacgugggaggaccacugccaguucucccgccccagccccaucggguaccugggccuccugucccagcggacccgcgacaucuacaucagccggcgccugcucggcaccuucaccuggacgcugagcgacuccgaggggaacgacaccccgggcggguacugccugacccgguggaugcucaucgaggccgagcugaagugcuucggcaacaccgccguggccaagugcaacgagaagcacgacgaggaguucugcgacaugcugcgccucuucgacuucaacaagcaggccauccagcggcugaaggcggaggcccagaugagcauccagcugaucaacaaggccgucaacgcccucaucaacgaccagcugaucaugaagaaccaccuccgcgacaucauggggauccccuacugcaacuacuccaaguacugguaccugaaccacacgaccaccggcaagaccagccugcccaagugcuggcugguguccaacggcagcuaccucaacgagacgcacuucuccgacgacaucgagcagcaggccgacaacaugaucaccgagaugcugcagaaggaguacauggagcggcaggggaagacgccccugggccucguggaccuguucgucuucagcaccuccuucuaccugaucagcaucuuccugcaccucgugaagaucccgacccaccgccacaucguggggaagcccugccccaagccccaccggcugaaccacaugggcaucugcuccugcgggcuguacaagcagccgggcguccccgugaaguggaagcgcuga

SEQ ID NO: 719 - RNA, 1476 nt, Artificial Sequence
  derived and/or modified protein sequence (opt1) from LASV(G3034-SLE-2013;Clade IV)__AIT17350__GPC
augggccagaucgugaccuucuuccaggaggucccccacgugaucgaggaggugaugaacaucguccugaucgcccucagcauccuggccgugcugaaggggcucuacaacguggcgaccugcggccugaucgggcuggucacguuccuccugcugugcggccgcuccugcaccaccacccucuacaaggggguguacgagcugcaggcccuggagcucaacauggagacgcugaacaugaccaugccgcugagcugcaccaagaacaacucccaccacuacaucauggugggcaacgagaccggccucgagcugacgcugaccaacaccagcaucaucgaccacaaguucugcaaccucuccgacgcccacaagaagaaccuguacgaccacgcccugaugagcaucaucuccaccuuccaccucagcauccccaacuucaaccaguacgaggccauguccugcgacuucaacgggggcaagaucagcguccaguacaaccugucccacagcuacgcgggggacgccgccaagcacugcggcacgguggccaacggggugcugcagaccuucaugcggauggcguggggcggcuccuacaucgcccucgacagcgggcgcaacggcugggacugcgucaugaccuccuaccaguaccugaucauccagaacaccacgugggaggaccacugccaguucagccggcccucccccaucggguaccugggccuccugagccagcgcacccgggacaucuacaucucccgccggcugcucggcaccuucaccuggacgcugagcgacagcgaggggaaggacaccccgggcggguacugccugacccgcuggaugcucaucgaggccgagcugaagugcuucggcaacaccgccguggccaagugcaacgagaagcacgacgaggaguucugcgacaugcugcggcuguucgacuucaacaagcaggcgauccagcgccugaagacggaggcccagauguccauccagcugaucaacaaggccgugaacgcccucaucaacgaccagcugaucaugaagaaccaccuccgggacaucauggggauccccuacugcaacuacagcaaguacugguaccucaaccacaccgucaccggcaagaccucccugccccgcugcuggcuggugagcaacggcuccuaccucaacgagacgcacuucagcgacgacaucgagcagcaggccgacaacaugaucaccgagaugcugcagaaggaguacaucgagcggcaggggaagacgccccugggccucguggaccuguucgucuucuccaccagcuucuaccugaucuccaucuuccugcaccucgugaagaucccgacccaccgccacaucaucgggaagcccugccccaagccccaccggcugaaccacaugggcaucugcagcugcgggcuguacaagcagccgggcgugcccguccgcuggaagcgguga

SEQ ID NO: 720 - RNA, 1476 nt, Artificial Sequence
  derived and/or modified protein sequence (opt1) from LASV(G3101-SLE-2013;Clade IV)__AIT17354__GPC
augggccagaucgugaccuucuuccaggaggucccccacgugaucgaggaggugaugaacaucguccugaucgcccucagcauccuggccgugcugaaggggcucuacaacuucgcgaccugcggccugguggggcuggucacguuccuccugcugugcggccgcuccugcaccaccagccucuacaaggggguguacgagcugcagacccuggagcucaacauggagacgcugaacaugaccaugccgcuguccugcaccaagaacaacagccaccacuacaucauggugggcaacgagaccggccucgagcugacgcugaccaacaucuccaucaucaaccacaaguucugcaaccucagcgacgcccacaagaagaaccuguacgaccacgcccugauguccaucaucagcaccuuccaccucuccauccccaacuucaaccaguacgaggccaugagcugcgacuucaacgggggcaagaucuccguccaguacaaccugagccacuccuacgccggggacgcggccaaccacugcggcaccguggccaacggggugcugcagacguucaugcggauggccuggggcggcagcuacaucgcgcucgacuccgggcacggcgggugggacugcaucaugaccagcuaccaguaccugaucauccagaacaccaccugggaggaccacugccaguucucccgccccagccccaucggcuaccugggccuccugucccagcggacgcgcgacaucuacaucagccggcgccugcucgggaccuucaccuggacccugagcgacuccgagggcaaggacacgcccgggggcuacugccugacccgguggaugcucaucgaggccgagcugaagugcuucgggaacaccgccgucgccaagugcaacgagaagcacgacgaggaguucugcgacaugcugcgccucuucgacuucaacaagcaggccauccagcggcugaaggcggaggcccagaugagcauccagcugaucaacaaggccgugaacgcccucaucaacgaccagcugaucaugaagaaccaccuccgcgacaucaugggcauccccuacugcaacuacuccaaguacugguaccugaaccacaccacgaccggcaagaccagccugcccaagugcuggcugguguccaacgggagcuaccucaacgagacccacuucuccgacgacaucgagcagcaggccgacaacaugaucacggagaugcugcagaaggaguacauggagcggcagggcaagaccccgcuggggcucgucgaccuguucguguucagcaccuccuucuaccugaucagcaucuuccugcaccucgugaagaucccgacccaccgccacaucgucggcaagcccugcccccggccccaccgccugaaccacauggggaucugcuccugcggccuguacaagcagccgggcgugcccgugaaguggaagcgguga

SEQ ID NO: 721 - RNA, 1476 nt, Artificial Sequence
  derived and/or modified protein sequence (opt1) from LASV(G3110-SLE-2013;Clade IV)__AIT17360__GPC
augggccagaucgugaccuucuuccaggaggucccccacgugaucgaggaggugaugaacaucguccugaucgcccucagcauccuggccgugcugaaggggcucuacaacuucgcgaccugcggccugguggggcuggucacguuccuccugcugugcggccgcuccugcaccaccagccucuacaaggggguguacgagcugcagacccuggagcucaacauggagacgcugaacaugaccaugccgcuguccugcaccaagaacaacagccaccacuacauccgggugggcaacgagaccggccucgagcugacgcugaccaacaccuccaucaucaaccaccgcuucugcaaccucagcgacgcccacaagaagaaccuguacgaccacgcccugauguccaucaucagcaccuuccaccucuccauccccaacuucaaccaguacgaggccaugagcugcgacuucaacgggggcaagaucuccguccaguacaaccugagccacuccuacgccggggacgcggccaaccacugcggcacgguggccaacggggugcugcagaccuucaugcggauggccuggggcggcagcuacaucgcgcucgacuccgggcacggcaagugggacugcaucaugaccagcuaccaguaccugaucauccagaacaccacgugggacgaccacugccaguucucccgccccagccccaucggguaccugggccuccugucccagcggacccgcgacaucuacaucagccggcgccugcucggcaccuucaccuggacgcugagcgacuccgaggggaaggacaccccgggcggguacugccugacccgguggaugcucaucgaggccgagcugaagugcuucggcaacaccgccgucgccaagugcaacgagaagcacgacgaggaguucugcgacaugcugcgccucuucgacuucaacaagcaggccauccggcgccugaaggcggaggcccagaugagcauccagcugaucaacaaggccgugaacgcccucaucaacgaccagcugaucaugaagaaccaccuccgggacaucauggggauccccuacugcaacuacuccaaguacugguaccugaaccacacgaccaccggcaagaccagccugccccgcugcuggcugguguccaacggcagcuaccucaacgagacgcacuucuccgacgacaucgagcagcaggccgacaacaugaucaccgagaugcugcagaaggaguacauggagcggcaggggaagacgccccugggccucgucgaccuguucguguucagcaccuccuucuaccugaucagcaucuuccugcaccucgugaagaucccgacccaccgccacaucgucgggaaguccugccccaagccccaccggcugaaccacaugggcaucugcagcugcggguucuacaagcagcccggcgugccggugaaguggaagcgcuga

SEQ ID NO: 722 - RNA, 1476 nt, Artificial Sequence
  derived and/or modified protein sequence (opt1) from LASV(G3148-SLE-2013;Clade IV)__AIT17364__GPC
augggccagaucgugaccuucuuccaggaggucccccacgugaucgaggaggugaugaacaucguccugaucgcccucagcauccuggccgugcugaaggggcucuacaacuucgcgaccugcggccugguggggcuggucacguuccuccugcugugcggccgcuccugcaccaccagccucuacaaggggguguacgagcugcagacccuggagcucaacauggagacgcugaacaugaccaugccgcuguccugcaccaagaacaacagccaccacuacaucauggugggcaacgagaccggccucgagcugacgcugaccaacaccuccaucaucaaccacaaguucugcaaccucagcgacgcccacaagaagaaccuguacgaccacgcccugauguccaucaucagcaccuuccaccucuccauccccaacuucaaccaguacgaggccaugagcugcgacuucaacgggggcaagaucuccguccaguacaaccugagccacuccuacgccggggacgcggccaaccacugcggcacgguggccaacggggugcugcagaccuucaugcggauggccuggggcggcagcuacaucgcgcucgacuccgggcgcgaccggugggacugcaucaugaccagcuaccaguaccugaucauccagaacaccacgugggaggaccacugccaguucucccgccccagccccaucggcuaccuggggcuccugucccagcggacccgcgacaucuacaucagccggcgccugcucggcaccuucaccuggacgcugagcgacuccgagggcaaggacacccccgggggcuacugccugacccgguggaugcucaucgaggccgagcugaagugcuucgggaacaccgccgucgccaagugcaacgagaagcacgacgaggaguucugcgacaugcugcgccucuucgacuucaacaagcaggccauccagcggcugaaggcggaggcccagaugagcauccagcugaucaacaaggccgugaacgcccucaucaacgaccagcugaucaugaagaaccaccuccgcgacaucaugggcauccccuacugcaacuacuccaaguacugguaccugaaccacacgaccaccgggaagaccagccugcccaagugcuggcugguguccaacggcagcuaccucaacgagacgcacuucuccgacgacaucgagcagcaggccgacaacaugaucaccgagaugcugcagaaggaguacaucgagcggcagggcaagaccccgcuggggcucgucgaccuguucguguucagcaccuccuucuaccugaucagcaucuuccugcaccucgugaagaucccgacgcaccgccacaucgucggcaagcccugccccaagccccaccggcugaaccacauggggaucugcuccugcggccuguacaagcagccgggggugagcgugaaguggaagcgcuga

SEQ ID NO: 723 - RNA, 1476 nt, Artificial Sequence
  derived and/or modified protein sequence (opt1) from LASV(G3151-SLE-2013;Clade IV)__AIT17368__GPC
augggccagaucgugaccuucuuccaggaggucccccacgugaucgaggaggugaugaacaucguccugaucgcccucagcauccuggccgugcugaaggggcucuacaacuucgcgaccugcggccugguggggcuggucacguuccuccugcugugcggccgcuccugcaccaccagccucuacaaggggguguacgagcugcagacccuggagcucaacauggagacgcugaacaugaccaugccgcuguccugcaccaagaacaacagccaccacuacaucauggugggcaacgagaccggccucgagcugacgcugaccaacaccuccaucaucaaccacaaguucugcaaccucagcgacgcccacaagaagaaccuguacgaccacgcccugauguccaucaucagcaccuuccaccucuccauccccaacuucaaccaguucgaggccaugagcugcgacuucaacgggggcaagaucuccguccaguacaaccugagccacuccuacgccggggacgcggccaaccacugcggcacgguggccaacggggugcugcagaccuucaugcggauggccuggggcggcagcuacaucgcgcucgacuccgggcacagcaagugggacugcaucaugaccuccuaccaguaccugaucauccagaacaccacgugggacgaccacugccaguucagccgccccucccccaucggcuaccuggggcuccugagccagcggacccgcgacaucuacaucagccggcgccugcucggcaccuucaccuggacgcuguccgacagcgagggcaaggacacccccgggggcuacugccugacccgguggaugcucaucgaggccgagcugaagugcuucgggaacaccgccgucgccaagugcaacgagaagcacgacgaggaguucugcgacaugcugcgccucuucgacuucaacaagcaggccauccagcggcugaaggcggaggcccagauguccauccagcugaucaacaaggccgugaacgcccucaucaacgaccagcugaucaugaagaaccaccuccgcgacaucaugggcauccccuacugcaacuacagcaaguacugguaccugaaccacacgaccaccgggaagaccucccugcccaagugcuggcuggugagcaacggcuccuaccucaacgagacgcacuucagcgacgacaucgagcagcaggccgacaacaugaucaccgagaugcugcagaaggaguacauggagcggcagggcaagaccccgcuggggcucgucgaccuguucguguucuccaccagcuucuaccugaucuccaucuuccugcaccucgugaagaucccgacgcaccgccacaucgucggcaagagcugccccaagccccaccggcugaacuacauggggaucugcuccugcggcuucuacaagcagcccggggugccggugaaguggaagcgcuga

SEQ ID NO: 724 - RNA, 1476 nt, Artificial Sequence
  derived and/or modified protein sequence (opt1) from LASV(G3157-SLE-2013;Clade IV)__AIT17370__GPC
augggccagaucgugaccuucuuccaggaggucccccacgugaucgaggaggugaugaacaucguccugaucgcccucagcauccuggccgugcugaaggggcucuacaacuucgcgaccugcggccugguggggcuggucacguuccuccugcugugcggccgcuccugcaccaccagccucuacaaggggguguacgagcugcagacccuggagcucaacauggagacgcugaacaugaccaugccgcuguccugcaccaagaacaacagccaccacuacaucauggugggcaacgagaccggccucgagcugacgcugaccaacaccuccaucaucaaccacaaguucugcaaccucagcgacgcccacaagaagaaccuguacgaccacgcccugauguccaucaucagcaccuuccaccucuccauccccaacuucaaccaguacgaggccaugagcugcgacuucaacgggggcaagaucuccguccaguacaaccugagccacuccuacgccggggacgcggccaaccacugcggcacgguggccaacggggugcugcagaccuucaugcggauggccuggggcggcagcuacaucgcgcucgacuccgggcgcgaccggugggacugcaucaugaccagcuaccaguaccugaucauccagaacaccacgugggaggaccacugccaguucucccgccccagccccaucggcuaccuggggcuccugucccagcggacccgcgacaucuacaucagccggcgccugcucggcaccuucaccuggacgcugagcgacuccgagggcaaggacacccccgggggcuacugccugacccgguggaugcucaucgaggccgagcugaagugcuucgggaacaccgccgucgccaagugcaacgagaagcacgacgaggaguucugcgacaugcugcgccucuucgacuucaacaagcaggccauccagcggcugaaggcggaggcccagaugagcauccagcugaucaacaaggccgugaacgcccucaucaacgaccagcugaucaugaagaaccaccuccgcgacaucaugggcauccccuacugcaacuacuccaaguacugguaccugaaccacacgaccaccgggaagaccagccugcccaagugcuggcugguguccaacggcagcuaccucaacgagacgcacuucuccgacgacaucgagcagcaggccgacaacaugaucaccgagaugcugcagaaggaguacauggagcggcagggcaagaccccgcuggggcucgucgaccuguucguguucagcaccuccuucuaccugaucagcaucuuccugcaccucgugaagaucccgacgcaccgccacaucgucggcaagcccugccccaagccccaccggcugaaccacauggggaucugcuccugcggccuguacaagcagccgggggugagcgugaaguggaagcgcuga

SEQ ID NO: 725 - RNA, 1476 nt, Artificial Sequence
  derived and/or modified protein sequence (opt1) from LASV(G3206-SLE-2013;Clade IV)__AIT17378__GPC
augggccagaucgugaccuucuuccaggaggucccccacgugaucgaggaggugaugaacaucguccugaucgcccucagcauccuggccgugcugaaggggcucuacaaccuggcgaccugcggccugguggggcucgucacguuccugcugcucugcggccgcuccugcaccaccagccuguacaaggggguguacgagcugcagacccucgagcugaacauggagacgcugaacaugaccaugccgcucuccugcaccaagaacaacagccaccacuacaucauggugggcaacgagaccggccuggagcugacgcucaccaacaccuccaucaucaaccacaaguucugcaaccugagcgacgcccacaagaagaaccuguacgaccacacccucauguccaucaucagcacguuccaccuguccauccccaacuucaaccaguacgaggccaugagcugcgacuucaacgggggcaagaucuccguccaguacaaccugagccacuccuacgccguggacgccgcgaaccacugcgggaccguggccaacggcguccuccagaccuucaugcggauggccuggggcgggagcuacaucgcccuggacuccggccgcagcgggugggacugcaucaugaccuccuaccaguaccuggugauccagaacacgaccugggaggaccacugccaguucagccggcccucccccaucggcuaccucgggcugcugagccagcgcacccgggacaucuacaucagccgccggcuccugggcaccuucacguggacccuguccgacagcgagggcaagaacacccccgggggcuacugccucacccgcuggaugcugaucgaggcggagcugaagugcuucgggaacacggccguggccaagugcaacgagaagcacgacgaggaguucugcgacaugcuccggcuguucgacuucaacaagcaggccauccagcgccugaaggccgaggcgcagauguccauccagcucaucaacaaggccgucaacgcccugaucaacgaccagcugaucaugaagaaccaccuccgggacaucaugggcauccccuacugcaacuacagcaaguacugguaccugaaccacaccaccaccgggcgcacgucccugccccggugcuggcucgugagcaacggcuccuaccugaacgagacccacuucagcgacgacaucgagcagcaggccgacaacaugaucaccgagaugcugcagaaggaguacauggagcgccagggcaagaccccgcucgggcugguggaccuguucgucuucuccacgagcuucuaccugaucuccaucuuccuccaccuggugaagaucccgacccaccggcacaucgugggcaagagcugccccaagccccaccgccugaaccacauggggaucugcuccugcggcuucuacaagcagcccggggucccggugaaguggaagcgguga

SEQ ID NO: 726 - RNA, 1476 nt, Artificial Sequence
  derived and/or modified protein sequence (opt1) from LASV(G3234-SLE-2013;Clade IV)__AIT17388__GPC
augggccagaucgugaccuucuuccaggaggucccccacgugaucgaggaggugaugaacaucguccugaucgcccucagcauccuggccgugcugaaggggcucuacaacguggcgaccugcggccugaucgggcuggucacguuccuccugcugugcggccgcuccugcaccaccacccucuacaaggggguguacgagcugcaggcccuggagcucaacauggagacgcugaacaugaccaugccgcugagcugcaccaagaacaacucccaccacuacauccgggugggcaacgagaccggccucgagcugacgcugaccaacaccagcaucaucaaccacaaguucugcaaccucuccgacgcccacaagaagaaccuguacgaccacgcccugaugagcaucaucuccaccuuccaccucagcauccccaacuucaaccaguacgaggccauguccugcgacuucaacgggggcaucaucagcguccaguacaaccugucccacagcuacgcgggggacgccgccaaccacugcggcacgguggccaacggggugcugcagaccuucaugcgcauggcguggggcggcuccuacaucgcccucgacagcgggcggaacggcugggacugcaucaugaccuccuaccaguaccugaucauccagaacaccacgugggacgaccacugccaguucagccgccccucccccaucggguaccugggccuccugagccagcggacccgcgacaucuacaucucccggcgccugcucggcaccuucaccuggacgcugagcgacagcgaggggaaggacaccccgggcggguacugccugacccgguggaugcucaucgaggccgagcugaagugcuucggcaacaccgccgucgccaagugcaacgagaagcacgacgaggaguucugcgacaugcugcgccucuucgacuucaacaagcaggcgauccagcggcugaagacggaggcccagaugaacauccagcugaucaacaaggccgugaacgcccucaucaacgaccagcugaucaugaagaaccaccuccgcgacaucauggggauccccuacugcaacuacuccaaguacugguaccugaacaacaccgccaccggcaagaccagccugccccggugcuggcugguguccaacggcagcuaccucaacgagacgcacuucuccgacgacaucgagcagcaggcggacaacaugaucaccgagaugcugcagaaggaguacauggagcgccaggggaagacgccccugggccucgucgaccuguucguguucagcaccuccuucuaccugaucagcaucuuccugcaccucgugaagaucccgacccaccggcacaucgucgggaagcccugccccaagccccaccgccugaaccacaucggcaucugcuccugcgggcuguacaagcagccgggcgugcccgugaaguggaagcgguga

SEQ ID NO: 727 - RNA, 1476 nt, Artificial Sequence
  derived and/or modified protein sequence (opt1) from LASV(G502-SLE-2009;Clade IV)__AIT17126__GPC
augggccagaucgugaccuucuuccaggaggucccccacgugaucgaggaggugaugaacaucguccugaucgcccucagcauccuggccgugcugaaggggcucuacaacuucgcgaccugcggccugguggggcugcucacguuccugcugcucugcggccgcuccugcaccaccgggcuguacaagggcgucuacgagcugcagacccucgagcugaacauggagacgcugaacaugaccaugccgcucagcugcaccaagaacaacucccaccacuacaucauggugggcaacgagaccgggcuggagcugacgcucaccaacaccagcaucaucaaccacaaguucugcaaccuguccgacgcccacaagaagaaccuguacgaccacgcccucaugagcaucaucuccaccuuccaccugagcauccccaacuucaaccaguacgaggccauguccugcgacuucaacggcgggaagaucagcgugcaguacaaccugucccacagcuacgccggcgacgcggccgaccacugcgggacggucgccaacggcgugcuccagaccuucaugcggauggccuggggcggguccuacaucgcgcuggacagcggccgcgggcggugggacugcaucaugaccuccuaccaguaccugaucauccagaacaccacgugggaggaccacugccaguucagccgccccucccccaucggcuaccucggccugcugagccagcggacccgcgacaucuacaucucccggcgccuccuggggaccuucaccuggacgcugagcgacagcgagggcaaggacacccccgggggcuacugccucacccgguggaugcugaucgaggccgagcugaagugcuucgggaacaccgccguggccaagugcaacgagaagcacgacgaggaguucugcgacaugcuccgccuguucgacuucaacaagcaggccauccagcggcugaaggcggaggcccagauguccauccagcucaucaacaaggccgucaacgcccugaucaacgaccagcuggugaugaagaaccaccuccgcgacaucaugggcauccccuacugcaacuacagccgguacugguaccugaaccacacgaccaccggccgcaccucccugcccaagugcuggcucgugagcaacggguccuaccugaacgagacgcacuucagcgacgacaucgagcagcaggccgacaacaugaucaccgagaugcugcagaaggaguacauggagcggcagggcaagaccccgcucgggcuggucgaccuguucguguucuccaccagcuucuaccugaucuccaucuuccuccaccuggugaagaucccgacgcaccgccacaucgucggcaagagcugccccaagccccaccggcugaaccacauggggaucugcuccugcggccucuacaagcagcccggcgugccggugaaguggaagcgcuga

SEQ ID NO: 728 - RNA, 1476 nt, Artificial Sequence
  derived and/or modified protein sequence (opt1) from LASV(G503-SLE-2009;Clade IV)__AIT17130__GPC
augggccagaucgugaccuucuuccaggaggucccccacgugaucgaggaggugaugaacaucguccugaucgcccucagcauccuggccgugcugaaggggcucuacaacuucgcgaccugcggcuucguggggcuggucacguuccugcuccugugcggccgcuccugcaccaccagccuguacaaggggguguacgagcuccagacccuggagcugaacauggagacgcucaacaugaccaugccgcuguccugcaccaagaacaacagccaccacuacauccgggugggcaacgacaccggccuggagcucacgcugaccaacaccuccaucaucaaccacaaguucugcaaccugagcgacgcccacaagaagaaccucuacgaccacgcccugauguccaucaucagcaccuuccaccuguccauccccaacuucaaccaguacgaggccaugagcugcgacuucaacgggggcaagaucuccguccaguacaaccucagccacuccuacgccguggacgcggccagccacugcgggacgaucgccaacggcgugcugcagaccuucaugcgcauggccuggggcggguccuacaucgcgcuggacagcggccgggaccgcugggacugcaucaugaccuccuaccaguaccucaucauccagaacaccacgugggaggaccacugccaguucagccggcccucccccaucggguaccugggccugcucagccagcgcacccgggacaucuacaucagccgccggcugcuggggaccuucaccuggacgcucuccgacagcgagggcaaggacaccccgggcggguacugccugacccgcuggaugcugaucgaggccgagcucaagugcuucggcaacaccgccgucgccaagugcaacgagaagcacgacgaggaguucugcgacaugcugcggcuguucgacuucaacaagcaggccauccagcgccucaaggcggaggcccagauguccauccagcugaucaacaaggccgugaacgcccugaucaacgaccagcucaucaugaagaaccaccuccgggacaucauggggauccccuacugcaacuacagcaaguacugguaccugaaccacacgaccaccggcaagaccucccugcccaagugcuggcuggugagcaacggguccuaccugaacgagacgcacuucagcgacgacaucgagcagcaggccgacaacaugaucaccgagaugcuccagaaggaguacauggagcgccagggcaagacgccccugggccuggucgaccucuucguguucuccaccagcuucuaccugaucuccaucuuccugcaccuggugaagaucccgacccaccggcacaucgucggcaagagcugccccaagccccaccgccucaaccacauggggaucugcuccugcgggcuguacaagcagcccggcgugccggugaaguggaagcgguga

SEQ ID NO: 729 - RNA, 1476 nt, Artificial Sequence
  derived and/or modified protein sequence (opt1) from LASV(G610-SLE-2009;Clade IV)__AIT17134__GPC
augggccagaucgugaccuucuuccaggaggucccccacgugaucgaggaggugaugaacaucguccugaucgcccucagcauccuggccgugcugaaggggcucuacaacuucgcgaccugcggccugguggggcuggucacguuccuccugcugugcggccgcuccugcaccaccagccucuacaaggggguguacgagcugcagacccuggagcucaacauggagacgcugaacaugaccaugccgcuguccugcaccaagaacaacagccaccacuacaucauggugggcaacgagaccggccucgagcugacgcugaccaacaccuccaucaucaaccacaaguucugcaaccucagcgacgcccacaagaagaaccuguacgaccacgcccugauguccaucaucagcaccuuccaccucuccauccccaacuucaaccaguacgaggccaugagcugcgacuucaacgggggcaagaucuccguccaguacaaccugagccacuccuacgccggggacgcggccaaccacugcggcacgguggccaacggggugcugcagaccuucaugcggauggccuggggcggcagcuacaucgcgcucgacuccgggcgcggccggugggacugcaucaugaccagcuaccaguaccugaucauccagaacaccacgugggaggaccacugccaguucucccgccccagccccaucggguaccugggccuccugucccagcggacccgcgacaucuacaucagccggcgccugcucggcaccuucaccuggacgcugagcgacuccgaggggaaggacaccccgggcggguacugccugacccgguggaugcucaucgaggccgagcugaagugcuucggcaacaccgccgucgccaagugcaacgagaagcacgacgaggaguucugcgacaugcugcgccucuucgacuucaacaagcaggccauccagcggcugaaggcggaggcccagaugagcauccagcugaucaacaaggccgugaacgcccucaucaacgaccagcugaucaugaagaaccaccuccgcgacaucauggggauccccuacugcaacuacuccaaguacugguaccugaaccacacgaccaccggcaagaccagccugcccaagugcuggcugguguccaacggcagcuaccucaacgagacgcacuucuccgacgacaucgagcagcaggccgacaacaugaucaccgagaugcugcagaaggaguacauggagcggcaggggaagacgccccugggccucgucgaccuguucguguucagcaccuccuucuaccugaucagcaucuuccugcaccucgugaagaucccgacccaccgccacaucgucgggaaguccugccccaagccccaccggcugaaccacaugggcaucugcagcugcgggcuguacaagcagcccggcgugccggugaaguggaagcgcuga

SEQ ID NO: 730 - RNA, 1476 nt, Artificial Sequence
  derived and/or modified protein sequence (opt1) from LASV(G636-SLE-2009;Clade IV)__AIT17138__GPC
augggccagaucgugaccuucuuccaggaggucccccacgugaucgaggaggugaugaacaucguccugaucgcccucagcauccuggccgugcugaaggggcucuacaaccuggcgaccugcggccugguggggcucgucacguuccugcugcucugcggccgcuccugcaccaccagccuguacaaggggguguacgagcugcagacccucgagcugaacauggagacgcugaacaugaccaugccgcucuccugcaccaagaacaacagccaccacuacaucauggugggcaacgagaccggccuggagcugacgcucaccaacaccucccugaucaaccacaaguucugcaaccugagcgacgcccacaagaagaaccucuacgaccacgcccugauguccaucaucagcaccuuccaccuguccauccccaacuucaaccaguacgaggccaugagcugcgacuucaacgggggcaagaucuccguccaguacaaccucagccacuccuacgccguggacgcggccagccacugcgggacgguggccaacggcguccugcagaccuucaugcggauggccuggggcggguccuacaucgcgcuggacagcggccgcgggggcugggacugcaucaugaccuccuaccaguaccucaucauccagaacaccacgugggaggaccacugccaguucagccggcccucccccaucggguaccugggccugcucagccagcgcacccgggacaucuacaucagccgccggcugcugggcaccuucaccuggacgcucuccgacagcgaggggaaggacaccccgggcggguacugccugacccgcuggaugcugaucgaggccgagcucaagugcuucggcaacaccgccguggccaagugcaacgagaagcacgacgaggaguucugcgacaugcugcggcuguucgacuucaacaagcaggccauccagcgccucaaggcggaggcccagauguccauccagcugaucaacaaggccgugaacgcccugaucaacgaccagcucaucaugaagaaccaccuccgggacaucauggggauccccuacugcaacuacagcaaguacugguaccugaaccacacgaccaccggccgcaccucccugccccggugcuggcuggucagcaacggcuccuaccugaacgagacgcacuucagcgacgacaucgagcagcaggccgacaacaugaucaccgagaugcuccagaaggaguacauggagcgccaggggaagacgccccugggccugguggaccuguucguguucuccaccagcuucuaccucaucuccaucuuccugcaccuggucaagaucccgacccaccggcacaucgugggcaagagcugccccaagccccaccgccucaaccacauggggaucugcuccugcgggcuguacaagcagcccggcgugccggucaaguggaagcgguga

SEQ ID NO: 731 - RNA, 1476 nt, Artificial Sequence
  derived and/or modified protein sequence (opt1) from LASV(G692-SLE-2009;Clade IV)__AIT17146__GPC
augggccagaucgugaccuucuuccaggaggucccccacgugaucgaggaggugaugaacaucguccugaucgcccucagcauccuggccgugcugaaggggcucuacaaccuggcgaccugcggccugguggggcucgucacguuccugcugcucugcggccgcuccugcaccaccagccuguacaaggggguguacgagcugcagacccucgagcugaacauggagacgcugaacaugaccaugccgcucuccugcaccaagaacaacagccaccacuacaucauggugggcaacgagaccggccuggagcugacgcucaccaacaccuccaucaucaaccacaaguucugcaaccugagcgacgcccacaagaagaaccuguacgaccacgcccucauguccaucaucagcaccuuccaccuguccauccccaacuucaaccaguacgaggccaugagcugcgacuucaacgggggcaagaucuccguccaguacaaccugagccacuccuacgccggggacgcggccaaccacugcggcacgguggccaacggggugcuccagaccuucaugcggauggccuggggcggcagcuacaucgcgcuggacuccgggcgcggccggugggacugcaucaugaccagcuaccaguaccugaucauccagaacaccacgugggaggaccacugcuccuucagccgccccucccccaucggguaccucggccugcugagccagcggacccgcgacaucuacaucagccggcgccuccugggcaccuucaccuggacgcuguccgacagcgaggggaaggacaccccgggcggguacugccucacccgguggaugcugaucgaggccgagcugaagugcuucggcaacaccgccgucgccaagugcaacgagaagcacgacgaggaguucugcgacaugcuccgccuguucgacuucaacaagcaggccauccagcggcugaaggcggaggcccagauguccauccagcucaucaacaaggccgugaacgcccugaucaacgaccagcugaucaugaagaaccaccuccgcgacaucauggggauccccuacugcaacuacagcaaguacugguaccugaaccacacgaccaccggcaagaccucccugcccaagugcuggcucgugagcaacggcuccuaccugaacgagacgcacuucagcgacgacaucgagcagcaggccgacaacaugaucaccgagaugcugcagaaggaguacauggagcggcaggggaagacgccccucggccuggucgaccuguucguguucuccaccagcuucuaccugaucuccaucuuccuccaccuggugaagaucccgacccaccgccacaucgucggcaagagcugccccaagccccaccggcugaaccacauggggaucugcuccugcggguucuacaagcagcccggcgugccggugaaguggaagcgcuga

SEQ ID NO: 732 - RNA, 1476 nt, Artificial Sequence
  derived and/or modified protein sequence (opt1) from LASV(G733-SLE-2010;Clade IV)__AIT17154__GPC
augggccagaucgugaccuucuuccaggaggucccccacgugaucgaggaggugaugaacaucguccugaucgcccucagcauccuggccgugcugaaggggcucuacaacuucgcgaccugcggcaucguggggcuggucuccuuccugcuccugugcggccgcagcugcacgaccucccuguacaaggggguguacgagcuccagacccuggagcugaacauggagacccucaacaugacgaugccgcugagcugcaccaagaacaacucccaccacuacaucauggugggcaacgagaccggccuggagcucacccugacgaacaccagcaucaucaaccacaaguucugcaaccuguccgacgcccacaagaagaaccucuacgaccacgcccugaugagcaucaucuccaccuuccaccugagcauccccaacuucaaccaguacgaggccauguccugcgacuucaacgggggcaagaucagcguccaguacaaccucucccacagcuacgccggggacgcggccaaccacugcggcaccaucgccaacggggugcugcagacguucaugcggauggccuggggcggcuccuacaucgcgcuggacagcgggcgcgaccggugggacugcaucaugaccuccuaccaguaccucaucauccagaacaccaccugggaggaccacugccaguucagccgccccucccccaucggcuaccuggggcugcucagccagcggacgcgcgacaucuacaucagccggcgccugcugggcaccuucaccuggacccucuccgacagcgagggcaaggacacgcccgggggcuacugccugacccgguggaugcugaucgaggccgagcucaagugcuucgggaacaccgccguggccaagugcaacgagaagcacgacgaggaguucugcgacaugcugcgccuguucgacuucaacaagcaggccauccagcggcucaaggcggaggcccagauguccauccagcugaucaacaaggccgucaacgcccugaucaacgaccagcucaucaugaagaaccaccuccgcgacaucaugggcauccccuacugcaacuacagcaaguacugguaccugaaccacaccacgaccgggaagaccucccugcccaagugcuggcuggugagcaacggcuccuaccugaacgagacccacuucagcgacgacaucgagcagcaggccgacaacaugaucacggagaugcuccagaaggaguacauggagcggcagggcaagaccccgcuggggcugguggaccucuucgucuucuccaccagcuucuaccugaucuccaucuuccugcaccuggugaagaucccgacccaccgccacguggucggcaagagcugccccaagccccaccggcucaaccacauggggaucugcuccugcggccuguacgggcagcccggcgugccggugaaguggaagcgcuga

SEQ ID NO: 733 - RNA, 1476 nt, Artificial Sequence
  derived and/or modified protein sequence (opt1) from LASV(G771-SLE-2010;Clade IV)__AIT17158__GPC
augggccagaucgugaccuucuuccaggaggucccccacgugaucgaggaggugaugaacaucguccugaucgcccucagcauccuggccgugcugaaggggcucuacaacuucgcgaccugcggccugguggggcuggucacguuccuccugcugugcggccgcuccugcaccaccagccucuacaaggggguguacgagcugcagacccuggagcucaacauggagacgcugaacaugaccaugccgcuguccugcaccaagaacaacagccaccacuacaucauggugggcaacgagaccggccucgagcugacgcugaccaacaccuccaucaucaaccacaaguucugcaaccucagcgacgcccacaagaagaaccuguacgaccacgcccugauguccaucaucagcaccuuccaccucuccauccccaacuucaaccaguacgaggccaugagcugcgacuucaacgggggcaagaucuccguccaguacaaccugagccacuccuacgccggggacgcggccaaccacugcggcacgguggccaacggggugcugcagaccuucaugcggauggccuggggcggcagcuacaucgcgcucgacuccgggcgcgaccggugggacugcaucaugaccagcuaccaguaccugaucauccagaacaccacgugggaggaccacugccaguucucccgccccagccccaucggcuaccuggggcuccugucccagcggacccgcgacaucuacaucagccggcgccugcucggcaccuucaccuggacgcugagcgacuccgagggcaaggacacccccgggggcuacugccugacccgguggaugcucaucgaggccgagcugaagugcuucgggaacaccgccgucgccaagugcaacgagaagcacgacgaggaguucugcgacaugcugcgccucuucgacuucaacaagcaggccauccagcggcugaaggcggaggcccagaugagcauccagcugaucaacaaggccgugaacgcccucaucaacgaccagcugaucaugaagaaccaccuccgcgacaucaugggcauccccuacugcaacuacuccaaguacugguaccugaaccacacgaccaccgggaagaccagccugcccaagugcuggcugguguccaacggcagcuaccucaacgagacgcacuucuccgacgacaucgagcagcaggccgacaacaugaucaccgagaugcugcagaaggaguacauggagcggcagggcaagaccccgcuggggcucgucgaccuguucguguucagcaccuccuucuaccugaucagcaucuuccugcaccucgugaagaucccgacgcaccgccacaucgucggcaaguccugccccaagccccaccggcugaaccacauggggaucugcagcugcggccuguacaagcagcccggggugccggugaaguggaagcgcuga

SEQ ID NO: 734 - RNA, 1476 nt, Artificial Sequence
  derived and/or modified protein sequence (opt1) from LASV(G808-SLE-2010;Clade IV)__AIT17164__GPC
augggccagaucgugaccuucuuccaggaggucccccacgugaucgaggaggugaugaacaucguccugaucgcccucagcauccuggccgugcugaaggggcucuacaacuucgcgaccugcggccugguggggcuggucacguuccuccugcugugcggccgcuccugcaccagcucccucuacaaggggguguacgagcugcagacccuggagcucaacauggagacccugaacaugacgaugccgcugagcugcaccaagaacaacucccaccacuacauccgggugggcaacgagaccggccucgagcugacccugacgaacaccagcaucaucgaccacaaguucugcaaccucuccgacgcccacaagaagaaccuguacgaccacgcccugaugagcaucaucuccaccuuccaccucagcauccccaacuucaaccaguacgaggccauguccugcgacuucaacgggggcaagaucagcguccaguacaaccugucccacagcuacgccggggacgcggccaagcacugcggcaccguggccaacggggugcugcagacguucaugcgcauggccuggggcggcuccuacaucgcgcucgacagcgggcacggcaacugggacugcaucaugaccuccuaccaguaccugaucauccagaacaccaccugggaggaccacugccaguucagccggcccucccccaucggguaccugggccuccugagccagcgcacgcgggacaucuacaucagccgccggcugcucggcaccuucaccuggacccuguccgacagcgaggggaacgacgccccgggcggguacugccugacgcgcuggaugcucauccaggccgagcugaagugcuucggcaacaccgccgucgccaagugcaacgagaagcacgacgaggaguucugcgacaugcugcggcuguucgacuucaacaagcaggcgauccagcgccugaaggccgaggcccagauguccauccagcugaucaacaaggccgugaacgcccucaucaacgaccagcugaucaugaagaaccaccuccgggacaucauggggauccccuacugcaacuacagcaaguacugguaccucaaccacaccaccacgggccgcaccucccugccccggugcuggcuggugagcaacggcuccuaccucaacgagacccacuucagcgacgacaucgagcagcaggcggacaacaugaucaccgagaugcugcagaaggaguacauggagcgccaggggaagacgccccugggccucgucgaccuguucguguucuccaccagcuucuaccugaucuccaucuuccugcaccucgugaagaucccgacccaccggcacaucgucggcaagagcugccccaagccccaccgccugaaccacauggggaucugcuccugcgggcuguucaagcagcccggcgugccggugaaguggaagcgguga

SEQ ID NO: 735 - RNA, 1476 nt, Artificial Sequence
  derived and/or modified protein sequence (opt1) from LASV(Guinea Faranah;Clade IV)__AMZ00381__GPC
augggccagaucgugaccuucuuccaggaggucccccacgugaucgaggaggugaugaacaucguccugaucgcccucagcauccuggccgugcugaaggggcucuacaacguggcgaccugcggccugaucgggcugaucgccuuccuccugcugugcggccgcuccugcacgagcacccucuacaagggggucuacgagcugcaggcccuggagcucaacauggagacccugaacaugaccaugccgcuguccugcacgaagaacaacagccaccacuacaucauggugggcaacgagaccggccucgagcugacccugaccaacacguccaucaucaaccacaaguucugcaaccucagcgacgcccacaagaagaaccuguacaaccacgcccugauguccaucaucagcaccuuccaccucuccauccccaacuucaaccaguacgaggcgaugagcugcgacuucaacgggggcaagaucuccgugcaguacaaccugagccacuccuacgccgucgacgccgccaaccacugcgggaccguggcgaacggcauccugcagaccuucaugcggauggccuggggcgggagcuacaucgcccucgacuccggccacgggggcugggacugcaucaugagcuccuaccaguaccuggugauccagaacacgaccugggaggaccacugccaguucagccgccccucccccaucggguaccugggccuccugagccagcggacccgcgacaucuacaucagccggcgccugcucggcaccuucacguggacccuguccgacagcgaggggaaggacaccccgggcggguacugccugacccgguggaugcucaucgaggccgagcugaagugcuucggcaacacggccgucgcgaagugcaacgagaagcacgacgaggaguucugcgacaugcugcgccucuucgacuucaacaagcaggccauccagcggcugaaggccgaggcccagauguccauccagcugaucaacaaggccgugaacgcgcucaucaacgaccagcugaucaugaagaaccaccuccgcgacaucauggggauccccuacugcaacuacagcaaguacugguaccugaaccacaccaucaccggccggaccucccugcccaagugcuggcuggugagcaacggcuccuaccucaacgagacgcacuucagcgacgacaucgagcagcaggccgacaacaugaucaccgagaugcugcagaaggaguaccuggagcgccaggggaagacgccccucggccuggucgaccuguucguguucuccaccagcuucuaccugaucuccaucuuccuccaccugaucaagaucccgacccaccggcacaucgugggcaagagcugccccaagccccaccgccugaaccacaugggggucugcuccugcgggcucuacaagcagcccggcgugccggugcgguggaagcgcuga

SEQ ID NO: 736 - RNA, 1476 nt, Artificial Sequence
  derived and/or modified protein sequence (opt1) from LASV(GUINEA Z-185a;Clade IV)__AMZ00377__GPC
augggccagaucgugaccuucuuccaggaggucccccacgugaucgaggaggugaugaacaucguccugaucgcccucagcauccuggccgugcugaaggggcucuacaacguggcgaccugcggccugaucgggcuggucacguuccucuuccugugcggccgcuccugcagcaccucccuguacaaggggguguacgagcuccagacccuggagcugaacauggagacccucaacaugacgaugccgcugagcugcaccaagaacaacucccaccacuacaucauggugggcaacgagaccggccuggagcucacccugacgaacaccagcaucaucaaccacaaguucugcaaccuguccgacgcccacaagaagaaccucuacgaccacacccugaugagcaucaucuccaccuuccaccugagcauccccaacuucaaccaguacgaggccauguccugcgacuucaacgggggcaagaucagcguccaguacaaccucucccacagcuacgccguggacgccgcgaaccacugcgggacgguggccaacggcguccugcagaccuucaugcggauggccuggggcggguccuacaucgcccuggacagcggccgcgggaacugggacugcaucaugaccuccuaccaguaccucgugauccagaacaccacgugggaggaccacugccaguucagccggcccucccccaucggcuaccuggggcugcucagccagcgcacccgggacaucuacaucagccgccggcugcugggcaccuucaccuggacgcucuccgacagcgagggcaaggacacccccgggggcuacugccugacccgcuggaugcugaucgaggcggagcucaagugcuucgggaacaccgccguggccaagugcaacgagaagcacgacgaggaguucugcgacaugcugcggcuguucgacuucaacaagcaggccauccagcgccucaaggccgaggcgcagauguccauccagcugaucaacaaggccgucaacgcccugaucaacgaccagcucaucaugaagaaccaccuccgggacaucaugggcauccccuacugcaacuacagcaaguacugguaccugaaccacacggugaccgggaagaccucccugcccaagugcuggcuggugagcaacggcuccuaccugaacgagacccacuucagcgacgacaucgagcagcaggccgacaaccucaucacggagaugcugcagaaggaguacauggagcgccagggcaagaccccgcuggggcucgucgaccuguucguguucuccaccagcuucuaccugaucuccaucuuccugcaccucgugaagaucccgacccaccggcacaucgucggcaagcccugccccaagccccaccgccugaaccacauggggaucugcagcugcggcguguacaagcagccgggggugcccguccgguggaagcgcuga

SEQ ID NO: 737 - RNA, 1476 nt, Artificial Sequence
  derived and/or modified protein sequence (opt1) from MOPV/LASV reassortant(IGS-1;Clade IV)__AFY05576__GPC
augggccagaucgugaccuucuuccaggaggucccccacgugaucgaggaggugaugaacaucguccugaucgcccucagcgugcuggccgugcugaaggggcucuacaacuucgcgaccugcggccuggucgggcuggugacguuccuccugcugugcggccgcuccugcaccaccagccucuacaaggggguguacgagcugcagacccuggagcucaacauggagacgcugaacaugaccaugccgcuguccugcaccaagaacaacagccaccacuacaucauggucggcaacgagaccggccucgagcugacgcugaccaacaccuccaucaucaaccacaaguucugcaaccucagcgacgcccacaagaagaaccuguacgaccacgcccugauguccaucaucagcaccuuccaccucuccauccccaacuucaaccaguacgaggccaugagcugcgacuucaacgggggcaagaucuccgugcaguacaaccugagccacuccuacgccggggacgcggccaaccacugcggcacgguggccaacgggguccugcagaccuucaugcggauggccuggggcggcagcuacaucgcgcucgacuccgggcgcggcaacugggacugcaucaugaccagcuaccaguaccugaucauccagaacaccacgugggaggaccacugccaguucucccggcccagccccaucggguaccugggccuccugucccagcgcacccgggacaucuacaucagccgccggcugcucggcaccuucaccuggacgcugagcgacuccgagggggaggacaccccgggcggguacugccugacccgcuggaugcucaucgaggccgagcugaagugcuucggcaacaccgccguggccaagugcaacgagaagcacgacgaggaguucugcgacaugcugcggcuguucgacuucaacaagcaggccauccagcgccugaaggcggaggcccagaugagcauccagcugaucaacaaggccgugaacgcccucaucaacgaccagcugaucaugaagaaccaccuccgggacaucauggggauccccuacugcaacuacuccaaguacugguaccucaaccacacgaccaccggccgcaccagccugcccaagugcuggcuggucuccaacggcagcuaccucaacgagacgcacuucuccgacgacaucgagcagcaggccgacaacaugaucaccgagaugcugcagaaggaguacauggagcggcaggggaagacgccccugggccucguggaccuguucguguucagcaccuccuucuaccugaucagcaucuuccugcaccucgucaagaucccgacccaccgccacaucguggggaaguccugccccaagccccaccggcugaaccacaugggcaucugcagcugcgggcuguacaagcagcccggcgugccggucaaguggaagcgcuga

SEQ ID NO: 738 - RNA, 1476 nt, Artificial Sequence
  derived and/or modified protein sequence (opt1) from MOPV/LASV reassortant(IGS-11;Clade IV)__AFY05588__GPC
augggccagaucgugaccuucuuccaggaggucccccacgugaucgaggaggugaugaacaucguccugaucgcccucagcgugcuggccgugcugaaggggcucuacaacuucgcgaccugcggccuggucgggcuggugacguuccuccugcugugcggccgcuccugcaccaccagccucuacaaggggguguacgagcugcagacccuggagcucaacauggagacgcugaacaugaccaugccgcuguccugcaccaagaacaacagccaccacuacaucauggucggcaacgagaccggccucgagcugacgcugaccaacaccuccaucaucaaccacaaguucugcaaccucagcgacgcccacaagaagaaccuguacgaccacgcccugauguccaucaucagcaccuuccaccucuccauccccaacuucaaccaguacgaggccaugagcugcgacuucaacgggggcaagaucuccgugcaguacaaccugagccacuccuacgccggggacgcggccaaccacugcggcacgguggccaacgggguccugcagaccuucaugcggauggccuggggcggcagcuacaucgcgcucgacuccgggcgcggcaacugggacugcaucaugaccagcuaccaguaccugaucauccagaacaccacgugggaggaccacugccaguucucccggcccagccccaucggguaccugggccuccugucccagcgcacccgggaccuguacaucagccgccggcuccugggcaccuucaccuggacgcugagcgacuccgagggggaggacaccccgggcggguacugccucacccgcuggaugcugaucgaggccgagcugaagugcuucggcaacaccgccguggccaagugcaacgagaagcacgacgaggaguucugcgacaugcuccggcuguucgacuucaacaagcaggccauccagcgccugaaggcggaggcccagaugagcauccagcucaucaacaaggccgugaacgcccugaucaacgaccagcugaucaugaagaaccaccuccgggacaucauggggauccccuacugcaacuacuccaaguacugguaccugaaccacacgaccaccggccgcaccagccugcccaagugcuggcucgucuccaacggcagcuaccugaacgagacgcacuucuccgacgacaucgagcagcaggccgacaacaugaucaccgagaugcugcagaaggaguacauggagcggcaggggaagacgccccucggccugguggaccuguucguguucagcaccuccuucuaccugaucagcaucuuccuccaccuggucaagaucccgacccaccgccacaucguggggaaguccugccccaagccccaccggcugaaccacaugggcaucugcagcugcgggcucuacaagcagcccggcgugccggucaaguggaagcgcuga

SEQ ID NO: 739 - RNA, 1476 nt, Artificial Sequence
  derived and/or modified protein sequence (opt1) from MOPV/LASV reassortant(IGS-12;Clade IV)__AFY05590__GPC
augggccagaucgugaccuucuuccaggaggucccccacgugaucgaggaggugaugaacaucguccugaucgcccucagcgugcuggccgugcugaaggggcucuacaacuucgcgaccugcggccuggucgggcuggugacguuccuccugcugugcggccgcuccugcaccaccagccucuacaaggggguguacgagcugcagacccuggagcucaacauggagacgcugaacaugaccaugccgcuguccugcaccaagaacaacagccaccacuacaucauggucggcaacgagaccggccucgagcugacgcugaccaacaccuccaucaucaaccacaaguucugcaaccucagcgacgcccacaagaagaaccuguacgaccacgcccugauguccaucaucagcaccuuccaccucuccauccccaacuucaaccaguacgaggccaugagcugcgacuucaacgggggcaagaucuccgugcaguacaaccugagccacuccuacgccggggacgcggccaaccacugcggcacgguggccaacgggguccugcagaccuucaugcggauggccuggggcggcagcuacaucgcgcucgacuccgggcgcggcaacugggacugcaucaugaccagcuaccaguaccugaucauccagaacaccacgugggaggaccacugccaguucucccggcccagccccaucggguaccugggccuccugucccagcgcacccgggacauguacaucagccgccggcugcucggcaccuucaccuggacgcugagcgacuccgagggggaggacaccccgggcggguacugccugacccgcuggaugcucaucgaggccgagcugaagugcuucggcaacaccgccguggccaagugcaacgagaagcacgacgaggaguucugcgacaugcugcggcuguucgacuucaacaagcaggccauccagcgccugaaggcggaggcccagaugagcauccagcugaucaacaaggccgugaacgcccucaucaacgaccagcugaucaugaagaaccaccuccgggacaucauggggauccccuacugcaacuacuccaaguacugguaccucaaccacacgaccaccggccgcaccagccugcccaagugcuggcuggucuccaacggcagcuaccucaacgagacgcacuucuccgacgacaucgagcagcaggccgacaacaugaucaccgagaugcugcagaaggaguacauggagcggcaggggaagacgccccugggccucguggaccuguucguguucagcaccuccuucuaccugaucagcaucuuccugcaccucgucaagaucccgacccaccgccacaucguggggaaguccugccccaagccccaccggcugaaccacaugggcaucugcagcugcgggcuguacaagcagcccggcgugccggucaaguggaagcgcuga

SEQ ID NO: 740 - RNA, 1476 nt, Artificial Sequence
  derived and/or modified protein sequence (opt1) from LASV(LM032-SLE-2010;Clade IV)__AIT17802__GPC
augggccagaucgugaccuucuuccaggaggucccccacgugaucgaggaggugaugaacaucguccugaucgcccucagcauccuggccgugcugaaggggcucuacaaccuggcgaccugcggccugguggggcucgucacguuccugcugcucugcggccgcuccugcaccaccagccuguacaaggggguguacgagcugcagacccucgagcugaacauggagacgcugaacaugaccaugccgcucuccugcaccaagaacaacagccaccacuacaucauggugggcaacgagaccggccuggagcugacgcucaccaacaccuccaucaucaaccacaaguucugcaaccugagcgacgcccacaagaagaaccuguacaaccacgcccucauguccaucaucagcaccuuccaccuguccauccccaacuucaaccaguacgaggccaugagcugcgacuucaacgggggcaagaucuccguccaguacaaccugagccacuccuacgccggggacgcggccaaccacugcggcacgguggccaacggggugcuccagaccuucaugcggauggccuggggcggcagcuacaucgcgcuggacuccgggcgcgaccggugggacugcaucaugaccagcuaccaguaccugaucauccagaacaccacgugggaggaccacugccaguucucccgccccagccccaucggcuaccucgggcugcugucccagcggacccgcgacaucuacaucagccggcgccuccugggcaccuucaccuggacgcugagcgacuccgagggcaaggacacccccgggggcuacugccucacccgguggaugcugaucgaggccgagcugaagugcuucgggaacaccgccgucgccaagugcaacgagaagcacgacgaggaguucugcgacaugcuccgccuguucgacuucaacaagcaggccauccagcggcugaaggcggaggcccagaugagcauccagcucaucaacaaggccgugaacgcccugaucaacgaccagcugaucaugaagaaccaccuccgcgacaucaugggcauccccuacugcaacuacuccaaguacugguaccugaaccacacgaccaccgggaagaccagccugcccaagugcuggcucguguccaacggcagcuaccugaacgagacgcacuucuccgacgacaucgagcagcaggccgacaacaugaucaccgagaugcugcagaaggaguacauggagcggcucggcaagaccccgcuggggcuggucgaccuguucguguucagcaccuccuucuaccucaucagcaucuuccugcaccuggugaagaucccgacgcaccgccacaucgucggccgguccugccccaagccccaccgccucaaccacauggggaucugcagcugcggccuguacaagcagcccggggugccggugaaguggaagcgguga

SEQ ID NO: 741 - RNA, 1476 nt, Artificial Sequence
  derived and/or modified protein sequence (opt1) from LASV(LM222-SLE-2010;Clade IV)__AIT17806__GPC
augggccagaucgugaccuucuuccaggaggucccccacgugaucgaggaggugaugaacaucguccugaucgcccucagcauccuggccgugcugaaggggcucuacaacuucgcgaccugcggccugaucgggcuggugacguuccuccugcugugcggccgcuccugcaccaccagccucuacaagggggucuacgagcugcagacccuggagcucaacauggagacgcugaacaugaccaugccgcuguccugcaccaagaacaacagccaccacuacaucauggugggcaacgagaccggccucgagcugacgcugaccaacaccuccaucaucaaccacaaguucugcaaccucagcgacgcccacaagaagaaccuguacgaccacgcccugauguccaucaucagcaccuuccaccucuccauccccaacuucaaccaguacgaggccaugagcugcgacuucaacgggggcaagaucuccgugcaguacaaccugagccacuccuacgccggggacgcggccaaccacugcggcacggucgccaacggggugcugcagaccuucaugcggauggccuggggcggcagcuacaucgcgcucgacuccgggcgcggcaagugggacugcaucaugaccagcuaccaguaccugaucauccagaacaccacgugggaggaccacugccaguucucccggcccagccccaucggguaccugggccuccugucccagcgcacccgggacaucuacaucagccgccggcugcucggcaccuucaccuggacgcugagcgacuccgaggggaaggacaccccgggcggguacugccugacccgcuggaugcucaucgaggccgagcugaagugcuucggcaacaccgccguggccaagugcaacgagaagcacgacgaggaguucugcgacaugcugcggcuguucgacuucaacaagcaggccauccagcgccugaaggcggaggcccagaugagcauccagcugaucaacaaggccgucaacgcccucaucaacgaccagcugaucaugaagaaccaccuccgggacaucauggggauccccuacugcaacuacuccaaguacugguaccucaaccacacgaccaccggcaagaccagccugcccaagugcuggcugguguccaacggcagcuaccucaacgagacgcacuucuccgacgacaucgagcagcaggccgacaacaugaucaccgagaugcugcagaaggaguacauggagcgccaggggaagacgccccugggccucguggaccuguucgucuucagcaccuccuucuaccugaucagcaucuuccugcaccucgugaagaucccgacccaccggcacaucguggggaaguccugccccaagccccaccgccugaaccacaugggcaucugcagcugcgggcuguacaagcagcccggcgucccggugaaguggaagcgguga

SEQ ID NO: 742 - RNA, 1476 nt, Artificial Sequence
  derived and/or modified protein sequence (opt1) from LASV(LM395-SLE-2009;Clade IV)__AIT17810__GPC
augggccagaucgugaccuucuuccaggaggucccccacgugaucgaggaggugaugaacaucguccugaucgcccucagcauccuggccgugcugaaggggcucuacaaccuggcgaccugcggccugguggggcucgucacguuccugcugcucugcggccgcuccugcaccaccagccuguacaaggggguguacgagcugcagacccucgagcugaacauggagacgcugaacaugaccaugccgcucuccugcaccaaggacaacagccaccacuacauccgggugggcaacgagaccggccuggagcugacgcucaccaacaccuccauccugaaccacaaguucugcaaccugagcgacgcccacaagaagaaccucuacgaccacgcccugauguccaucaucagcaccuuccaccuguccauccccaacuucaaccaguacgaggccaugagcugcgacuucaacgggggccgcaucuccguccaguacaaccucagccacuccuacgccggggacgcggccaaccacugcggcacgguggccaacggggugcugcagaccuucaugcggauggccuggggcggcagcuacaucgcgcuggacuccgggcgcggccggugggacugcaucaugaccagcuaccaguaccucaucauccagaacaccacgugggaggaccacugccaguucucccgccccagccccaucggguaccugggccugcucucccagcggacccgcgacaucuacaucagccggcgccugcugggcaccuucaccuggacgcucagcgacuccgaggggaaggacaccccgggcggguacugccugacccgguggaugcugaucgaggccgagcucaagugcuucggcaacaccgccgucgccaagugcaacgagaagcacgacgaggaguucugcgacaugcugcgccuguucgacuucaacaagcaggccauccagcggcucaaggcggaggcccagaugagcauccagcugaucaacaaggccgugaacgcccugaucaacgaccagcucaucaugaagaaccaccuccgcgacaucauggggauccccuacugcaacuacuccaaguacugguaccugaaccacacgaccaccggcaagaccagccugccccggugcuggcugguguccaacggcagcuaccugaacgagacgcacuucuccgacgacaucgagcagcaggccgacaacaugaucaccgagaugcuccagaaggaguacauggagcgccaggggaagacgccccugggccuggucgaccuguucguguucagcaccuccuucuaccucaucagcaucuuccugcaccuggugaagaucccgacccaccggcacgucguggggaagcccugccccaagccccaccgccucaaccacaugggcaucugcuccugcgggcuguacaagcagccgggcgugcccgucaaguggaagcgguga

SEQ ID NO: 743 - RNA, 1476 nt, Artificial Sequence
  derived and/or modified protein sequence (opt1) from LASV(LM765-SLE-2012;Clade IV)__AIT17814__GPC
augggccagaucgugaccuucuuccaggaggucccccacgugaucgaggaggugaugaacaucguccugaucgcccucagcauccuggccgugcugaaggggcucuacaacuucgcgaccugcggccugguggggcuggucacguuccuccugcugugcggccgcuccugcaccaccagccucuacaaggggguguacgagcugcagacccuggagcucaacauggagacgcugaacaugaccaugccgcuguccugcaccaagaacaacagccaccacuacaucauggugggcaacgagaccggccucgagcugacgcugaccaacaccuccaucaucgaccacaaguucugcaaccucagcgacgcccaccggaagaaccuguacgaccacgcccugauguccaucaucagcaccuuccaccucuccauccccaacuucaaccaguacgaggccaugagcugcgacuucaacgggggcaagaucuccguccaguacaaccugagccacuccuacgccaaggacgcggccgaccacugcgggacgguggccaacggcgugcugcagaccuucaugcgcauggccuggggcgggagcuacaucgcgcucgacuccggccgggggcgcugggacugcaucaugaccagcuaccaguaccugaucauccagaacaccacgugggaggaccacugccaguucucccggcccagccccaucggcuaccuggggcuccugucccagcgcacccgggacaucuacaucagccgccggcugcucggcaccuucaccuggacgcugagcgacuccgagggcaaggacacccccgggggcuacugccugacccgcuggaugcucaucgaggccgagcugaagugcuucgggaacaccgccgucgccaagugcaacgagaagcacgacgaggaguucugcgacaugcugcggcuguucgacuucaacaagcaggccauccagcgccugaaggcggaggcccagaugagcauccagcugaucaacaaggccgugaacgcccucaucaacgaccagcugaucaugaagaaccaccuccgggacaucaugggcauccccuacugcaacuacuccaaguacugguaccucaaccacacgaccaccgggaagaccagccugcccaagugcuggcugguguccaacggcagcuaccucaacgagacgcacuucuccgacgacaucgagcagcaggccgacaacaugaucaccgagaugcugcagaaggaguacauggagcgccagggcaagaccccgcuggggcucgucgaccuguucguguucagcaccuccuucuaccugaucagcaucuuccugcaccucgugaagaucccgacgcaccggcacaucgucggcaagcccugccccaagccccaccgccugaaccacauggggaucugcuccugcggccuguacaagcagccgggggugcccgugaaguggaagcgguga

SEQ ID NO: 744 - RNA, 1476 nt, Artificial Sequence
  derived and/or modified protein sequence (opt1) from LASV(LM774-SLE-2012;Clade IV)__AIT17820__GPC
augggccagaucgugaccuucuuccaggaggucccccacgugaucgaggaggugaugaacaucguccugaucgcccucagcauccuggccgugcugaaggggcucuacaacuucgcgaccugcggccugguggggcuggucacguuccuccugcugugcggccgcuccugcaccaccagccucuacaaggggguguacgagcugcagacccuggagcucaacauggagacgcugaacaugaccaugccgcuguccugcaccaagaacaacagccaccacuacaucauggugggcaacgagaccggccucgagcugacgcugaccaacaccuccaucaucaaccacaaguucugcaaccucagcgacgcccacaagaagaaccuguacgaccacgcccugauguccaucaucagcaccuuccaccucuccauccccaacuucaaccaguacgaggccaugagcugcgacuucaacgggggcaagaucuccguccaguacaaccugagccacuccuacgccgaggacgcggccaaccacugcgggacgguggccaacggcgugcugcagaccuucaugcggauggccuggggcgggagcuacaucgcgcucgacuccggccgcgggaacugggacugcaucaugaccagcuaccaguaccugaucauccagaacaccacgugggaggaccacugccaguucucccggcccagccccaucggcuaccuggggcuccugucccagcgcacccgggacaucuacaucagccgccggcugcucggcaccuucaccuggacgcugagcgacuccgagggcaaggacacccccgggggcuacugccugacccgcuggaugcucaucgaggccgagcugaagugcuucgggaacaccgccgucgccaagugcaacgagaagcacgacgaggaguucugcgacaugcugcggcuguucgacuucaacaagcaggccauccagcgccugaaggcggaggcccagaugagcauccagcugaucaacaaggccgugaacgcccucaucaacgaccagcugaucaugaagaaccaccuccgggacaucaugggcauccccuacugcaacuacuccaaguacugguaccucaaccacacgaccaccgggaagaccagccugcccaagugcuggcugguguccaacggcagcuaccucaacgagacgcacuucuccgacgacaucgagcagcaggccgacaacaugaucaccgagaugcugcagaaggaguacauggagcgccagggcaagaccccgcuggggcucgucgaccuguucguguucagcaccuccuucuaccugaucagcaucuuccugcaccucgugaagaucccgacgcaccggcacaucgucggcaaguccugccccaagccccaccgccugaaccacauggggaucugcagcugcggccuguacaagcagcccggggugccggugaaguggaagcgguga

SEQ ID NO: 745 - RNA, 1476 nt, Artificial Sequence
  derived and/or modified protein sequence (opt1) from LASV(LM776-SLE-2012;Clade IV)__AIT17824__GPC
augggccagaucgugaccuucuuccaggaggucccccacgugaucgaggaggugaugaacaucguccugaucgcccucagcauccuggccgugcugaaggggcucuacaacuucgcgaccugcggccugguggggcuggucacguuccuccugcugugcggccgcuccugcaccaccagcguguacaaggggguguacgagcuccagacccuggagcugaacauggagacgcucaacaugaccaugccgcuguccugcaccaagaacaacagccaccacuacaucauggucggcaacgagaccggccuggagcucacgcugaccaacaccuccaucaucaaccacaaguucugcaaccugagcgacgcccacaagaagaaccucuacgaccacgcccugauguccaucaucagcaccuuccaccuguccauccccaacuucaaccaguacgaggccaugagcugcgacuucaacgggggcaagaucuccgugcaguacaaccucagccacuccuacgccggggacgcggccaaccacugcggcacgguggccaacgggguccugcagaccuucaugcggauggccuggggcggcagcuacaucgcgcuggacuccgggcacggcaagugggacugcaucaugaccagcuaccaguaccucaucauccagaacaccacgugggaggaccacugccaguucucccgccccagccccaucggguaccugggccugcucucccagcggacccgcgacaucuacaucagccggcgccugcugggcaccuucaccuggacgcucagcgacuccgaggggaaggacaccccgggcggguacugccugacccgguggaugcugaucgaggccgagcucaagugcuucggcaacaccgccguggccaagugcaacgagaagcacgacgaggaguucugcgacaugcugcgccuguucgacuucaacaagcaggccauccagcggcucaaggcggaggcccagaugagcauccagcugaucaacaaggccgugaacgcccugaucaacgaccagcucaucaugaagaaccaccuccgcgacaucauggggauccccuacugcaacuacuccaaguacugguaccugaaccacacgaccaccggcaagaccagccugcccaagugcuggcuggucuccaacggcagcuaccugaacgagacgcacuucuccgacgacaucgagcagcaggccgacaacaugaucaccgagaugcuccagaaggaguacauggagcggcaggggaagacgccccugggccugguggaccucuucguguucagcaccuccuucuaccugaucagcaucuuccugcaccuggucaagaucccgacccaccgccacaucguggggaaguccugccccaagccccaccggcucaaccacaugggcaucugcagcugcgggcuguacaagcagcccggcgugccgguccgcuggaagcgguga

SEQ ID NO: 746 - RNA, 1476 nt, Artificial Sequence
  derived and/or modified protein sequence (opt1) from LASV(LM778-SLE-2012;Clade IV)__AIT17828__GPC
augggccagaucgugaccuucuuccaggaggucccccacgugaucgaggaggugaugaacaucguccugaucgcccucagcauccuggccgugcugaaggggcucuacaacuucgcgaccugcggccugguggggcuggucacguuccuccugcugugcggccgcuccugcaccaccagccucuacaagggggacuacgagcugcagacccuggagcucaacauggagacgcugaacaugaccaugccgcuguccugcaccaagaacaacagccaccacuacaucauggugggcaacgagaccggccucgagcugacgcugaccaacaccuccaucaucaaccacaaguucugcaaccucagcgacgcccacaagaagaaccuguacgaccacgcccugauguccaucaucagcaccuuccaccucuccauccccaacuucaaccaguacgaggccaugagcugcgacuucaacgggggcaagaucuccgugcaguacaaccugagccacuccuacgccggggacgcggccaaccacugcggcacggucgccaacggggugcugcagaccuucaugcggauggccuggggcggcagcuacaucgcgcucgacuccgggcgcggcaacugggacugcaucaugaccagcuaccaguaccugaucauccagaacaccacgugggaggaccacugccaguucucccggcccagccccaucggguaccugggccuccugucccagcgcacccgggacaucuacaucagccgccggcugcucggcaccuucaccuggacgcugagcgacuccgaggggaaggacaccccgggcggguacugccugacccgcuggaugcucaucgaggccgagcugaagugcuucggcaacaccgccguggccaagugcaacgagaagcacgacgaggaguucugcgacaugcugcggcuguucgacuucaacaagcaggccauccagcgccugaaggcggaggcccagaugagcauccagcugaucaacaaggccgucaacgcccucaucaacgaccagcugaucaugaagaaccaccuccgggacaucauggggauccccuacugcaacuacuccaaguacugguaccucaaccacacgaccaccggcaagaccagccugcccaagugcuggcugguguccaacggcagcuaccucaacgagacgcacuucuccgacgacaucgagcagcaggccgacaacaugaucaccgagaugcugcagaaggaguacauggagcgccaggggaagacgccccugggccucguggaccuguucgucuucagcaccuccuucuaccugaucagcaucuuccugcaccucgugaagaucccgacccaccggcacaucguggggaaguccugccccaagccccaccgccugaaccacaugggcaucugcagcugcgggcuguacaagcagcccggcgucccggugaaguggaagcgguga

SEQ ID NO: 747 - RNA, 1476 nt, Artificial Sequence
  derived and/or modified protein sequence (opt1) from LASV(Mad39;Clade IV)__ANH09722__GPC
augggccagaucgugaccuucuuccaggaggucccccacgugaucgaggaggugaugaacaucguccugaucgcccucagcauccuggccgugcugaaggggcucuacaacguggcgaccugcggccugaucgggcuggucacguuccuccugcugugcggccgcuccugcaccaccacccucuacaaggggguguacgagcugcaggcccuggagcucaacauggagacgcugaacaugaccaugccgcugagcugcaccaagaacaacucccaccacuacauccgggugggcaacgagaccggccucgagcugacgcugaccaacaccagccucaucaaccacaaguucugcaaccuguccgacgcccacaagaagaaccuguacgaccacgcccucaugagcaucaucuccaccuuccaccugagcauccccaacuucaaccaguacgaggccauguccugcgacuucaacgacgggaagaucagcguccaguacaaccugucccacacguacgcgggcgacaccgccaaccacugcgggaccguggccaacggcgugcuccagaccuucaugcgcauggccuggggcgggagcuacaucgcgcuggacuccggccgcgggggcugggacugcaucaugacgagcuaccaguaccugaucauccagaacaccaccugggaggaccacugccaguucucccggcccagccccaucggguaccucggccugcugucccagcggacccgcgacaucuacaucagccggcgccuccugggcacguucaccuggacccuguccgacagcgaggggaaggacaccccgggcggguacugccucacgcgguggaugcugaucgaggccgagcugaagugcuucggcaacaccgccgucgccaagugcaacgagaagcacgacgaggaguucugcgacaugcuccgccuguucgacuucaacaagcaggccauccagcggcugaaggcggaggcccagaugagcauccagcucaucaacaaggccgugaacgcccugaucaacgaccagcugaucaugaagaaccaccuccgcgacaucauggggauccccuacugcaacuacuccaaguacugguaccugaaccacaccgugaccggcaagacgagccugcccaagugcuggcucgucuccaacggcagcuaccugaacgagacccacuucuccgacgacaucgagcagcaggccgacaacaugaucaccgagaugcugcagaaggaguacauggagcggcaggggaagacgccccucggccugguggaccuguucguguucagcaccuccuucuaccugaucagcaucuuccuccaccuggucaagaucccgacccaccgccacgugguggggaagcccugccccaagccccaccggcugaaccacaugggcaucugcuccugcggguucuacaagcagccgggcguccccgugcgcuggaagcgguga

SEQ ID NO: 748 - RNA, 1476 nt, Artificial Sequence
  derived and/or modified protein sequence (opt1) from LASV(Mad41;Clade IV)__ANH09724__GPC
augggccagaucgugaccuucuuccaggaggucccccacgugaucgaggaggugaugaacaucguccugaucgcccucagcauccuggccgugcugaaggggcucuacaacguggcgaccugcggccugaucgggcuggucacguuccuccugcugugcggccgcuccugcaccaccacccucuacaaggggguguacgagcugcaggcccuggagcucaacauggagacgcugaacaugaccaugccgcugagcugcaccaagaacgacucccaccacuacaucauggugggcaacgagaccggccucgagcugacgcugaccaacaccagcaucaucucccacaaguucugcaaccucagcgacgcccacaagcagaaccuguacgaccacgcccugauguccaucaucagcaccuuccaccucuccauccccaacuucaaccaguacgaggccaugagcugcgacuucaacgggggcaagaucuccguccaguacaaccugagccacacguacgcgggggacgccgccaaccacugcggcaccguggccaacggggugcugcagaccuucaugcggauggcguggggcggcuccuacaucgcccucgacagcgggcgcggcgggugggacugcaucaugaccuccuaccaguaccugaucauccagaacacgaccugggaggaccacugccaguucagccggcccucccccaucggcuaccugggccuccugagccagcgcacccgggacaucuacaucucccgccggcugcucgggaccuucacguggacccugagcgacagcgagggcaaggacacccccgggggcuacugccugacccgcuggaugcucaucgaggccgagcugaagugcuucgggaacacggccgucgccaagugcaacgagaagcacgacgaggaguucugcgacaugcugcggcuguucgacuucaacaagcaggcgauccagcgccugaaggccgaggcccagauguccauccagcugaucaacaaggccgugaacgcccucaucaacgaccagcugaucaugaagaaccaccuccgggacaucaugggcauccccuacugcaacuacagcaaguacugguaccucaaccacaccgugaccggcaagaccucccugcccaagugcuggcuggucagcaacggguccuaccucaacgagacgcacuucagcgacgacaucgagcagcaggcggacaacaugaucaccgagaugcugcagaaggaguacauggagcgccagggcaagaccccgcuggggcucguggaccuguucguguucuccaccagcuucuaccugaucuccaucuuccugcaccucgucaagaucccgacgcaccggcacguggugggcaagcccugccccaagccccaccgccugaaccacauggggaucugcagcugcggcuucuacggccagccggggguccccgugcgguggaagcgcuga

SEQ ID NO: 749 - RNA, 1476 nt, Artificial Sequence
  derived and/or modified protein sequence (opt1) from LASV(Mad63;Clade IV)__ANH09728__GPC
augggccagaucgugaccuucuuccaggaggucccccacgugaucgaggaggugaugaacaucguccugaucgcccucagcgugcuggccgugcugaaggggcucuacaacgucgcgaccugcggccugaucgggcuggugacguuccuccugcugugcggccgcuccugcaccaccacccucuacaaggggguguacgagcugcaggcccuggagcucaacaugggcacgcugaacaugaccaugccgcugagcugcaccaagaacaacucccaccacuacaucauggucggcaacgagaccgggcucgagcugacgcugaccaacaccagcaucaucaaccacaaguucugcaaccucuccgacgcccacaagaaggaccuguacgaccacgcccugaugagcaucaucuccaccuuccaccucagcgugcccaacuucaaccaguacgaggccauguccugcgacuucaacggcgggaagaucagcgugcaguacaaccugucccacgcguacgccggcgacacggccaaccacugcgggaccgucgccaacggcgugcugcagaccuucaugcggauggcguggggcgggagcuacaucgcccucgacuccggccgcgggggcugggacugcaucaugaccagcuaccaguaccugaucauccagaacacgaccugggaggaccacugccaguucucccggcccagccccaucggcuaccuggggcuccugucccagcgcacccgggacaucuacaucagccgccggcugcucggcaccuucacguggacccuguccgacagcgagggggaguacaccccgggcggguacugccugacccgcuggaugcucaucgaggccgagcugaagugcuucggcaacacggccguggccaagugcaacgagaagcacgacgaggaguucugcgacaugcugcggcuguucgacuucaacaagcaggcgauccagcgccugaaggccgaggcccagaugagcauccagcugaucaacaaggccgucaacgcccucaucaacgaccagcugaucaugaagaaccaccuccgggacaucaugggcauccccuacugcaacuacuccaaguacugguaccucaaccacaccgugaccgggaagaccagccugcccaagugcuggcugguguccaacggcagcuaccucaacgagacgcacuucuccgacgacaucgagcagcaggcggacaacaugaucaccgagaugcugcagaaggaguacauggagcgccaggggaagacgccccugggccucgucgaccuguucguguucagcaccuccuucuaccugaucagcaucuuccugcaccucgugaagaucccgacccaccggcacgucguggggaagcccugccccaagccccaccgccugaaccacaugggcaucugcuccugcggcuucuacaagcagccgggggugcccguccgguggaagcgcuga

SEQ ID NO: 750 - RNA, 1476 nt, Artificial Sequence
  derived and/or modified protein sequence (opt1) from LASV(Mad69;Clade IV)__ANH09730__GPC
augggccagaucgugaccuucuuccaggaggucccccacgugaucgaggaggugaugaacaucguccugaucgcccucagcgugcuggccgugcugaaggggcucuacaacgucgcgaccugcggccugaucgggcuggugacguuccuccugcugugcggccgcuccugcaccaccacccucuacaaggggguguacgagcugcaggcccuggagcucaacauggagacgcugaacaugaccaugccgcugagcugcaccaagaacaacucccaccacuacaucauggucggcaacgagaccggccucgagcugacgcugaccaacaccagcaucaucaaccacaaguucugcaaccucuccgacgcccacaagaagaaccuguacgaccacgcccugaugagcaucaucuccaccuuccaccucagcauccccaacuucaaccaguacgaggccauguccugcgacuucaaccaggggaagaucagcgugcaguacaaccugucccacgcguacgccggcgacgccgccaaccacugcgggacgguggcgaacggcguccugcagaccuucaugcggauggccuggggcgggagcuacaucgcccucgacuccggccgcgggggcugggacugcaucaugaccagcuaccaguaccugaucauccagaacaccacgugggagaaccacugccaguucucccggcccagccccaucggguaccugggccuccugucccagcgcacccgggacaucuacaucagccgccggcugcucggcaccuucaccuggacgcuguccgacagcgaggggaagggcacccccgggggcuacugccugacccgcuggaugcucaucgaggccgagcugaagugcuucgggaacaccgccguggcgaagugcaacgagaagcacgacgaggaguucugcgacaugcugcggcuguucgacuucaacaagcaggccauccagcgcuucaaggccgaggcccagaugagcauccagcugaucaacaaggccgugaacgcgcugaucaacgaccagcucaucaugaagaaccaccuccgggacaucaugggcauccccuacugcaacuacuccaaguacugguaccugaaccacacggucaccggcaagaccagccuccccaagugcuggcugguguccaacgggagcuaccugaacgagacccacuucuccgacgacaucgagcagcaggccgacaacaugaucacggagaugcuccagaaggaguacauggagcgccagggccggaccccgcuggggcugguggaccucuucgucuucagcaccuccuucuaccugaucagcaucuuccugcaccuggugaagaucccgacccaccgccacguggucggcaagcccugccccaagccccaccggcucaaccacauggggaucugcuccugcggcuucuacaagcagccgggcgugcccgugcgcuggaagcgguga

SEQ ID NO: 751 - RNA, 1476 nt, Artificial Sequence
  derived and/or modified protein sequence (opt1) from LASV(Mad83;Clade IV)__ANH09732__GPC
augggccagaucgugaccuucuuccaggaggucccccacgugaucgaggaggugaugaacaucguccugaucgcccucagcauccuggccgugcugaaggggguguacaacgucgcgaccugcggccucaucgggcuggugacguuccugcuccuguccggccgcagcugcaccaccaccaucuacaaggggguguacgagcugcaggcccucgagcugaacauggagacgcugaacaugaccaugccgcucuccugcaccaagaacaacagccaccacuacaucauggucggcaacgagaccggccuggagcugacgcucaccaacaccuccaucaucaaccacaaguucugcaaccugagcgacgcccacaagaagaaccuguacgaccacgcccucauguccaucaucagcaccuuccaccuguccauccccaacuucaaccaguacgaggccaugagcugcgacuucaacgggggcaagaucuccgugcaguacaaccugagccacacguacgcgggggacgccgccaaccacugcggcaccguggccaacgggguccuccagaccuucaugcggauggcguggggcggcuccuacaucgcccuggacagcgggcacggcgggugggacugcaucaugaccuccuaccaguaccugaucauccagaacacgaccugggagaaccacugccaguucagccgccccucccccaucggcuaccucggccugcugagccagcggacccgcgacaucuacaucucccggcgccuccuggggaccuucacguggacccugagcgacagcgagggcaaggacacccccgggggcuacugccucacccgguggaugcugaucgaggccgagcugaagugcuucgggaacacggccguggccaagugcaacgagaagcacgacgaggaguucugcgacaugcuccgccuguucgacuucaacaagcaggcgauccagcggcugaaggccgaggcccagauguccauccagcucaucaacaaggccgugaacgcccugaucaacgaccagcugaucaugaagaaccaccuccgcgacaucaugggcauccccuacugcaacuacagcaaguacugguaccugaaccacaccgucaccggcaagaccucccugcccaagugcuggcucgugagcaacggguccuaccugaacgagacgcacuucagcgacgacaucgagcagcaggcggacaacaugaucaccgagaugcugcagaaggaguacauggagcggcagggcaagaccccgcucgggcugguggaccuguucgucuucuccaccagcuucuaccucaucuccaucuuccugcaccuggugaagaucccgacgcaccgccacaucgugggcaagcccugccccaagccccaccggcugaaccacauggggaucugcagcugcggcuucuacaagcagccgggcguccccgugcgcuggaagcgguga

SEQ ID NO: 752 - RNA, 1476 nt, Artificial Sequence
  derived and/or modified protein sequence (opt1) from LASV(NL;Clade IV)__AAO59512__GPC
augggccagaucgugaccuucuuccaggaggucccccacgugaucgaggaggugaugaacaucguccugaucgcccucagcauccuggccgugcugaaggggcucuacaacuucgcgaccugcggccugguggggcuggucgccuuccuccugcugugcggccgcuccugcacgagcucccucuacaaggggguguacgagcugcagacccuggagcucaacauggagacccugaacaugaccaugccgcugagcugcacgaagaacaacucccaccacuacauccgggugggcaacgagaccggccucgagcugacccugaccaacacgagcaucaucaaccacaaguucugcaaccucuccgacgcccacaagaagaaccuguacgaccacgcccugaugagcaucaucuccaccuuccaccucagcauccccaacuucaaccaguacgaggccauguccugcgacuucaacgggggcaagaucagcguccaguacaaccugucccacagcuacgcgguggacgccgccaagcacugcgggaccguggccaacggcguccugcagaccuucaugcgcauggcguggggcggguccuacaucgcccucgacagcggccacgggcggugggacugcaucaugacguccuaccaguaccugaucauccagaacaccaccugggaggaccacugccaguucagccgccccucccccaucggcuaccuggggcuccugagccagcggacccgcgacaucuacaucagccggcgccugcucggcacguucaccuggacccuguccgacagcgagggcaaggacacccccgggggcuacugccugacgcgguggaugcucaucgaggccgagcugaagugcuucgggaacaccgccguggccaagugcaacgagaagcacgacgaggaguucugcgacaugcugcgccucuucgacuucaacaagcaggcgauccagcggcugaagaccgaggcccagauguccauccagcugaucaacaaggccgugaacgcccucaucaacgaccagcugaucaugaagaaccaccuccgcgacaucaugggcauccccuacugcaacuacagccgguacugguaccugaaccacaccacgaccgggaagaccucccugcccaagugcuggcuggucagcaacggcuccuaccucaacgagacccgcuucagcgacgacaucgagcagcaggccgacaacaugaucacggagaugcugcagaaggaguacauggagcggcagggcaagaccccgcuggggcucguggaccuguucguguucuccaccagcuucuaccugaucuccaucuuccugcaccucgucaagaucccgacccaccgccacaucgugggcaagagcugccccaagccccaccggcugaaccacauggggaucugcuccugcggccuguacaagcagcccggggugccggucaaguggaagcgcuga

SEQ ID NO: 753 - RNA, 1476 nt, Artificial Sequence
  derived and/or modified protein sequence (opt1) from LASV(Z0947-SLE-2011;Clade IV)__AIT17840__GPC
augggccagaucgugaccuucuuccaggaggucccccacgugaucgaggaggugaugaacaucguccugaucgcccucagcauccuggccgugcugaaggggcucuacaacuucgcgaccugcggccugguggggcuggucacguuccuccugcugugcggccgcuccugcaccaucagccucuacaaggggguguacgagcugcagacccuggagcucaacauggagacccugaacaugacgaugccgcuguccugcaccaagaacaacagccaccacuacaucauggugggcaacgagaccggccucgagcugacccugacgaacaccuccaucaucaaccacaaguucugcaaccucagcgacgcccacaagaagaaccuguacgaccacgcccugauguccaucaucagcaccuuccaccucuccauccccaacuucaaccaguacgaggccaugagcugcgacuucaacgggggcaagaucuccguccaguacaaccugagccacuccuacgccggggacgcggccaaccacugcggcaccguggccaacggggugcugcagacguucaugcggauggccuggggcggcagcuacaucgcgcucgacuccgggcgcgaccggugggacugcaucaugaccagcuaccaguaccugaucauccagaacaccaccugggaggaccacugccaguucucccgccccagccccaucggcuaccuggggcuccugucccagcggacgcgcgacaucuacaucagccggcgccugcucggcaccuucaccuggacccugagcgacuccgagggcaaggacacgcccgggggcuacugccugacccgguggaugcucaucgaggccgagcugaagugcuucgggaacaccgccgucgccaagugcaacgagaagcacgacgaggaguucugcgacaugcugcgccucuucgacuucaacaagcaggccauccagcggcugaaggcggaggcccagaugagcauccagcugaucaacaaggccgugaacgcccucaucaacgaccagcugaucaugaagaaccaccuccgcgacaucaugggcauccccuacugcaacuacuccaaguacugguaccugaaccacaccacgaccgggaagaccagccugcccaagugcuggcugguguccaacggcagcuaccucaacgagacccacuucuccgacgacaucgagcagcaggccgacaacaugaucacggagaugcugcagaaggaguacauggagcggcagggcaagaccccgcuggggcucgucgaccuguucguguucagcaccuccuucuaccugaucagcaucuuccugcaccucgugaagaucccgacccaccgccacaucgucggcaagcccugccccaagccccaccggcugaaccacauggggaucugcuccugcggccuguacaagcagccgggggugcccgugaaguggaagcgcuga

SEQ ID NO: 754 - RNA, 1476 nt, Artificial Sequence
  derived and/or modified protein sequence (opt1) from LASV(Z0948-SLE-2011;Clade IV)__AIT17844__GPC
augggccagaucgugaccuucuuccaggaggucccccacgugaucgaggaggugaugaacaucguccugaucgcccucagcauccuggccgugcugaaggggcucuacaacuucgcgaccugcggccugguggggcuggucacguuccuccugcugugcggccgcuccugcaccaucagccucuacaaggggguguacgagcugcagacccuggagcucaacauggagacccugaacaugacgaugccgcuguccugcaccaagaacaacagccaccacuacaucauggugggcaacgagaccggccucgagcugacccugacgaacaccuccaucaucaaccacaaguucugcaaccucagcgacgcccacaagaagaaccuguacgaccacgcccugauguccaucaucagcaccuuccaccucuccauccccaacuucaaccaguacgaggccaugagcugcgacuucaacgggggcaagaucuccguccaguacaaccugagccacuccuacgccggggacgcggccaaccacugcggcaccguggccaacggggugcugcagacguucaugcggauggccuggggcggcagcuacaucgcgcucgacuccgggcgcgaccggugggacugcaucaugaccagcuaccaguaccugaucauccagaacaccaccugggaggaccacugccaguucucccgccccagccccaucggcuaccuggggcuccugucccagcggacgcgcgacaucuacaucagccggcgccugcucggcaccuucaccuggacccugagcgacuccgagggcaaggacacgcccgggggcuacugccugacccgguggaugcucaucgaggccgagcugaagugcuucgggaacaccgccgucgccaagugcaacgagaagcacgacgaggaguucugcgacaugcugcgccucuucgacuucaacaagcaggccauccagcggcugaaggcggaggcccagaugagcauccagcugaucaaccgcgccgugaacgcccucaucaacgaccagcugaucaugaagaaccaccuccgggacaucaugggcauccccuacugcaacuacuccaaguacugguaccugaaccacaccacgaccgggaagaccagccugcccaagugcuggcugguguccaacggcagcuaccucaacgagacccacuucuccgacgacaucgagcagcaggccgacaacaugaucacggagaugcugcagaaggaguacauggagcgccagggcaagaccccgcuggggcucgucgaccuguucguguucagcaccuccuucuaccugaucagcaucuuccugcaccucgugaagaucccgacccaccggcacaucgucggcaagcccugccccaagccccaccgccugaaccacauggggaucugcuccugcggccuguacaagcagccgggggugcccgugaaguggaagcgguga

SEQ ID NO: 755 - RNA, 1476 nt, Artificial Sequence
  derived and/or modified protein sequence (opt1) from LASV(Z148;Clade IV)__AAT49008__GPC
augggccagaucgugaccuucuuccaggaggucccccacgugaucgaggaggugaugaacaucguccugaucgcccucagcauccuggccgugcugaaggggcucuacaacguggcgaccugcggccugaucgggcuggucacguuccucuuccugugcggccgcuccugcagcaccacccuguacaaggggguguacgagcuccagacccuggagcugaacauggagacgcucaacaugaccaugccgcuguccugcaccaagaacaacagccaccacuacaucauggugggcaacgagaccggccuggagcucacgcugaccaacaccuccaucaucaaccacaaguucugcaaccugagcgacgcccacaagaagaaccucuacgaccacacccugauguccaucaucagcacguuccaccuguccauccccaacuucaaccaguacgaggccaugagcugcgacuucaacgggggcaagaucuccguccaguacaaccucagccacuccuacgccguggacgccgcgaaccacugcgggaccguggccaacggcguccugcagaccuucaugcggauggccuggggcgggagcuacaucgcccuggacuccggccgcgggaacugggacugcaucaugaccagcuaccaguaccucaucauccagaacacgaccugggaggaccacugccaguucucccggcccagccccaucggcuaccuggggcugcucucccagcgcacccgggacaucuacaucagccgccggcugcugggcaccuucacguggacccucagcgacuccgagggcaaggacacccccgggggcuacugccugacccgcuggaugcugaucgaggcggagcucaagugcuucgggaacacggccguggccaagugcaacgagaagcacgacgaggaguucugcgacaugcugcggcuguucgacuucaacaagcaggccauccagcgccucaaggccgaggcgcagaugagcauccagcugaucaacaaggccgugaacgcccugaucaacgaccagcucaucaugaagaaccaccuccgggacaucaugggcauccccuacugcaacuacucccgcuacugguaccugaaccacaccgucaccgggaagaccagccugcccaagugcuggcugguguccaacggcagcuaccugaacgagacgcacuucuccgacgacaucgagcagcaggccgacaaccucaucaccgagaugcugcagaaggaguacauggagcggcagggcaagaccccgcuggggcucguggaccuguucgucuucagcaccuccuucuaccugaucagcaucuuccugcaccucgugaagaucccgacgcaccgccacaucgugggcaagcccugccccaagccccaccggcugaaccacauggggaucugcuccugcggcgucuacaagcagccgggggugcccgugcgcuggaagcgguga

SEQ ID NO: 756 - RNA, 1476 nt, Artificial Sequence
  derived and/or modified protein sequence (opt1) from LASV(Bamba-R114;Clade V)__AHC95555__GPC
augggccagaucgugaccuucuuccaggaggucccccacgugaucgaggaggugaugaacaucguccugaucgcccucagcauccuggccgugcugaaggggcucuacaacaucgcgaccugcggccugaucgggcuggugacguuccuccugcugugcggccgcuccugcagcuccaaccucuacaagggggucuacgagcugcagagccuggaccucaacauggagacccugaacaugaccaugccgcuguccugcaccaagaacaacagccaccacuacauccgggccggcaacgagacgggccucgagcugacccugaccaacaccucccucaucaaccacaaguucugcaaccugagcgacgcccacaagaagaaccuguacgaccacacgcucauguccaucaucagcaccuuccaccuguccauccccaacuucaaccaguacgaggccaugagcugcgacuucaacgggggcaagaucuccgugcaguacaaccugagccacgccuacgcgaucgacgccgccgagcacugcgggaccguggccaacggcguccuccagaccuucaugcgcauggcguggggcggguccuacaucgcccuggacagcggccgggggaacugggacugcaucaugacguccuaccaguaccugaucauccagaacaccaccugggaggaccacugccaguucagccgccccucccccaucggcuaccucgggcugcugagccagcggacccgcgacaucuacaucagccggcgccuccugggcacguucaccuggacccuguccgacagcgagggcaacgccacccccgggggcuacugccucacgcgguggaugcugaucgaggccgagcugaagugcuucgggaacaccgccguggcgaagugcaacgagaagcacgacgaggaguucugcgacaugcuccgccuguucgacuucaacaagcaggccaucucccggcucaagagcgaggcccagauguccauccagcugaucaacaaggccgugaacgcccugaucaacgaccagcugaucaugaagaaccaccuccgcgacaucaugggcauccccuacugcaacuacagcaaguacugguaccugaaccacaccaucaccgggcggacgucccugcccaagugcuggcucgucagcaacggcuccuaccugaacgagacccacuucagcgacgacaucgagcagcaggcggacaacaugaucaccgagaugcugcagaaggaguacauggagcgccagggcaagaccccgcucgggcugguggaccuguucguguucuccacgagcuucuaccugaucuccaucuuccuccaccuggucaagaucccgacccaccggcacaucgugggcaagcccugccccaagccccaccgccugaaccacauggggaucugcagcugcggccucuacaagcagccgggggugccccugaaguggaagcgguga

SEQ ID NO: 757 - RNA, 1476 nt, Artificial Sequence
  derived and/or modified protein sequence (opt1) from LASV(Komina-R16;Clade V)__AHC95557__GPC
augggccagaucgugaccuucuuccaggaggucccccacgugaucgaggaggugaugaacaucguccugaucgcccucagcauccuggccgugcugaaggggcucuacaacaucgcgaccugcggccugaucgggcuggugacguucuuccuccugugcggccgcuccugcagcuccaaccuguacaagggggucuacgagcuccagagccuggaccugaacauggagacccucaacaugaccaugccgcuguccugcaccaagaacaacagccaccacuacauccgggugggcaacgagacgggccuggagcucacccugaccaacaccucccugcucaaccacaaguucugcaaccugagcgacgcccacaagcgcaaccuguacgaccacgcccucauguccaucaucagcacguuccaccuguccauccccaacuucaaccaguacgaggccaugagcugcgacuucaacgggggcaagaucaccgugcaguacaaccugucccacagcuacgccggggacaccgcgaagcacugcggcaccaucgccaacgggguccuccagacguucaugcggauggccuggggcggcuccuacaucgcccuggacagcgggcacggcaacugggacugcaucaugaccuccuaccaguaccugaucauccagaacaccaccugggaggaccacugccaguucagccgccccucccccaucggguaccucggccugcugagccagcggacgcgcgacaucuacaucagccggcgccuccugggcaccuucaccuggacccuguccgacagcgaggggaacgcgacgccgggcggguacugccucacccgguggaugcugaucgaggccgagcugaagugcuucggcaacaccgccguggccaagugcaacgagaagcacgacgaggaguucugcgacaugcuccgccuguucgacuucaacaagcaggccaucucccggcugcgcagcgaggcgcagauguccauccagcucaucaacaaggccgugaacgcccugaucaacgaccagcugaucaugaagaaccaccuccgggacaucauggggauccccuacugcaacuacagcaaguacugguaccugaaccacaccgucacgggccgcaccucccugcccaagugcuggcucgugagcaacggcuccuaccugaacgagacccacuucagcgacgacaucgagcagcaggccgacaacaugaucaccgagaugcugcagaaggaguacauggaccggcaggggaagacgccccucggccugguggaccuguucgucuucuccaccagcuucuaccugaucuccaucuuccuccaccuggugaagaucccgacccaccgccacaucguggggaagcccugccccaagccccaccggcugaaccgcaugggcaucugcagcugcgggcucuacaagcagccgggcguccccgugaaguggaagcgguga

SEQ ID NO: 758 - RNA, 1476 nt, Artificial Sequence
  derived and/or modified protein sequence (opt1) from LASV(Ouoma-R123;Clade V)__AHC95559__GPC
augggccagaucaucaccuucuuccaggaggugccccacgucaucgaggaggugaugaacaucgugcugaucgcccucagcauccuggccguccugaaggggcucuacaacaucgcgaccugcggccugaucgggcuggugacguuccuccugcugugcggccgcuccugcagcuccagccucuacaaggggguguacgagcugcagucccuggaccucaacauggagacccugaacaugaccaugccgcugagcugcaccaagaacaacucccaccacuacauccgggucggcaacgagacgggccucgagcugacccugaccaacaccagccucaucaaccacaaguucugcaaccuguccgacgcccacaagaagaaccuguacgaccacgcccucaugagcaucaucuccacguuccaccugagcauccccaacuucaaccaguacgaggccauguccugcgacuucaacgggggcaagaucagcgugcaguacaaccugucccacgccuacgcgaucgacgccgccagccacugcgggaccguggccaacggcguccuccagaccuucaugcgcauggcguggggcggguccuacaucgcccuggacagcggccacgggaacugggacugcaucaugaccuccuaccaguaccugaucauccagaacacgaccugggaggaccacugccaguucagccggcccagccccaucggcuaccucgggcugcugucccagcgcacccgggacaucuacaucagccgccggcuccugggcaccuucacguggacccuguccgacagcgagggcaacgccacccccgggggcuacugccucacccgcuggaugcugaucgaggccgagcugaagugcuucgggaacacggccguggcgaagugcaacgagaagcacgacgaggaguucugcgacaugcuccggcuguucgacuucaacaagcaggccaucucccgccucaagagcgaggcccagauguccauccagcugaucaacaaggccgugaacgcccugaucaacgaccagcugaucaugaagaaccaccuccgggacaucaugggcauccccuacugcaacuacagcaaguacugguaccugaaccacaccgucaccgggaagaccucccugcccaagugcuggcucgugagcaacggcuccuaccugaacgagacgcacuucagcgacgacaucgagcagcaggcggacaacaugaucaccgagaugcugcagaaggaguacauggagcgccagggcaagaccccgcucgggcugguggaccuguucgucuucuccaccagcuucuaccugaucuccaucuuccuccaccuggugaagaucccgacgcaccggcacaucgugggcaagcccugccccaagccccaccgccugaaccacauggggaucugcagcugcggccucuacaagcagccggggguccccgugaaguggaagcgguga

SEQ ID NO: 759 - RNA, 1476 nt, Artificial Sequence
  derived and/or modified protein sequence (opt1) from LASV(Soromba-R;Clade V)__AHC95553__GPC
augggccagaucgugaccuucuuccaggaggucccccacgugaucgaggaggugaugaacaucguccugaucgcccucagcauccuggccgugcugaaggggcucuacaacaucgcgaccugcggccugaucgggcuggugacguucuuccuccugugcggccgcuccugcagcuccaaccuguacaagggggucuacgagcuccagagccuggaccugaacauggagacccucaacaugaccaugccgcuguccugcaccaagaacaacagccaccacuacauccgggugggcaacgagacgggccuggagcucacccugaccaacaccucccugcucgaccacaaguucugcaaccugagcgacgcccacaagaagaaccuguacgaccacgcccucauguccaucaucagcacguuccaccuguccauccccaacuucaaccaguacgaggccaugagcugcgacuucaacgggggcaagaucaccgugcaguacaaccugucccacagcuacgccggggacgcggcccgccacugcggcaccaucgccaacgggguccuccagaccuucaugcggauggccuggggcggcuccuacaucgcgcuggacagcgggcacggcaacugggacugcaucaugacguccuaccaguaccugaucauccagaacaccaccugggaggaccacugccaguucagccgccccucccccaucggguaccucagccugcugagccagcggacccgcgacaucuacaucucccggcgccuccugggcacguucaccuggacccugagcgacuccgagggcaacgccacccccgggggcuacugccucacgcgguggaugcugaucgaggccgagcugaagugcuucgggaacaccgccguggccaagugcaacgagaagcacgacgaggaguucugcgacaugcuccgccuguucgacuucaacaagcaggcgaucagccggcugcgcuccgaggcccagaugagcauccagcucaucaacaaggccgugaacgcccugaucaacgaccagcugaucaugaagaaccaccuccgggacaucaugggcauccccuacugcaacuacuccaaguacugguaccugaaccacaccgucaccgggcgcacgagccugcccaagugcuggcucguguccaacggcagcuaccugaacgagacccacuucuccgacgacaucgagcagcaggccgacaacaugaucaccgagaugcugcagaaggaguacauggaccggcagggcaagaccccgcucgggcugguggaccuguucgucuucagcacguccuucuaccugaucagcaucuuccuccaccuggugaagaucccgacccaccgccacaucgugggcaagcccugccccaagccccaccggcugaaccgcauggggaucugcuccugcggccucuacaagcagccggggguccccgugaaguggaagcgguga

SEQ ID NO: 760 - RNA, 1473 nt, Artificial Sequence; identical to SEQ ID NO: 514
  derived and/or modified protein sequence (opt1) from LASV(Alzey;Clade VI)__SCA79105__GPC

SEQ ID NO: 761 - RNA, 1473 nt, Artificial Sequence
  derived and/or modified protein sequence (opt1) from LASV(Lassa/H.sapiens-wt/TGO/2016/201600568;Clade VI)__AVN98153__GPC
augggccagaucaucaccuucuuccaggaggugccccacgucaucgaggaggugaugaacaucgugcugaucgcccucagccugcuggccauccucaagggggucuacaacguggcgaccugcggcaucaucgggcuggugacguuccuguuccucugcggccgcuccugcagccugaucuacaagggguccuacgagcugcagacccucgagcugaacauggagacccugaacaugaccaugccgcucagcugcacgaagaacuccagccaccacuacauccgggucggcaacgagaccggccuggagcugacccucaccaacacguccaucaucaaccacaaguucugcaaccugagcgacgcccacaagcgcaaccuguacgaccacgcccucauguccauccugagcaccuuccaccuguccauccccaacuucaaccaguacgaggccaugagcugcgacuucaacgggggcaagaucuccgugcaguacaaccucagccacgccuacgcgguggacgccgccgagcacugcgggaccgucgccaacggcgugcugcagaccuucaugcggauggcguggggcggguccuacaucgcccuggacagcggccgcgggaacugggacugcaucaugacguccuaccaguaccucaucauccagaacaccaccugggaggaccacugccaguucagccggcccucccccaucggcuaccuggggcugcucagccagcgcacccgggacaucuacaucagccgccggcugcugggcacguucaccuggacccucuccgacagcgagggcaacgagacccccgggggcuacugccugacgcgcuggaugcugaucgaggccgagcucaagugcuucgggaacaccgccguggccaagugcaacgagaagcacgacgaggaguucugcgacaugcugcggcuguucgacuucaacaagcaggcgauccagcgccucaaguccgaggcccagaugagcauccagcugaucaacaaggccgucaacgcccugaucaacgaccagcucaucaugaagaaccaccuccgggacaugaugggcauccccuacugcaacuacuccaaguacugguaccugaaccacaccagcuccgggcgcgccagccugcccaagugcuggcugguguccaacggcagcuaccugaacgagacccacuucuccgacgacaucgagcagcaggcggacaacaugaucacggagaugcuccagaaggaguacaucgaccggcagggcaagaccccgcuggggcugguggaccucuucgucuucagcaccuccuucuaccugaucagcaucuuccugcaccugaucaagaucccgacccaccgccacaucgugggcaagcccugccccaagccccaccggcucaaccacauggggaucugcuccugcggccuguacaagcagccgggggugcccacgcgcuggaagcgguga

SEQ ID NO: 762 - RNA, 1473 nt, Artificial Sequence
  derived and/or modified protein sequence (opt1) from LASV(NIGERIA IKEJI;Clade II)__AMZ00373__GPC
augggccagaucaucaccuucuuccaggaggugccccacgucaucgaggaggugaugaacaucgugcugaucgcccucagccugcuggccauccucaaggggaucuacaacgucgcgaccugcggccuguucgggcugaucuccuuccucuuccugugcggccgcagcugcuccacgauguacaaggggguguacgagcugcagacccucgagcuggacauggccaaccugaacaugaccaugccgcucagcugcaccaagaacaacucccaccacuacaucauggugggcaacgagacgggccuggagcugacccucaccaaccagagcaucaucaaccacaaguucugcaaccuguccgacgcccacaagaagaaccuguacgaccacacccucaugagcaucaucuccacguuccaccugagcauccccaacuucaaccaguacgaggccauguccugcgacuucaacgggggcaagaucagcguccaguacaaccugucccacagcuacgccguggacgcggccaaccacugcgggaccguggccaacggcguccuccagaccuucaugcggauggccuggggcggguccuacaucgcgcuggacagcggcaaggggaacugggacugcaucaugaccuccuaccaguaccugaucauccagaacacgaccugggaggaccacugccaguucagccgccccucccccaucggcuaccucgggcugcugagccagcggacccgcgacaucuacaucagccggcgccuccugggcaccuucacguggacccuguccgacagcgagggcaacgacgcccccgggggcuacugccucacccgguggaugcugaucgaggccgagcugaagugcuucgggaacaccgccaucgccaagugcaacgagaagcacgacgaggaguucugcgacaugcuccgccuguucgacuucaacaagcaggcgaucaagcggcugaaggccgaggcccagauguccauccagcucaucaacaaggccgugaacgcccugaucaacgaccagcugaucaugaagaaccaccuccgcgacaucaugggcaucccguacugcaacuacagcaaguacugguaccugaacaacacggugaccgggaaguccagccugcccaagugcuggcucgucuccaacggcagcuaccugaacgagacccacuucuccgacgacaucgagcagcaggcggacaacaugaucaccgagaugcugcagaaggaguacauggaccggcagggcaagacgccccucgggcugguggaccuguucguguucagcaccuccuucuaccucaucagcaucuuccugcaccuggucaagaucccgacccaccgccacaucaccggcaagcccugccccaagccccaccggcugaaccacauggggaucugcuccugcggccucuacaagcagccgggggugcccgugaaguggaagcgcuga

SEQ ID NO: 763 - RNA, 1476 nt, Artificial Sequence
  derived and/or modified protein sequence (opt2) from LASV(Josiah;Clade IV)__NP_694870__GPC
augggccagaucgucaccuucuuccaggaggucccccacgucaucgaggaggucaugaacaucguccucaucgcccucuccguccucgccguccucaagggccucuacaacuucgccaccugcggccucgucggccucgucaccuuccuccuccucugcggccgcuccugcaccaccucccucuacaagggcgucuacgagcuccagacccucgagcucaacauggagacccucaacaugaccaugccccucuccugcaccaagaacaacucccaccacuacaucauggucggcaacgagaccggccucgagcucacccucaccaacaccuccaucaucaaccacaaguucugcaaccucuccgacgcccacaagaagaaccucuacgaccacgcccucauguccaucaucuccaccuuccaccucuccauccccaacuucaaccaguacgaggccauguccugcgacuucaacggcggcaagaucuccguccaguacaaccucucccacuccuacgccggcgacgccgccaaccacugcggcaccgucgccaacggcguccuccagaccuucaugcgcauggccuggggcggcuccuacaucgcccucgacuccggccgcggcaacugggacugcaucaugaccuccuaccaguaccucaucauccagaacaccaccugggaggaccacugccaguucucccgccccucccccaucggcuaccucggccuccucucccagcgcacccgcgacaucuacaucucccgccgccuccucggcaccuucaccuggacccucuccgacuccgagggcaaggacacccccggcggcuacugccucacccgcuggaugcucaucgaggccgagcucaagugcuucggcaacaccgccgucgccaagugcaacgagaagcacgacgaggaguucugcgacaugcuccgccucuucgacuucaacaagcaggccauccagcgccucaaggccgaggcccagauguccauccagcucaucaacaaggccgucaacgcccucaucaacgaccagcucaucaugaagaaccaccuccgcgacaucaugggcauccccuacugcaacuacuccaaguacugguaccucaaccacaccaccaccggccgcaccucccuccccaagugcuggcucgucuccaacggcuccuaccucaacgagacccacuucuccgacgacaucgagcagcaggccgacaacaugaucaccgagaugcuccagaaggaguacauggagcgccagggcaagaccccccucggccucgucgaccucuucgucuucuccaccuccuucuaccucaucuccaucuuccuccaccucgucaagauccccacccaccgccacaucgucggcaaguccugccccaagccccaccgccucaaccacaugggcaucugcuccugcggccucuacaagcagcccggcguccccgucaaguggaagcgcuga

SEQ ID NO: 764 - RNA, 1473 nt, Artificial Sequence
  derived and/or modified protein sequence (opt2) from LASV(LP;Clade I)__AAF86701__GPC
augggccagaucaucaccuucuuccaggaggucccccacgucaucgaggaggucaugaacaucguccucaucgcccucucccuccucgccauccucaagggccucuacaacaucgccaccugcggcaucaucggccucgucgccuuccucuuccucugcggcaaguccugcucccucacccucaagggcggcuacgagcuccagacccucgagcucaacauggagacccucaacaugaccaugccccucuccugcaccaagaacuccucccaccacuacauccgcgucggcaacgagaccggccucgagcucacccucaccaacaccuccaucaucaaccacaaguucugcaaccucuccgacgcccacaagaagaaccucuacgaccacgcccucauguccaucaucuccaccuuccaccucuccauccccaacuucaaccaguacgaggccauguccugcgacuucaacggcggcaagaucuccguccaguacaaccucucccacuccuacgccggcgacgccgccgagcacugcggcaccgucgccaacggcguccuccagaccuucaugcgcauggccuggggcggccgcuacaucgcccucgacuccggcaagggcaacugggacugcaucaugaccuccuaccaguaccucaucauccagaacaccaccugggaggaccacugccaguucucccgccccucccccaucggcuaccucggccuccucucccagcgcacccgcgacaucuacaucucccgccgccuccucggcaccuucaccuggacccucuccgacuccgagggcaacgagacccccggcggcuacugccucacccgcuggaugcucaucgaggccgagcucaagugcuucggcaacaccgccgucgccaagugcaacgagaagcacgacgaggaguucugcgacaugcuccgccucuucgacuucaacaagcaggccauccgccgccucaaggccgaggcccagauguccauccagcucaucaacaaggccgucaacgcccucaucaacgaccagcucaucaugaagaaccaccuccgcgacaucaugggcauccccuacugcaacuacuccaaguacugguaccucaaccacaccuccuccggccgcaccucccuccccaagugcuggcucaucuccaacggcuccuaccucaacgagacccaguucuccgacgacaucgagcagcaggccgacaacaugaucaccgagaugcuccagaaggaguacaucgagcgccagggcaagaccccccucggccucgucgacaucuucaucuucuccaccuccuucuaccucaucuccaucuuccuccaccucaucaagauccccacccaccgccacaucgucggcaagcccugccccaagccccaccgccucaaccacaugggcgucugcuccugcggccucuacaagcaccccggcguccccaccaaguggaagcgcuga

SEQ ID NO: 765 - RNA, 1473 nt, Artificial Sequence
  derived and/or modified protein sequence (opt2) from LASV(803213;Clade II)__AAF86703__GPC
augggccagaucaucaccuucuuccaggaggucccccacgucaucgaggaggucaugaacaucguccucaucgcccucucccuccucgccauccucaagggcaucuacaacgucgccaccugcggccucuucggccucaucuccuuccuccuccucugcggccgcuccugcuccgucaccuacaagggcgucuacgagcuccagacccucgagcucaacauggccaaccucaacaugaccaugccccucuccugcaccaagaacaacucccaccacuacaucauggucggcaacgagaccggccucgagcucacccucaccaacaccuccaucaucaaccacaaguucugcaaccucuccgacgcccacaagaagaaccucuacgaccacgcccucauguccaucaucuccaccuuccaccucuccauccccaacuucaaccaguacgaggccauguccugcgacuucaacggcggcaagaucuccguccaguacaaccucucccacuccuucgccgucgacgccgccaaccacugcggcaccaucgccaacggcguccuccagaccuucaugcgcauggccuggggcggcuccuacaucgcccucgacuccggcaagggcaacugggacugcaucaugaccuccuaccaguaccucaucauccagaacaccaccugggaggaccacugccaguucucccgccccucccccaucggcuaccucggccuccucucccagcgcacccgcgacaucuacaucucccgccgccuccucggcaccuucaccuggacccucuccgacuccgagggcaacgaggcccccggcggcuacugccucacccgcuggaugcucaucgaggccgagcucaagugcuucggcaacaccgccgucgccaagugcaacgagaagcacgacgaggaguucugcgacaugcuccgccucuucgacuucaacaagcaggccaucaagcgccucaagaccgaggcccagauguccauccagcucaucaacaaggccgucaacgcccucaucaacgaccagcucaucaugaagaaccaccuccgcgacaucaugggcauccccuacugcaacuacucccgcuacugguaccucaaccacaccgucaccggcaagaccucccucccccgcugcuggcucgucuccaacggcuccuaccucaacgagacccacuucuccgacgacaucgagcagcaggccgacaacaugaucaccgagaugcuccagaaggaguacauggaccgccagggcaagaccccccucggccucgucgaccucuucgucuucuccaccuccuucuaccucaucuccaucuuccuccaccucgucaagauccccacccaccgccacaucgucggcaagcccugccccaagccccaccgccucaaccacaugggcaucugcuccugcggccucuacaagcaccccggcguccccgucaaguggaagcgcuga

SEQ ID NO: 766 - RNA, 1473 nt, Artificial Sequence
  derived and/or modified protein sequence (opt2) from LASV(GA391;Clade III)__CAA36645__GPC
augggccagaucgucaccuucuuccaggaggucccccacgucaucgaggaggucaugaacaucguccucaucgcccucuccauccucgccauccucaagggccucuacaacgucgccaccugcggccucaucggccucgucaccuuccuccuccucuccggccgcuccugcucccucaucuacaagggcaccuacgagcuccagacccucgagcucaacauggagacccucaacaugaccaugccccucuccugcaccaagaacaacucccaccacuacauccgcgucggcaacgagaccggccucgagcucacccucaccaacaccuccauccucaaccacaaguucugcaaccucuccgacgcccacaagcgcaaccucuacgaccacucccucauguccaucaucuccaccuuccaccucuccauccccaacuucaaccaguacgaggccauguccugcgacuucaacggcggcaagaucaccguccaguacaaccucucccacuccuucgccgucgacgccgccggccacugcggcacccucgccaacggcguccuccagaccuucaugcgcauggccuggggcggcuccuacaucgcccucgacuccggccgcggcaacugggacugcaucaugaccuccuaccaguaccucaucauccagaacaccaccugggacgaccacugccaguucucccgccccucccccaucggcuaccucggccuccucucccagcgcacccgcgacaucuacaucucccgccgccuccucggcaccuucaccuggacccucuccgacuccgagggcaacgagacccccggcggcuacugccucacccgcuggaugcucaucgaggccgagcucaagugcuucggcaacaccgccgucgccaagugcaacgagaagcacgacgaggaguucugcgacaugcuccgccucuucgacuucaacaagcaggccauccgccgccucaagaccgaggcccagauguccauccagcucaucaacaaggccgucaacgcccucaucaacgaccagcucaucaugaagaaccaccuccgcgacaucaugggcauccccuacugcaacuacucccgcuacugguaccucaaccacaccuccaccggcaagaccucccucccccgcugcuggcucaucuccaacggcuccuaccucaacgagaccaaguucuccgacgacaucgagcagcaggccgacaacaugaucaccgagaugcuccagaaggaguacaucgaccgccagggcaagaccccccucggccucgucgaccucuucgucuucuccaccuccuucuaccucaucuccaucuuccuccaccucgucaagauccccacccaccgccacaucgucggcaagcccugccccaagccccaccgccucaaccacaugggcaucugcuccugcggccucuacaagcagcccggcguccccguccgcuggaagcgcuga

SEQ ID NO: 767 - RNA, 1476 nt, Artificial Sequence
  derived and/or modified protein sequence (opt2) from LASV(AV;Clade V)__CCA30314__GPC
augggccagaucgucaccuucuuccaggaggucccccacgucaucgaggaggucaugaacaucguccucaucgcccucuccauccucgccguccucaagggccucuacaacaucgccaccugcggccucaucggccucaucaccuuccuccuccucugcggccgcuccugcuccuccaaccucuacaagggcgucuacgagcuccagucccucgaccucaacauggagacccucaacaugaccaugccccucuccugcaccaagaacaacucccaccacuacauccgcgucggcaacgacaccggccucgagcucacccucaccaacaccuccauccucaaccacaaguucugcaaccucuccgacgcccacaagaaggaccucuacgaccacgcccucauguccaucaucuccaccuuccaccucuccauccccaacuucaaccaguacgaggccauguccugcgacuucaacggcggcaagaucuccguccaguacaaccucucccacuccuacgccaucgacgccgccaaccacugcggcaccgucgccaacggcauccuccagaccuucaugcgcauggccuggggcggcuccuacaucgcccucgacuccggccgcggcaacugggacugcaucaugaccuccuaccaguaccucaucauccagaacaccaccugggagaaccacugccaguucucccgccccucccccaucggcuaccucggccuccucucccagcgcacccgcgacaucuacaucucccgccgccuccucggcaccuucaccuggacccucuccgacuccgagggcaacgccacccccggcggcuacugccucacccgcuggaugcucaucgaggccgagcucaagugcuucggcaacaccgccgucgccaagugcaacgagaagcacgacgaggaguucugcgacaugcuccgccucuucgacuucaacaagcaggccaucucccgccucaaguccgaggcccagauguccauccagcucaucaacaaggccgucaacgcccucaucaacgaccagcucaucaugaagaaccaccuccgcgacaucaugggcauccccuacugcaacuacuccaaguacugguaccucaaccacaccaucaccggcaagaccucccuccccaagugcuggcucgucuccaacggcuccuaccucaacgagacccacuucuccgacgacaucgagcagcaggccgacaacaugaucaccgagaugcuccagaaggaguacauggagcgccagggcaagaccccccucggccucgucgaccucuucgucuucuccaccuccuucuaccucaucuccaucuuccuccgccucgucaagauccccacccaccgccacaucgucggcaagcccugccccaagccccaccgccucaaccacaugggcaucugcuccugcggccucuacaagcagcccggcguccccguccgcuggaagcgcuga

SEQ ID NO: 768 - RNA, 1473 nt, Artificial Sequence
  derived and/or modified protein sequence (opt2) from LASV(Togo/2016/7082;Clade VI)__AMR44577__GPC
augggccagaucaucaccuucuuccaggaggucccccacgucaucgaggaggucaugaacaucguccucaucgcccucucccuccucgccauccucaagggcgucuacaacgucgccaccugcggcaucaucggccucgucaccuuccucuuccucugcggccgcuccugcucccucaucuacaagggcuccuacgagcuccagacccucgagcucaacauggagacccucaacaugaccaugccccucuccugcaccaagaacuccucccaccacuacauccgcgucggcaacgagaccggccucgagcucacccucaccaacaccuccaucaucaaccacaaguucugcaaccucuccgacgcccacaagcgcaaccucuacgaccacgcccucauguccauccucuccaccuuccaccucuccauccccaacuucaaccaguacgaggccauguccugcgacuucaacggcggcaagaucuccguccaguacaaccucucccacgccuacgccgucgacgccgccgagcacugcggcaccgucgccaacggcguccuccagaccuucaugcgcauggccuggggcggcuccuacaucgcccucgacuccggccgcggcaacugggacugcaucaugaccuccuaccaguaccucaucauccagaacaccaccugggaggaccacugccaguucucccgccccucccccaucggcuaccucggccuccucucccagcgcacccgcgacaucuacaucucccgccgccuccucggcaccuucaccuggacccucuccgacuccgagggcaacgagacccccggcggcuacugccucacccgcuggaugcucaucgaggccgagcucaagugcuucggcaacaccgccgucgccaagugcaacgagaagcacgacgaggaguucugcgacaugcuccgccucuucgacuucaacaagcaggccauccagcgccucaaguccgaggcccagauguccauccagcucaucaacaaggccgucaacgcccucaucaacgaccagcucaucaugaagaaccaccuccgcgacaugaugggcauccccuacugcaacuacuccaaguacugguaccucaaccacaccuccuccggccgcaccucccuccccaagugcuggcucgucuccaacggcuccuaccucaacgagacccacuucuccgacgacaucgagcagcaggccgacaacaugaucaccgagaugcuccagaaggaguacaucgaccgccagggcaagaccccccucggccucgucgaccucuucgucuucuccaccuccuucuaccucaucuccaucuuccuccaccucaucaagauccccacccaccgccacaucgucggcaagcccugccccaagccccaccgccucaaccacaugggcaucugcuccugcggccucuacaagcagcccggcguccccacccgcuggaagcgcuga

SEQ ID NO: 769 - RNA, 1473 nt, Artificial Sequence
  derived and/or modified protein sequence (opt2) from LASV(KAK-428;Clade n.d. (VII))__ANH09740__GPC
augggccagaucgucaccuucuuccaggaggucccccacgucaucgaggaggucaugaacaucguccucaucgcccucucccuccucgccauccucaagggccucuacaacuucgccaccugcggcgucaucggccucaucaccuuccuccuccucugcggccgcuccugcuccgccaccuacaagggccaguacgagcuccagacccucgagcucaacauggagucccucaacaugaccaugccccucuccugcaccaagaacaacucccaccacuacauccgcgccggcaacaacaccggccucgagcucacccucaccaacaccuccaucaucucccacaaguucugcaaccucuccgacgcccacaagaagaaccucuacgaccacacccucauguccaucaucaccaccuuccaccucuccauccccaacuucaaccaguacgaggccauguccugcgacuucaacggcggcaagaucuccauccaguacaaccucucccacuccuacgccggcgacgccgcccagcacugcggcaccgucgccaacggcguccuccagaccuucaugcgcauggccuggggcggcuccuaccucgcccucgacuccggccgccgcggcugggacugcaucaucuccuccuaccaguaccucaucauccagaacaccaccugggacgaccacugccaguucucccgccccucccccaucggcuaccucggcuucgucucccagaagacccgcgacaucuacaucucccgccgccuccucggcaccuucaccuggacccucuccgacuccgagggccacgacaugcccggcggcuacugccucacccgcuggaugcucaucgaggccgaccucaagugcuucggcaacaccgccgucgccaagugcaacgagaagcacgacgaggaguucugcgacauguggcgccucuucgacuucaacaagcaggccauccagcgccucaaggccgaggcccagaugaacauccagcucaucaacaaggccgucaacgcccucaucaacgaccagcucaugaugaagaaccaccuccgcgacaucaugggcauccccuacugcaacuacuccaaguucugguaccucaacaacaccaccaccggccgcaccucccucccccgcugcuggcucaucuccaacggcuccuaccucaacgagacccacuucuccgacgacaucgagcagcaggccgacaacaugaucaccgagaugcuccagaaggaguacauggaccgccagggcaagaccccccucggccucgucgaccucuucgucuucuccaccuccuucuaccucaucaccaucuuccuccaccucgucaagauccccacccaccgccacaucgucggcaagcccugccccaagccccaccgccucaaccacaugggcaucugcuccugcggccucuacaagcagcccggcguccccguccgcuggaagcgcuga

SEQ ID NO: 770 - RNA, 1473 nt, Artificial Sequence
  derived and/or modified protein sequence (opt2) from LASV(Acar 3080;Clade I)__AAT49014__GPC
augggccagaucaucaccuucuuccaggaggucccccacgucaucgaggaggucaugaacaucguccucaucgcccucucccuccucgccauccucaagggccucuacaacaucgccaccugcggcaucaucggccucgucgccuuccucuuccucugcggcaaguccugcucccucacccucaagggcggcuacgagcuccagacccucgagcucaacauggagacccucaacaugaccaugccccucuccugcaccaagaacuccucccaccacuacauccgcgucggcaacgagaccggccucgagcucacccucaccaacaccuccaucaucaaccacaaguucugcaaccucuccgacgcccacaagaagaaccucuacgaccacgcccucauguccaucaucuccaccuuccaccucuccauccccaacuucaaccaguacgaggccauguccugcgacuucaacggcggcaagaucuccguccaguacaaccucucccacuccuacgccggcgacgccgccgagcacugcggcaccgucgccaacggcguccuccagaccuucaugcgcauggccuggggcggccgcuacaucgcccucgacuccggcaagggcaacugggacugcaucaugaccuccuaccaguaccucaucauccagaacaccaccugggaggaccacugccaguucucccgccccucccccaucggcuaccucggccuccucucccagcgcacccgcgacaucuacaucucccgccgccuccucggcaccuucaccuggacccucuccgacuccgagggcaacgagacccccggcggcuacugccucacccgcuggaugcucaucgaggccgagcucaagugcuucggcaacaccgccgucgccaagugcaacgagaagcacgacgaggaguucugcgacaugcuccgccucuucgacuucaacaagcaggccauccgccgccucaaggccgaggcccagauguccauccagcucaucaacaaggccgucaacgcccucaucaacgaccagcucaucaugaagaaccaccuccgcgacaucaugggcauccccuacugcaacuacuccaaguacugguaccucaaccacaccuccuccggccgcaccucccuccccaagugcuggcucaucuccaacggcuccuaccucaacgagacccaguucuccgacgacaucgagcagcaggccgaccacaugaucaccgagaugcuccagaaggaguacaucgagcgccagggcaagaccccccucggccucgucgacaucuucaucuucuccaccuccuucuaccucaucuccaucuuccuccaccucaucaagauccccacccaccgccacaucgucggcaagcccugccccaagccccaccgccucaaccacaugggcgucugcuccugcggccucuacaagcaccccggcguccccaccaaguggaagcgcuga

SEQ ID NO: 771 - RNA, 1473 nt, Artificial Sequence; identical to SEQ ID NO: 764
  derived and/or modified protein sequence (opt2) from LASV(Pinneo-NIG-1969;Clade I)__AIT17836__GPC

SEQ ID NO: 772 - RNA, 1473 nt, Artificial Sequence
  derived and/or modified protein sequence (opt2) from LASV(ISTH0009-NIG-2011;Clade II)__AIT17404__GPC
augggccagaucaucaccuucuuccaggaggucccccacgucaucgaggaggucaugaacaucguccucaucgcccucucccuccucgccauccucaagggcaucuacaacgucgccaccugcggccucuucggccucgucuccuuccuccuccucugcggccgcuccugcuccaccaccuacaagggcgucuacgagcuccagacccucgagcucgacauggccucccucaacaugaccaugccccucuccugcaccaagaacaacucccaccacuacaucauggucggcaacgagaccggccucgagcucacccucaccaacaccuccaucaucaaccacaaguucugcaaccucuccgacgcccacaagaagaaccucuacgaccacgcccucauguccaucaucuccaccuuccaccucuccauccccaacuucaaccaguacgaggccauguccugcgacuucaacggcggcaagaucuccguccaguacaaccucucccacgccuacgccgucgacgccgccaaccacugcggcaccaucgccaacggcguccuccagaccuucaugcgcauggccuggggcggcuccuacaucgcccucgacuccggcaagggcuccugggacugcaucaugaccuccuaccaguaccucaucauccagaacaccaccugggaggaccacugccaguucucccgccccucccccaucggcuaccucggccuccucucccagcgcacccgcgacaucuacaucucccgccgccuccucggcaccuucaccuggacccucuccgacuccgagggcaacgagacccccggcggcuacugccucacccgcuggaugcucaucgaggccgagcucaagugcuucggcaacaccgccgucgccaagugcaacgagaagcacgacgaggaguucugcgacaugcuccgccucuucgacuucaacaagcaggccauccgccgccucaagaccgaggcccagauguccauccagcucaucaacaaggccgucaacgcccucaucaacgaccagcucaucaugaagaaccaccuccgcgacaucaugggcauccccuacugcaacuacuccaaguacugguaccucaaccacaccgucaccggcaagaccucccucccccgcugcuggcucgucuccaacggcuccuaccucaacgagacccacuucuccgacgacaucgagcagcaggccgacaacaugaucaccgagcuccuccagaaggaguacauggaccgccagggcaagaccccccucggccucgucgaccucuucgucuucuccaccuccuucuaccucaucuccaucuuccuccaccucaucaagauccccacccaccgccacaucaccggcaagcccugccccaagccccaccgccucaaccacaugggcaucugcuccugcggccucuacaagcaccccggcguccccgucaaguggaagcgcuga

SEQ ID NO: 773 - RNA, 1473 nt, Artificial Sequence
  derived and/or modified protein sequence (opt2) from LASV(ISTH0012-NIG-2011;Clade II)__AIT17408__GPC
augggccagaucaucaccuucuuccaggaggucccccacgucaucgaggaggucaugaacaucguccucaucgcccucucccuccucgccauccucaagggcaucuacaacgucgccaccugcggccucuucggccucgucuccuuccuccuccucugcggccgcuccugcuccaccaccuacaagggcgucuacgagcuccagacccucgagcucgacauggccucccucaacaugaccaugccccucuccugcaccaagaacaacucccaccacuacaucauggucggcaacgagaccggccucgagcucacccucaccaacaccuccaucaucaaccacaaguucugcaaccucuccgacgcccacaagaagaaccucuacgaccacgcccucauguccaucaucuccaccuuccaccucuccauccccaacuucaaccaguacgaggccauguccugcgacuucaacggcggcaagaucuccguccaguacaaccucucccacaccuacgccgucgacgccgccaaccacugcggcaccgucgccaacggcguccuccagaccuucaugcgcauggccuggggcggcuccuacaucgcccucgacuccggcaagggcuccugggacugcaucaugaccuccuaccaguaccucaucauccagaacaccaccugggaggaccacugccaguucucccgccccucccccaucggcuaccucggccuccucucccagcgcacccgcgacaucuacaucucccgccgccuccucggcaccuucaccuggacccucuccgacuccgagggcaacgagacccccggcggcuacugccucacccgcuggaugcucaucgaggccgagcucaagugcuucggcaacaccgccgucgccaagugcaacgagaagcacgacgaggaguucugcgacaugcuccgccucuucgacuucaacaagcaggccauccgccgccucaagaccgaggcccagauguccauccagcucaucaacaaggccgucaacgcccucaucaacgaccagcucaucaugaagaaccaccuccgcgacaucaugggcauccccuacugcaacuacuccaaguacugguaccucaaccacaccgucaccggcaagaccucccucccccgcugcuggcucgucuccaacggcuccuaccucaacgagacccacuucuccgacgacaucgagcagcaggccgacaacaugaucaccgagcuccuccagaaggaguacauggaccgccagggcaagaccccccucggccucgucgaccucuucgucuucuccaccuccuucuaccucaucuccaucuuccuccaccucgucaagauccccacccaccgccacgucaucggcaagcccugccccaagccccaccgccucaaccacaugggcaucugcuccugcggccucuacaagcaccccggcguccccgucaaguggaagcgcuga

SEQ ID NO: 774 - RNA, 1473 nt, Artificial Sequence
  derived and/or modified protein sequence (opt2) from LASV(ISTH0047-NIG-2011;Clade II)__AIT17412__GPC
augggccagaucaucaccuucuuccaggaggucccccacgucaucgaggaggucaugaacaucguccucaucgcccucucccuccucgccauccucaagggcaucuacaacgucgccaccugcggccucuucggccucgucuccuuccuccuccucugcggccgcuccugcuccaccaccuacaagggcgucuacgagcuccagacccucgagcucgacauggccucccucaacaugaccaugccccucuccugcaccaagaacaacucccaccacuacaucauggucggcaacgagaccggccucgagcucacccucaccaacaccuccaucaucaaccacaaguucugcaaccucuccgacgcccacaagaagaaccucuacgaccacgcccucauguccaucaucuccaccuuccaccucuccauccccaacuucaaccaguacgaggccauguccugcgacuucaacggcggcaagaucuccguccaguacaaccucucccacgccuacgccgucgacgccgccaaccacugcggcaccaucgccaacggcguccuccagaccuucaugcgcauggccuggggcggcuccuacaucgcccucgacuccggcaagggcuccugggacugcaucaugaccuccuaccaguaccucaucauccagaacaccuccugggaggaccacugccaguucucccgccccucccccaucggcuaccucggccuccucucccagcgcacccgcgacaucuacaucucccgccgccuccucggcaccuucaccuggacccucuccgacuccgagggcaacgagacccccggcggcuacugccucacccgcuggaugcucaucgaggccgagcucaagugcuucggcaacaccgccgucgccaagugcaacgagaagcacgacgaggaguucugcgacaugcuccgccucuucgacuucaacaagcaggccauccgccgccucaagaccgaggcccagauguccauccagcucaucaacaaggccgucaacgcccucaucaacgaccagcucaucaugaagaaccaccuccgcgacaucaugggcauccccuacugcaacuacuccaaguacugguaccucaaccacaccgucaccggcaagaccucccucccccgcugcuggcucgucuccaacggcuccuaccucaacgagacccacuucuccgacgacaucgagcagcaggccgacaacaugaucaccgagcuccuccagaaggaguacaucgaccgccagggcaagaccccccucggccucgucgaccucuucgucuucuccaccuccuucuaccucaucuccaucuuccuccaccucgucaagauccccacccaccgccacgucaucggcaagcccugccccaagccccaccgccucaaccacaugggcaucugcuccugcggccucuacaagcaccccggcguccccgucaaguggaagcgcuga

SEQ ID NO: 775 - RNA, 1473 nt, Artificial Sequence
  derived and/or modified protein sequence (opt2) from LASV(ISTH0073-NIG-2011;Clade II)__AIT17416__GPC
augggccagaucaucaccuucuuccaggaggucccccacgucaucgaggaggucaugaacaucguccucaucgcccucucccuccucgccauccucaagggcaucuacaacgucgccaccugcggccucuucggccucgucuccuuccuccuccucugcggccgcuccugcuccaccaccuacaagggcgucuacgagcuccagacccucgagcucgacauggccucccucaacaugaccaugccccucuccugcaccaagaacaacucccaccacuacaucauggucggcaacgagaccggccucgagcucacccucaccaacaccuccaucaucaaccacaaguucugcaaccucuccgacgcccaccgcaagaaccucuacgaccacgcccucauguccaucaucuccaccuuccaccucuccauccccaacuucaaccaguacgaggccauguccugcgacuucaacggcggcaagaucuccguccaguacaaccucucccacgccuacgccgucgacgccgccaaccacugcggcaccaucgccaacggcguccuccagaccuucaugcgcauggccuggggcggcuccuacaucgcccucgacuccggcaagggcuccugggacugcaucaugaccuccuaccaguaccucaucauccagaacaccuccugggaggaccacugccaguucucccgccccucccccaucggcuaccucggccuccucucccagcgcacccgcgacaucuacaucucccgccgccuccucggcaccuucaccuggacccucuccgacuccgagggcaacgagacccccggcggcuacugccucacccgcuggaugcucaucgaggccgagcucaagugcuucggcaacaccgccgucgccaagugcaacgagaagcacgacgaggaguucugcgacaugcuccgccucuucgacuucaacaagcaggccauccgccgccucaagaccgaggcccagauguccauccagcucaucaacaaggccgucaacgcccucaucaacgaccagcucaucaugaagaaccaccuccgcgacaucaugggcauccccuacugcaacuacuccaaguacugguaccucaaccacaccgucaccggcaagaccucccucccccgcugcuggcucgucuccaacggcuccuaccucaacgagacccacuucuccgacgacaucgagcagcaggccgacaacaugaucaccgagcuccuccagaaggaguacaucgaccgccagggcaagaccccccucggccucgucgaccucuucgucuucuccaccuccuucuaccucaucuccaucuuccuccaccucgucaagauccccacccaccgccacgucaucggcaagcccugccccaagccccaccgccucaaccacaugggcaucugcuccugcggccucuacaagcaccccggcguccccgucaaguggaagcgcuga

SEQ ID NO: 776 - RNA, 1473 nt, Artificial Sequence
  derived and/or modified protein sequence (opt2) from LASV(ISTH0230-NIG-2011;Clade II)__AIT17420__GPC
augggccagaucaucaccuucuuccaggaggucccccacgucaucgaggaggucaugaacaucguccucaucgcccucucccuccucgccauccucaagggcaucuacaacgucgccaccugcggccucuucggccucgucuccuuccuccuccucugcggccgcuccugcuccaccaccuacaagggcgucuacgagcuccagacccucgagcucgacauggccucccucaacaugaccaugccccucuccugcaccaagaacaacucccaccacuacaucauggucggcaacgagaccggccucgagcucacccucaccaacaccuccaucaucaaccacaaguucugcaaccucuccgacgcccacaagaagaaccucuacgaccacgcccucauguccaucaucuccaccuuccaccucuccauccccaacuucaaccaguacgaggccauguccugcgacuucaacggcggcaagaucuccguccaguacaaccucucccacaccuacgccgucgacgccgccaaccacugcggcaccaucgccaacggcguccuccagaccuucaugcgcauggccuggggcggcuccuacaucgcccucgacuccggcaagggcuccugggacugcaucaugaccuccuaccaguaccucaucauccagaacaccaccugggaggaccacugccaguucucccgccccucccccaucggcuaccucggccuccucucccagcgcacccgcgacaucuacaucucccgccgccuccucggcaccuucaccuggacccucuccgacuccgagggcaacgagacccccggcggcuacugccucacccgcuggaugcucaucgaggccgagcucaagugcuucggcaacaccgccgucgccaagugcaacgagaagcacgacgaggaguucugcgacaugcuccgccucuucgacuucaacaagcaggccauccgccgccucaagaccgaggcccagauguccauccagcucaucaacaaggccgucaacgcccucaucaacgaccagcucaucaugaagaaccaccuccgcgacaucaugggcauccccuacugcaacuacuccaaguacugguaccucaaccacaccgucaccggcaagaccucccucccccgcugcuggcucgucuccaacggcuccuaccucaacgagacccacuucuccgacgacaucgagcagcaggccgacaacaugaucaccgagcuccuccagaaggaguacauggaccgccagggcaagaccccccucggccucgucgaccucuucgucuucuccaccuccuucuaccucaucuccaucuuccuccaccucaucaagauccccacccaccgccacaucaccggcaagcccugccccaagccccaccgccucaaccacaugggcaucugcuccugcggccucuacaagcaccccggcguccccgucaaguggaagcgcuga

SEQ ID NO: 777 - RNA, 1473 nt, Artificial Sequence
  derived and/or modified protein sequence (opt2) from LASV(ISTH0531-NIG-2011;Clade II)__AIT17424__GPC
augggccagaucaucaccuucuuccaggaggucccccacgucaucgaggaggucaugaacaucguccucaucgcccucucccuccucgccauccucaagggcaucuacaacgucgccaccugcggccucuucggccucgucuccuuccuccuccucugcggccgcuccugcuccaccaccuacaagggcgucuacgagcuccagacccucgagcucgacaugaccaaccucaacaugaccaugccccucuccugcaccaagaacaacucccaccacuacaucauggucggcaacgagaccggccucgagcucacccucaccaacaccuccaucaucaaccacaaguucugcaaccucuccgacgcccacaagaagaaccucuacaaccacgcccucauguccaucaucuccaccuuccaccucuccauccccaacuucaaccaguacgaggccauguccugcgacuucaacggcggcaagaucuccguccaguacaaccucucccacgccuacgccgucgacgccgccaaccacugcggcaccaucgccaacggcguccuccagaccuucaugcgcauggccuggggcggcuccuacaucgcccucgacuccggcaagggcuccugggacugcaucaugaccuccuaccaguaccucaucauccagaacaccaccugggaggaccacugccaguucucccgccccucccccaucggcuaccucggccuccucucccagcgcacccgcgacaucuacaucucccgccgccuccucggcaccuucaccuggacccucuccgacuccgagggcaacgagacccccggcggcuacugccucacccgcuggaugcucaucgaggccgagcucaagugcuucggcaacaccgccgucgccaagugcaacgagaagcacgacgaggaguucugcgacaugcuccgccucuucgacuucaacaagcaggccauccgccgccucaagaccgaggcccagaccaacauccagcucaucaacaaggccgucaacgcccucaucaacgaccagcucaucaugaagaaccaccuccgcgacaucaugggcauccccuacugcaacuacuccaaguacugguaccucaaccacaccgucaccggcaagaccucccucccccgcugcuggcucgucuccaacggcuccuaccucaacgagacccacuucuccgacgacaucgagcagcaggccgacaacaugaucaccgagcuccuccagaaggaguacauggaccgccagggcaagaccccccucggccucgucgaccucuucgucuucuccaccuccuucuaccucaucuccaucuuccuccaccucgucaagauccccacccaccgccacaucaucggcaagcccugccccaagccccaccgccucaaccacaugggcaucugcuccugcggccucuacaagcaccccggcguccccgucaaguggaagcgcuga

SEQ ID NO: 778 - RNA, 1473 nt, Artificial Sequence
  derived and/or modified protein sequence (opt2) from LASV(ISTH0595-NIG-2011;Clade II)__AIT17428__GPC
augggccagaucaucaccuucuuccaggaggucccccacgucaucgaggaggucaugaacaucguccucaucgcccucucccuccucgccauccucaagggcaucuacaacgucgccaccugcggccucuucggccucgucuccuuccuccuccucugcggccgcuccugcuccaccaccuacaagggcgucuacgagcuccagacccucgagcucgacauggccucccucaacaugaccaugccccucuccugcaccaagaacaacucccaccacuacaucauggucggcaacgagaccggccucgagcucacccucaccaacaccuccaucaucaaccacaaguucugcaaccucuccgacgcccacaagaagaaccucuacgaccacgcccucauguccaucaucuccaccuuccaccucuccauccccaacuucaaccaguacgaggccauguccugcgacuucaacggcggcaagaucuccguccaguacaaccucucccacaccuacgccgucgacgccgccaaccacugcggcaccaucgccaacggcguccuccagaccuucaugcgcauggccuggggcggcuccuacaucgcccucgacuccggcaagggcuccugggacugcaucaugaccuccuaccaguaccucaucauccagaacaccaccugggaggaccacugccaguucucccgccccucccccaucggcuaccucggccuccucucccagcgcacccgcgacaucuacaucucccgccgccuccucggcaccuucaccuggacccucuccgacuccgagggcaacgagacccccggcggcuacugccucacccgcuggaugcucaucgccgccgaccucaagugcuucggcaacaccgccgucgccaagugcaacgagaagcacgacgaggaguucugcgacaugcuccgccucuucgacuucaacaagcaggccaucgagcgccucaagaccgaggcccagauguccauccagcucaucaacaaggccgucaacgcccucaucaacgaccagcucaucaugaagaaccaccuccgcgacaucaugggcauccccuacugcaacuacuccaaguacugguaccucaaccacaccgucaccggccgcaccucccucccccgcugcuggcucgucuccaacggcuccuaccucaacgagacccacuucuccgacgacaucgagcagcaggccgacaacaugaucaccgagcuccuccagaaggaguacauggaccgccagggcaagaccccccucggccucgucgaccucuucgucuucuccaccuccuucuaccucaucuccaucuuccuccaccucguccgcauccccacccaccgccacgucaucggcaagcccugccccaagccccaccgccucaaccacaugggcaucugcuccugcggccucuacaagcaccccggcguccccgucaaguggaagcgcuga

SEQ ID NO: 779 - RNA, 1473 nt, Artificial Sequence
  derived and/or modified protein sequence (opt2) from LASV(ISTH0964-NIG-2011;Clade II)__AIT17430__GPC
augggccagaucaucaccuucuuccaggaggucccccacgucaucgaggaggucaugaacaucguccucaucgcccucucccuccucgccauccucaagggcaucuacaacgucgccaccugcggccucuucggccucgucuccuuccuccuccucugcggccgcuccugcuccaccaccuacaagggcgucuacgagcuccagacccucgagcucgacauggccucccucaacaugaccaugccccucuccugcaccaagaacaacucccaccacuacaucauggucggcaacgagaccggccucgagcucacccucaccaacaccuccaucaucaaccacaaguucugcaaccucuccgacgcccacaagaagaaccucuacgaccacgcccucauguccaucaucuccaccuuccaccucuccauccccaacuucaaccaguacgaggccauguccugcgacuucaacggcggccgcaucuccguccaguacaaccucucccacaccuacgccgucgacgccgccaagcacugcggcaccaucgccaacggcguccuccagaccuucaugcgcauggccuggggcggcuccuacaucgcccucgacuccggcaagggcuccugggacugcaucaugaccuccuaccaguaccucaucauccagaacaccaccugggaggaccacugccaguucucccgccccucccccaucggcuaccucggccuccucucccagcgcacccgcgacaucuacaucucccgccgccuccucggcaccuucaccuggacccucuccgacuccgagggcaacgagacccccggcggcuacugccucacccgcuggaugcucaucgaggccgagcucaagugcuucggcaacaccgccgucgccaagugcaacgagaagcacgacgaggaguucugcgacaugcuccgccucuucgacuucaacaagcaggccauccgccgccucaagaccgaggcccagauguccauccagcucaucaacaaggccgucaacgcccucaucaacgaccagcucaucaugaagaaccaccuccgcgacaucaugggcauccccuacugcaacuacuccaaguacugguaccucaaccacaccgucaccggcaagaccucccucccccgcugcuggcucgucuccaacggcuccuaccucaacgagacccacuucuccgacgacaucgagcagcaggccgacaacaugaucaccgagcuccuccagaaggaguacaucgaccgccagggcaagaccccccucggccucgucgaccucuucgucuucuccaccuccuucuaccucaucuccaucuuccuccaccucgucaagauccccacccaccgccacgucaucggcaagcccugccccaagccccaccgccucaaccacaugggcaucugcuccugcggccucuacaagcaccccggcguccccgucaaguggaagcgcuga

SEQ ID NO: 780 - RNA, 1473 nt, Artificial Sequence
  derived and/or modified protein sequence (opt2) from LASV(ISTH1038-NIG-2011;Clade II)__AIT17438__GPC
augggccagaucaucaccuucuuccaggaggucccccacgucaucgaggaggucaugaacaucguccucaucgcccucucccuccucgccauccucaagggcaucuacaacgucgccaccugcggccucuucggccucgucuccuuccuccuccucugcggccgcuccugcuccaccaccuacaagggcgucuacgagcuccagacccucgagcucgacauggccaaccucaacaugaccaugccccucuccugcaccaagaacaacucccaccacuacauccgcgucggcaacgagaccggccucgagcucacccucaccaacaccuccaucaucucccacaaguucugcaaccucuccgacgcccacaagaagaaccucuacgaccacgcccucauguccaucaucuccaccuuccaccucuccauccccaacuucaaccaguacgaggccauguccugcgacuucaacggcggcaagaucuccguccaguacaaccucucccacaccuacgccgucgacgccgccaaccacugcggcaccaucgccaacggcguccuccagaccuucaugcgcauggccuggggcggcuccuacaucgcccucgacuccggcaagggcuccugggacugcaucaugaccuccuaccaguaccucaucauccagaacaccaccugggaggaccacugccaguucucccgccccucccccaucggcuaccucggccuccucucccagcgcacccgcgacaucuacaucucccgccgccuccucggcaccuucaccuggacccucuccgacuccgagggcaaggagacccccggcggcuacugccucacccgcuggaugcucaucgaggccgagcucaagugcuucggcaacaccgccgucgccaagugcaacgagaagcacgacgaggaguucugcgacaugcuccgccucuucgacuucaacaagcaggccauccgccgccucaagaccgaggcccagaugaacauccagcucaucaacaaggccgucaacgcccucaucaacgaccagcucaucaugaagaaccaccuccgcgacaucaugggcauccccuacugcaacuacuccaaguacugguaccucaaccacaccgucaccggcaagaccucccucccccgcugcuggcucgucuccaacggcuccuaccucaacgagacccacuucuccgacgacaucgagcagcaggccgacaacaugaucaccgagcuccuccagaaggaguacaucgaccgccagggcaagaccccccucggccucgucgaccucuucgucuucuccaccuccuucuaccucaucuccaucuuccuccaccucgucaagauccccacccaccgccacgucaucggcaagcccugccccaagccccaccgccucaaccagaugggcaucugcuccugcggccucuacaagcagcccggcguccccgucaaguggaagcgcuga

SEQ ID NO: 781 - RNA, 1473 nt, Artificial Sequence
  derived and/or modified protein sequence (opt2) from LASV(ISTH1048-NIG-2011;Clade II)__AIT17442__GPC
augggccagaucaucaccuucuuccaggaggucccccacgucaucgaggaggucaugaacaucguccucaucgcccucucccuccucgccauccucaagggcaucuacaacgucgccaccugcggccucuucggccucgucuccuuccuccuccucugcggccgcuccugcuccaccaccuacaagggcgucuacgagcuccagacccucgagcucgacauggccucccucaacaugaccaugccccucuccugcaccaagaacaacucccaccacuacaucauggucggcaacgagaccggccucgagcucacccucaccaacaccuccaucaucaaccacaaguucugcaaccucuccgacgcccaccgcaagaaccucuacgaccacgcccucauguccaucaucuccaccuuccaccucuccauccccaacuucaaccaguacgaggccauguccugcgacuucaacggcggcaagaucuccguccaguacaaccucucccacgccuacgccgucgacgccgccaaccacugcggcaccaucgccaacggcguccuccagaccuucaugcgcauggccuggggcggcuccuacaucgcccucgacuccggcaagggcuccugggacugcaucaugaccuccuaccaguaccucaucauccagaacaccuccugggaggaccacugccaguucucccgccccucccccaucggcuaccucggccuccucucccagcgcacccgcgacaucuacaucucccgccgccuccucggcaccuucaccuggacccucuccgacuccgagggcaacgagacccccggcggcuacugccucacccgcuggaugcucaucgaggccgagcucaagugcuucggcaacaccgccgucgccaagugcaacgagaagcacgacgaggaguucugcgacaugcuccgccucuucgacuucaacaagcaggccauccgccgccucaagaccgaggcccagauguccauccagcucaucaacaaggccgucaacgcccucaucaacgaccagcucaucaugaagaaccaccuccgcgacaucaugggcauccccuacugcaacuacuccaaguacugguaccucaaccacaccgucaccggcaagaccucccucccccgcugcuggcucgucuccaacggcuccuaccucaacgagacccacuucuccgacgacaucgagcagcaggccgacaacaugaucaccgagcuccuccagaaggaguacaucgaccgccagggcaagaccccccucggccucgucgaccucuucgucuucuccaccuccuucuaccucaucuccaucuuccuccaccucgucaagauccccacccaccgccacgucaucggcaagcccugccccaagccccaccgcaucaaccacaugggcaucugcuccugcggccucuacaagcaccccggcguccccgucaaguggaagcgcuga

SEQ ID NO: 782 - RNA, 1473 nt, Artificial Sequence
  derived and/or modified protein sequence (opt2) from LASV(ISTH1058-NIG-2011;Clade II)__AIT17446__GPC
augggccagaucaucaccuucuuccaggaggucccccacgucaucgaggaggucaugaacaucguccucaucgcccucucccuccucgccauccucaagggcaucuacaacgucgccaccugcggccucuucggccucgucuccuuccuccuccucugcggccgcuccugcuccaccaccuacaagggcgucuacgagcuccagacccucgagcucgacauggccucccucaacaugaccaugccccucuccugcaccaagaacaacucccaccacuacaucauggucggcaacgagaccggccucgagcucacccucaccaacaccuccaucaucaaccacaaguucugcaaccucuccgacgcccacaagaagaaccucuacgaccacgcccucauguccaucaucuccaccuuccaccucuccauccccaacuucaaccaguacgaggccauguccugcgacuucaacggcggcaagaucuccguccaguacaaccucucccacaccuacgccgucgacgccgccucccacugcggcaccgucgccaacggcguccuccagaccuucaugcgcauggccuggggcggcuccuacaucgcccucgacuccggcaagggcuccugggacugcaucaugaccuccuaccaguaccucaucauccagaacaccaccugggaggaccacugccaguucucccgccccucccccaucggcuaccucggccuccucucccagcgcacccgcgacaucuacaucucccgccgccuccucggcaccuucaccuggacccucuccgacuccgagggcaacgagacccccggcggcuacugccucacccgcuggaugcucaucgaggccgagcucaagugcuucggcaacaccgccgucgccaagugcaacgagaagcacgacgaggaguucugcgacaugcuccgccucuucgacuucaacaagcaggccauccgccgccucaagaccgaggcccagauguccauccagcucaucaacaaggccgucaacgcccucaucaacgaccagcucaucaugaagaaccaccuccgcgacaucaugggcauccccuacugcaacuacuccaaguacugguaccucaaccacaccgucaccggcaagaccucccucccccgcugcuggcucgucuccaacggcuccuaccucaacgagacccacuucuccgacgacaucgagcagcaggccgacaacaugaucaccgagcuccuccagaaggaguacauggaccgccagggcaagaccccccucggccucgucgaccucuucgucuucuccaccuccuucuaccucaucuccaucuuccuccaccucgucaagauccccacccaccgccacgucaucggcaagcccugccccaagccccaccgccucaaccacaugggcaucugcuccugcggccucuacaagcaccccggcguccccgucaaguggaagcgcuga

SEQ ID NO: 783 - RNA, 1473 nt, Artificial Sequence
  derived and/or modified protein sequence (opt2) from LASV(ISTH1064-NIG-2011;Clade II)__AIT17450__GPC
augggccagaucaucaccuucuuccaggaggucccccacgucaucgaggaggucaugaacaucguccucaucgcccucucccuccucgccauccucaagggcaucuacaacgucgccaccugcggccucuucggccucgucuccuuccuccuccucugcggccgcuccugcuccaccaccuacaagggcgucuacgagcuccagacccucgagcucgacauggccucccucaacaugaccaugccccucuccugcaccaagaacaacucccaccacuacaucauggucggcaacgagaccggccucgagcucacccucaccaacaccuccaucaucaaccacaaguucugcaaccucuccgacgcccacaagaagaaccucuacgaccacgcccucauguccaucaucuccaccuuccaccucuccauccccaacuucaaccaguacgaggccauguccugcgacuucaacggcggcaagaucuccguccaguacaaccucucccacaccuacgccgucgacgccgccaaccacugcggcaccaucgccaacggcguccuccagaccuucaugcgcauggccuggggcggcuccuacaucgcccucgacuccggcaagggcuccugggacugcaucaugaccuccuaccaguaccucaucauccagaacaccaccugggaggaccacugccaguucucccgccccucccccaucggcuaccucggccuccucucccagcgcacccgcgacaucuacaucucccgccgccuccucggcaccuucaccuggacccucuccgacuccgagggcaacgagacccccggcggcuacugccucacccgcuggaugcucaucgaggccgagcucaagugcuucggcaacaccgccgucgccaagugcaacgagaagcacgacgaggaguucugcgacaugcuccgccucuucgacuucaacaagcaggccauccgccgccucaagaccgaggcccagauguccauccagcucaucaacaaggccgucaacgcccucaucaacgaccagcucaucaugaagaaccaccuccgcgacaucaugggcauccccuacugcaacuacuccaaguacugguaccucaaccacaccgucaccggcaagaccucccucccccgcugcuggcucgucuccaacggcuccuaccucaacgagacccacuucuccgacgacaucgagcagcaggccgacaacaugaucaccgagcuccuccagaaggaguacaucgaccgccagggcaagaccccccucggccucgucgaccucuucgucuucuccaccuccuucuaccucaucuccaucuuccuccaccucgucaagauccccacccaccgccacaucaucggcaagcccugccccaagccccaccgccucaaccacaugggcaucugcuccugcggccucuacaagcaccccggcguccccgucaaguggaagcgcuga

SEQ ID NO: 784 - RNA, 1473 nt, Artificial Sequence
  derived and/or modified protein sequence (opt2) from LASV(ISTH1069-NIG-2011;Clade II)__AIT17454__GPC
augggccagaucaucaccuucuuccaggaggucccccacgucaucgaggaggucaugaacaucguccucaucgccuucucccuccucgccauccucaagggcaucuacaacgucgccaccugcggccucuucggccucgucuccuuccuccuccucugcggccgcuccugcuccaccaccuacaagggcgucuacgagcuccagacccucgagcucgacauggccucccucaacaugaccaugccccucuccugcaccaagaacaacucccaccacuacaucauggucggcaacgagaccggccucgagcucacccucaccaacaccuccaucaucaaccacaaguucugcaaccucuccgacgcccacaagcgcaaccucuacgaccacgcccucauguccaucaucuccaccuuccaccucuccauccccaacuucaaccaguacgaggccauguccugcgacuucaacggcggcaagaucuccguccaguacaaccucucccacaccuacgccgucgacgccgccggccacugcggcaccaucgccaacggcguccuccagaccuucaugcgcauggccuggggcggcuccuacaucgcccucgacuccggcaagggcuccugggacugcaucaugaccuccuaccaguaccucaucauccagaacaccaccugggaggaccacugccaguucucccgccccucccccaucggcuaccucggccuccucucccagcgcacccgcgacaucuacaucucccgccgccuccucggcaccuucaccuggacccucuccgacuccgagggcaacgagacccccggcggcuacugccucacccgcuggaugcucaucgaggccgagcucaagugcuucggcaacaccgccgucgccaagugcaacgagaagcacgacgaggaguucugcgacaugcuccgccucuucgacuucaacaagcaggccauccgccgccucaagaccgaggcccagauguccauccagcucaucaacaaggccgucaacgcccucaucaacgaccagcucaucaugaagaaccaccuccgcgacaucaugggcauccccuacugcaacuacuccaaguacugguaccucaaccacaccaucaccggcaagaccucccucccccgcugcuggcucgucuccaacggcuccuaccucaacgagacccacuucuccgacgacaucgagcagcaggccgacaacaugaucaccgagcuccuccagaaggaguacauggaccgccagggcaagaccccccucggccucgucgaccucuucgucuucuccaccuccuucuaccucaucuccaucuuccuccaccucgucaagauccccacccaccgccacaucaucggcaagcccugccccaagccccaccgccucaaccacaugggcaucugcuccugcggccucuacaagcaccccggcguccccguccgcuggaagcgcuga

SEQ ID NO: 785 - RNA, 1473 nt, Artificial Sequence
  derived and/or modified protein sequence (opt2) from LASV(ISTH1096-NIG-2012;Clade II)__AIT17458__GPC
augggccagaucaucaccuucuuccaggaggucccccacgucaucgaggaggucaugaacaucguccucaucgcccucucccuccucgccauccucaagggcaucuacaacgucgccaccugcggccucuucggccucgucuccuuccuccuccucugcggccgcuccugcuccaccaccuacaagggcgucuacgagcuccagacccucgagcucgacauggccucccucaacaugaccaugccccucuccugcaccaagaacaacucccaccacuacaucauggucggcaacgagaccggccucgagcucacccucaccaacaccuccaucaucaaccacaaguucugcaaccucuccgacgcccacaagaagaaccucuacgaccacgcccucauguccaucaucuccaccuuccaccucuccauccccaacuucaaccaguacgaggccauguccugcgacuucaacggcggcaagaucuccguccaguacaaccucucccacaccuacgccaucgacgccgccaaccacugcggcaccaucgccaacggcguccuccagaccuucaugcgcauggccuggggcggcuccuacaucgcccucgacuccggcaagggcuccugggacugcaucaugaccaccuaccaguaccucaucauccagaacaccaccugggaggaccacugccaguucucccgccccucccccaucggcuaccucggccuccucucccagcgcacccgcgacaucuacaucucccgccgccuccucggcaccuucaccuggacccucuccgacuccgagggcaacgagacccccggcggcuacugccucacccgcuggaugcucaucgaggccgagcucaagugcuucggcaacaccgccgucgccaagugcaacgagaagcacgacgaggaguucugcgacaugcuccgccucuucgacuucaacaagcaggccauccgccgccucaagaccgaggcccagauguccauccagcucaucaacaaggccgucaacgcccucaucaacgaccagcucaucaugaagaaccaccuccgcgacaucaugggcauccccuacugcaacuacuccaaguacugguaccucaaccacaccgucaccggcaagaccucccucccccgcugcuggcucgucuccaacggcuccuaccucaacgagacccacuucuccgacgacaucgagcagcaggccgacaacaugaucaccgagcuccuccagaaggaguacauggaccgccagggcaagaccccccucggccucgucgaccucuucgucuucuccaccuccuucuaccucaucuccaucuuccuccaccucgucaagauccccacccaccgccacgucaucggcaagcccugccccaagccccaccgccucaaccacaugggcaucugcuccugcggccucuacaagcaccccggcguccccgucaaguggaagcgcuga

SEQ ID NO: 786 - RNA, 1473 nt, Artificial Sequence
  derived and/or modified protein sequence (opt2) from LASV(ISTH1107-NIG-2012;Clade II)__AIT17462__GPC
augggccagaucaucaccuucuuccaggaggucccccacgucaucgaggaggucaugaacaucguccucaucgcccucucccuccucgccauccucaagggcaucuacaacgucgccaccugcggccucuucggccucgucuccuuccuccuccucugcggccgcuccugcuccaccaccuacaagggcgucuacgagcuccagacccucgagcucgacauggccucccucaacaugaccaugccccucuccugcaccaagaacaacucccaccacuacaucauggucggcaacgagaccggccucgagcucacccucaccaacaccuccaucaucaaccacaaguucugcaaccucuccgacgcccacaagaagaaccucuacgaccacgcccucauguccaucaucuccaccuuccaccucuccauccccaacuucaaccaguacgaggccauguccugcgacuucaacggcggcaagaucuccguccaguacaaccucucccacgccuacgccgucgacgccgccaaccacugcggcaccaucgccaacggcguccuccagaccuucaugcgcauggccuggggcggcuccuacaucgcccucgacuccggcaagggcuccugggacugcaucaugaccuccuaccaguaccucaucauccagaacaccaccugggaggaccacugccaguucucccgccccucccccaucggcuaccucggccuccucucccagcgcacccgcgacaucuacaucucccgccgccuccucggcaccuucaccuggacccucuccgacuccgagggcaacgagacccccggcggcuacugccucacccgcuggaugcucaucgaggccgagcucaagugcuucggcaacaccgccgucgccaagugcaacgagaagcacgacgaggaguucugcgacaugcuccgccucuucgacuucaacaagcaggccauccgccgccucaagaccgaggcccagauguccauccagcucaucaacaaggccgucaacgcccucaucaacgaccagcucaucaugaagaaccaccuccgcgacaucaugggcauccccuacugcaacuacuccaaguacugguaccucaaccacaccgucaccggcaagaccucccuccccaagugcuggcucgucuccaacggcuccuaccucaacgagacccacuucuccgacgacaucgagcagcaggccgacaacaugaucaccgagcuccuccagaaggaguacaucgaccgccagggcaagaccccccucggccucgucgaccucuucgucuucuccaccuccuucuaccucaucuccaucuuccuccaccucgucaagauccccacccaccgccacgucaucggcaagcccugccccaagccccaccgccucaaccacaugggcaucugcuccugcggccucuacaagcaccccggcguccccgucaaguggaagcgcuga

SEQ ID NO: 787 - RNA, 1473 nt, Artificial Sequence
  derived and/or modified protein sequence (opt2) from LASV(ISTH1111-NIG-2011;Clade II)__AIT17466__GPC
augggccagaucaucaccuucuuccaggaggucccccaggucaucgaggaggucaugaacaucguccucaucgcccucucccuccucgccauccucaagggcaucuacaacgucgccaccugcggccucuucggccucgucuccuuccuccuccucugcggccgcuccugcuccaccaccuacaagggcgucuacgagcuccagacccucgagcucgacauggccucccucaacaugaccaugccccucuccugcaccaagaacaacucccaccacuacaucauggucggcaacgagaccggccucgagcucacccucaccaaccaguccaucaucaaccacaaguucugcaaccucuccgacgcccacaagaagaaccucuacgaccacgcccucauguccaucaucuccaccuuccaccucuccauccccaacuucaaccaguacgaggccauguccugcgacuucaacggcggcaagaucuccguccaguacaaccucucccacaccuucgccgucgacgccgccaaccacugcggcaccaucgccaacggcguccuccagaccuucaugcgcauggccuggggcggcuccuacaucgcccucgacuccggccgcggcuccugggacugcaucaugaccuccuaccaguaccucaucauccagaacaccaccugggaggaccacugccaguucucccgccccucccccaucggcuaccucggccuccucucccagcgcacccgcgacaucuacaucucccgccgccuccucggcaccuucaccuggacccucuccgacuccgagggcaacgagacccccggcggcuacugccucacccgcuggaugcucaucgaggccgagcucaagugcuucggcaacaccgccgucgccaagugcaacgagaagcacgacgaggaguucugcgacaugcuccgccucuucgacuucaacaagcaggccauccgccgccucaagaccgaggcccagauguccauccagcucaucaacaaggccgucaacgcccucaucaacgaccagcucaucaugaagaaccaccuccgcgacaucaugggcauccccuacugcaacuacuccaaguacugguaccucaaccacaccaucaccggcaagaccucccucccccgcugcuggcucgucuccaacggcuccuaccucaacgagacccacuucuccgacgacaucgagcagcaggccgacaacaugaucaccgagcuccuccagaaggaguacauggaccgccagggcaagaccccccucggccucgucgaccucuucgucuucuccaccuccuucuaccucaucuccaucuuccuccaccucgucaagauccccacccaccgccacgucaucggcaagcccugccccaagccccaccgccucaaccacaugggcaucugcuccugcggccucuacaagcaccccggcguccccgucaaguggaagcgcuga

SEQ ID NO: 788 - RNA, 1473 nt, Artificial Sequence
  derived and/or modified protein sequence (opt2) from LASV(ISTH1121-NIG-2012;Clade II)__AIT17470__GPC
augggccagaucaucaccuucuuccaggaggucccccacgucaucgaggaggucaugaacaucguccucaucgcccucucccuccucgccauccucaagggcaucuacaacgucgccaccugcggccucuucggccucgucuccuuccuccuccucugcggccgcuccugcuccaccaccuacaagggcgucuacgagcuccagacccucgagcucgacauggccucccucaacaugaccaugccccucuccugcaccaagaacaacucccaccacuacaucauggucggcaacgagaccggccucgagcucacccucaccaacaccuccaucaucaaccacaaguucugcaaccucuccgacgcccaccgcaagaaccucuacgaccacgcccucauguccaucaucuccaccuuccaccucuccauccccaacuucaaccaguacgaggccauguccugcgacuucaacggcggcaagaucuccguccaguacaaccucucccacaccuacgccgucgacgccgccaaccacugcggcaccaucgccaacggcguccuccagaccuucaugcgcauggccuggggcggcuccuacaucgcccucgacuccggcaagggcuccugggacugcaucaugaccuccuaccaguaccucaucauccagaacaccaccugggaggaccacugccaguucucccgccccucccccaucggcuaccucggccuccucucccagcgcacccgcgacaucuacaucucccgccgccuccucggcaccuucaccuggacccucuccgacuccgagggcaacgagacccccggcggcuacugccucacccgcuggaugcucaucgaggccgagcucaagugcuucggcaacaccgccgucgccaagugcaacgagaagcacgacgaggaguucugcgacaugcuccgccucuucgacuucaacaagcaggccauccgccgccucaagaccgaggcccagauguccauccagcucaucaacaaggccgucaacgcccucaucaacgaccagcucaucaugaagaaccaccuccgcgacaucaugggcauccccuacugcaacuacuccaaguacugguaccucaaccacaccgucaccggcaagaccucccucccccgcugcuggcucgucuccaacggcuccuaccucaacgagacccacuucuccgacgacaucgagcagcaggccgacaacaugaucaccgagcuccuccagaaggaguacaucgaccgccagggcaagaccccccucggccucgucgaccucuucgucuucuccaccuccuucuaccucaucuccaucuuccuccaccucgucaagauccccacccaccgccacgucaucggcaagcccugccccaagccccaccgccucaaccacaugggcaucugcuccugcggccucuacaagcaccccggcguccccgucaaguggaagcgcuga

SEQ ID NO: 789 - RNA, 1473 nt, Artificial Sequence
  derived and/or modified protein sequence (opt2) from LASV(ISTH1129-NIG-2012;Clade II)__AIT17474__GPC
augggccagaucaucaccuucuuccaggaggucccccacgucaucgaggaggucaugaacaucguccucaucgcccucucccuccucgccauccucaagggcaucuacaacgucgccaccugcggccucuucggccucgucuccuuccuccuccucugcggccgcuccugcuccaccaccuacaagggcgucuacgagcuccagacccucgagcucgacauggccucccucaacaugaccaugccccucuccugcaccaagaacaacucccaccacuacaucauggucggcaacgagaccggccucgagcucacccucaccaacaccuccaucaucaaccacaaguucugcaaccucuccgacgcccacaagaagaaccucuacgaccacgcccucauguccaucaucuccaccuuccaccucuccauccccaacuucaaccaguacgaggccauguccugcgacuucaacggcggcaagaucuccauccaguacaaccucucccacaccuacgccgucgacgccgccaaccacugcggcaccaucgccaacggcguccuccagaccuucaugcgcauggccuggggcggcuccuacaucgcccucgacuccggcaagggcuccugggacugcaucaugaccuccuaccaguaccucaucauccagaacaccaccugggaggaccacugccaguucucccgccccucccccaucggcuaccucggccuccucucccagcgcacccgcgacaucuacaucucccgccgccuccucggcaccuucaccuggacccucuccgacuccgagggcaacgagacccccggcggcuacugccucacccgcuggaugcucaucgaggccgagcucaagugcuucggcaacaccgccgucgccaagugcaacgagaagcacgacgaggaguucugcgacaugcuccgccucuucgacuucaacaagcaggccauccgccgccucaagaccgaggcccagauguccauccagcucaucaacaaggccgucaacgcccucaucaacgaccagcucaucaugaagaaccaccuccgcgacaucaugggcauccccuacugcaacuacuccaaguacugguaccucaaccacaccaucaccggcaagaccucccucccccgcugcuggcucgucuccaacggcuccuaccucaacgagacccacuucuccgacgacaucgagcagcaggccgacaacaugaucaccgagcuccuccagaaggaguacaucgaccgccagggcaagaccccccucggccucgucgaccucuucgucuucuccaccuccuucuaccucaucuccaucuuccuccaccucgucaagauccccacccaccgccacaucaccggcaagcccugccccaagccccaccgccucaaccacaugggcaucugcuccugcggccucuacaagcaccccggcguccccguccgcuggaagcgcuga

SEQ ID NO: 790 - RNA, 1473 nt, Artificial Sequence
  derived and/or modified protein sequence (opt2) from LASV(ISTH1137-NIG-2011;Clade II)__AIT17478__GPC
augggccagaucaucaccuucuuccaggaggucccccacgucaucgaggaggucaugaacaucguccucaucgcccucucccuccucgccauccucaagggcaucuacaacgucgccaccugcggccucuucggccucgucuccuuccuccuccucugcggccgcuccugcuccaccaccuacaagggcgucuacgagcuccagacccucgagcucgacauggccucccucaacaugaccaugccccucuccugcaccaagaacaacucccaccacuacaucauggucggcaacgagaccggccucgagcucacccucaccaacaccuccaucaucaaccacaaguucugcaaccucuccgacgcccacaagaagaaccucuacgaccacgcccucauguccaucaucuccaccuuccaccucuccauccccaacuucaaccaguacgaggccauguccugcgacuucaacggcggcaagaucuccguccaguacaaccucucccacaccuacgccgucgacgccgccgaccacugcggcaccaucgccaacggcguccuccagaccuucaugcgcauggccuggggcggcuccuacaucgcccucgacuccggcaagggcuccugggacugcaucaugaccuccuaccaguaccucaucauccagaacaccaccugggaggaccacugccaguucucccgccccucccccaucggcuaccucggccuccucucccagcgcacccgcgacaucuacaucucccgccgccuccucggcaccuucaccuggacccucuccgacuccgagggcaacgagacccccggcggcuacugccucacccgcuggaugcucaucgaggccgagcucaagugcuucggcaacaccgccgucgccaagugcaacgagaagcacgacgaggaguucugcgacaugcuccgccucuucgacuucaacaagcaggccaucucccgccucaagaccgaggcccagauguccauccagcucaucaacaaggccgucaacgcccucaucaacgaccagcucaucaugaagaaccaccuccgcgacaucaugggcauccccuacugcaacuacuccaaguacugguaccucaaccacaccgucaccggcaagaccucccucccccgcugcuggcucgucuccaacggcuccuaccucaacgagacccacuucuccgacgacaucgagcagcaggccgacaacaugaucaccgagaugcuccagaaggaguacaucgaccgccagggcaagaccccccucggccucgucgaccucuucgucuucuccaccuccuucuaccucaucuccaucuuccuccaccucgucaagauccccacccaccgccacgucaucggcaagcccugccccaagccccaccgccucaaccacaugggcaucugcuccugcggccucuacaagcaccccggcguccccgucaaguggaagcgcuga

SEQ ID NO: 791 - RNA, 1473 nt, Artificial Sequence
  derived and/or modified protein sequence (opt2) from LASV(ISTH2010-NIG-2012;Clade II)__AIT17482__GPC
augggccagaucaucaccuucuuccaggaggucccccacgucaucgaggaggucaugaacaucguccucaucgcccucucccuccucgccauccucaagggcaucuacaacgucgccaccugcggccucuucggccucgucuccuuccuccuccucugcggccgcuccugcuccaccaccuacaagggcgucuacgagcuccagacccucgagcucgacauggccucccucaacaugaccaugccccucuccugcaccaagaacaacucccaccacuacaucauggucggcaacgagaccggccucgagcucacccucaccaacaccuccaucaucaaccacaaguucugcaaccucuccgacgcccacaagaagaaccucuacgaccacgcccucauguccaucaucuccaccuuccaccucuccauccccaacuucaaccaguacgaggccauguccugcgacuucaacggcggcaagaucuccguccaguacaaccucucccacgccuacgccgucgacgccgccaaccacugcggcaccaucgccaacggcguccuccagaccuucaugcgcauggccuggggcggcuccuacaucgcccucgacuccggcaagggcuccugggacugcaucaugaccuccuaccaguaccucaucauccagaacaucaccugggaggaccacugccaguucucccgccccucccccaucggcuaccucggccuccucucccagcgcacccgcgacaucuacaucucccgccgccuccucggcaccuucaccuggacccucuccgacuccgagggcaacgagacccccggcggcuacugccucacccgcuggaugcucaucgaggccgagcucaagugcuucggcaacaccgccgucgccaagugcaacgagaagcacgacgaggaguucugcgacaugcuccgccucuucgacuucaacaagcaggccauccgccgccucaagaccgaggcccagauguccauccagcucaucaacaaggccgucaacgcccucaucaacgaccagcucaucaugaagaaccaccuccgcgacaucaugggcauccccuacugcaacuacuccaaguacugguaccucaaccacaccgucaccggcaagaccucccucccccgcugcuggcucgucuccaacggcuccuaccucaacgagacccacuucuccgacgacaucgagcagcaggccgacaacaugaucaccgagcuccuccagaaggaguacaucgaccgccagggcaagaccccccucggccucgucgaccucuucgucuucuccaccuccuucuaccucaucuccaucuuccuccaccucgucaagauccccacccaccgccacgucgucggcaagcccugccccaagccccaccgccucaaccacaugggcaucugcuccugcggccucuacaagcaccccggcguccccgucaaguggaagcgcuga

SEQ ID NO: 792 - RNA, 1473 nt, Artificial Sequence
  derived and/or modified protein sequence (opt2) from LASV(ISTH2016-NIG-2012;Clade II)__AIT17486__GPC
augggccagaucaucaccuucuuccaggaggucccccacgucaucgaggaggucaugaacaucguccucaucgcccucucccuccucgccauccucaagggcaucuacaacgucgccaccugcggccucuucggccucgucuccuuccuccuccucugcggccgcuccugcuccaccaccuacaagggcgucuacgagcuccagacccucgagcucgacauggccucccucaacaugaccaugccccucuccugcaccaagaacaacucccaccacuacaucauggucggcaacgagaccggccucgagcucacccucaccaacaccuccaucaucaaccacaaguucugcaaccucuccgacgcccacaagaagaaccucuacgaccacgcccucauguccaucaucuccaccuuccaccucuccauccccaacuucaaccaguacgaggccauguccugcgacuucaacggcggcaagaucuccguccaguacaaccucucccacaccuacgccgucgacgccgccaaccacugcggcaccaucgccaacggcguccuccagaccuucaugcgcauggccuggggcggcuccuacaucgcccucgacuccggcaagggcuccugggacugcaucaugaccuccuaccaguaccucaucauccagaacaccaccugggaggaccacugccaguucucccgccccucccccgucggcuaccucggccuccucucccagcgcacccgcgacaucuacaucucccgccgccuccucggcaccuucaccuggacccucuccgacuccgagggcaacgagacccccggcggcuacugccucacccgcuggaugcucaucgaggccgagcucaagugcuucggcaacaccgccgucgccaagugcaacgagaagcacgacgaggaguucugcgacaugcuccgccucuucgacuucaacaagcaggccauccgccgccucaagaccgaggcccagauguccauccagcucaucaacaaggccgucaacgcccucaucaacgaccagcucaucaugaagaaccaccuccgcgacaucaugggcauccccuacugcaacuacuccaaguacugguaccucaaccacaccgucaccggcaagaccucccucccccgcugcuggcucgucuccaacggcuccuaccucaacgagacccacuucuccgacgacaucgagcagcaggccgacaacaugaucaccgagcuccuccagaaggaguacaucgaccgccagggcaagaccccccucggccucgucgaccucuucgucuucuccaccuccuucuaccucaucuccaucuuccuccaccucgucaagauccccacccaccgccacgucaucggcaagcccugccccaagccccaccgccucaaccacaugggcaucugcuccugcggccucuacaagcaccccggcguccccgucaaguggaagcgcuga

SEQ ID NO: 793 - RNA, 1473 nt, Artificial Sequence
  derived and/or modified protein sequence (opt2) from LASV(ISTH2020-NIG-2012;Clade II)__AIT17490__GPC
augggccagaucaucaccuucuuccaggaggucccccacgucaucgaggaggucaugaacaucguccucaucacccucucccuccucgccauccucaagggcaucuacaacgucgccaccugcggccucuucggccucgucuccuuccuccuccucugcggccgcuccugcuccaccaccuacaagggcgucuacgagcuccagacccucgagcucgacauggccaaccucaacaugaccaugccccucuccugcaccaagaacaacucccaccacuacaucauggucggcaacgagaccggccucgagcucacccucaccaacaccuccaucaucaaccacaaguucugcaaccucuccgacgcccacaagaagaaccucuacgaccacgcccucauguccaucaucuccaccuuccaccucuccauccccaacuucaaccaguacgaggccauguccugcgacuucaacggcggcaagaucuccguccaguacaaccucucccacaccuucgccgucgacgccgccaaccacugcggcaccaucgccaacggcguccuccagaccuucaugcgcauggccuggggcggcuccuacaucgcccucgacuccggcaagggcuccugggacugcaucaugaccuccuaccaguaccucaucauccagaacaccaccugggaggaccacugccaguucucccgccccucccccaucggcuaccucggccuccucucccagcgcacccgcgacaucuacaucucccgccgccuccucggcaccuucaccuggacccucuccgacuccgagggcaacgagacccccggcggcuacugccucacccgcuggaugcucaucgaggccgagcucaagugcuucggcaacaccgccgucgccaagugcaacgagaagcacgacgaggaguucugcgacaugcuccgccucuucgacuucaacaagcaggccauccgccgccucaagaccgaggcccagauguccauccagcucaucaacaaggccgucaacgcccucaucaacgaccagcucaucaugaagaaccaccuccgcgacaucaugggcauccccuacugcaacuacuccaaguacugguaccucaaccacaccgucaccggcaagaccucccucccccgcugcuggcucgucuccaacggcuccuaccucaacgagacccacuucuccgacgacaucgagcagcaggccgacaacaugaucaccgagcuccuccagaaggaguacauggaccgccagggcaagaccccccucggccucgucgaccucuucgucuucuccaccuccuucuaccucaucuccaucuuccuccaccucgucaagauccccacccaccgccacaucaucggcaagcccugccccaagccccaccgccucaaccacaugggcaucugcuccugcggccucuacaagcaccccggcguccccgucaaguggaagcgcuga

SEQ ID NO: 794 - RNA, 1473 nt, Artificial Sequence
  derived and/or modified protein sequence (opt2) from LASV(ISTH2025-NIG-2012;Clade II)__AIT17494__GPC
augggccagaucaucaccuucuuccaggaggucccccacgucaucgaggaggucaugaacaucguccucaucgcccucucccuccucgccauccucaagggcgucuacaacgucgccaccugcggccucuucggccucgucuccuuccuccuccucugcggccgcuccugcuccaccaucuacaagggcgucuacgagcuccagacccucgagcucgacauggccucccucaacaugaccaugccccucuccugcaccaagaacaacucccaccacuacaucauggucggcaacgagaccggccucgagcucacccucaccaacaccuccaucaucaaccacaaguucugcaaccucuccgacgcccacaagaagaaccucuacgaccacgcccucauguccaucaucuccaccuuccaccucuccauccccaacuucaaccaguacgaggccauguccugcgacuucaacggcggcaagaucuccguccaguacaaccucucccacaccuacgccgucgacgccgccaaccacugcggcaccaucgccaacggcguccuccagaccuucaugcgcauggccuggggcggcuccuacaucgcccucgacuccggcaagggcuccugggacugcaucaugaccuccuaccaguaccucaucauccagaacaccuccugggaggaccacugccaguucucccgccccucccccaucggcuaccucggccuccucucccagcgcacccgcgacaucuacaucucccgccgccuccucggcaccuucaccuggacccucuccgacuccgagggcaacgagacccccggcggcuacugccucacccgcuggaugcucaucgaggccgagcucaagugcuucggcaacaccgccgucgccaagugcaacgagaagcacgacgaggaguucugcgacaugcuccgccucuucgacuucaacaagcaggccauccgccgccucaagaccgaggcccagauguccauccagcucaucaacaaggccgucaacgcccucaucaacgaccagcucaucaugaagaaccaccuccgcgacaucaugggcauccccuacugcaacuacuccaaguacugguaccucaaccacaccgucaccggcaagaccucccucccccgcugcuggcucgucuccaacggcuccuaccucaacgagacccacuucuccgacgacaucgagcagcaggccgacaacaugaucaccgagcuccuccagaaggaguacaucgaccgccagggcaagaccccccucggccucgucgaccucuucgucuucuccaccuccuucuaccucaucuccaucuuccuccaccucgucaagauccccacccaccgccacgucaucggcaagcccugccccaagccccaccgccucaaccacaugggcaucugcuccugcggccucuacaagcaccccggcguccccgucaaguggaagcgcuga

SEQ ID NO: 795 - RNA, 1473 nt, Artificial Sequence
  derived and/or modified protein sequence (opt2) from LASV(ISTH2031-NIG-2012;Clade II)__AIT17498__GPC
augggccagaucaucaccuucuuccaggaggucccccacgucaucgaggaggucaugaacaucguccucaucgcccucucccuccucgccauccucaagggcaucuacaacgucgccaccugcggccucuucggccucgucuccuuccuccuccucugcggccgcuccugcuccaccaccuacaagggcgucuacgagcuccagacccucgagcucgacauggccucccucaacaugaccaugccccucuccugcaccaagaacaacucccaccacuacaucauggucggcaacgagaccggccucgagcucacccucaccaacaccuccaucaucaaccacaaguucugcaaccucuccgacgcccacaagaagaaccucuacgaccacgcccucauguccaucaucuccaccuuccaccucuccauccccaacuucaaccaguacgaggccauguccugcgacuucaacggcggcaagaucuccguccaguacaaccucucccacaccuacgccgucgacgccgccaaccacugcggcaccaucgccaacggcguccuccagaccuucaugcgcauggccuggggcggcuccuacaucgcccucgacuccggcaagggcaacugggacugcaucaugaccuccuaccaguaccucaucauccagaacaccaccugggaggaccacugccaguucucccgccccucccccaucggcuaccucggccuccucucccagcgcacccgcgacaucuacaucucccgccgccuccucggcaccuucaccuggacccucuccgacuccgagggcaacgagacccccggcggcuacugccucacccgcuggaugcucaucgagaccgagcucaagugcuucggcaacaccgccgucgccaagugcaacgagaagcacgacgaggaguucugcgacaugcuccgccucuucgacuucaacaagcaggccaucucccgccuccgcuccgaggcccagauguccauccagcucaucaacaaggccgucaacgcccucaucaacgaccagcucaucaugaagaaccaccuccgcgacaucaugggcauccccuacugcaacuacuccaaguacugguaccucaaccacaccgucaccggcaagaccucccuccccaagugcuggcucgucuccaacggcuccuaccucaacgagacccacuucuccgacgacaucgagcagcaggccgacaacaugaucaccgagaugcuccagaaggaguacaucgaccgccagggcaagaccccccucggccucgucgaccucuucgucuucuccaccuccuucuaccucaucuccaucuuccuccaccucgucaagauccccacccaccgccacaucaccggcaagcccugccccaagccccaccgccucaaccacaugggcaucugcuccugcggccucuacaagcaccccggcguccccgucaaguggaagcgcuga

SEQ ID NO: 796 - RNA, 1473 nt, Artificial Sequence
  derived and/or modified protein sequence (opt2) from LASV(ISTH2037-NIG-2012;Clade II)__AIT17502__GPC
augggccagaucaucaccuucuuccaggagaucccccacgucaucgaggaggucaugaacaucguccucaucacccucucccuccucgccauccucaagggcaucuacaacgucgccaccugcggccucuucggccucgucuccuuccuccuccucugcggcaaguccugcuccaccaccuacaagggcgucuacgagcuccagacccucgagcucgacauggccucccucaacaugaccaugccccucuccugcaccaagaacaacucccaccacuacaucauggucggcaacgagaccggccucgagcucacccucaccaacaccuccaucaucaaccacaaguucugcaaccucuccgacgcccaccgcaagaaccucuacgaccacacccucauguccaucaucuccaccuuccaccucuccauccccaacuucaaccaguacgaggccauguccugcgacuucaacggcggcaagaucuccguccaguacaaccucucccacgccuacgccaucgacgccgccacccacugcggcaccaucgccaacggcguccuccagaccuucaugcgcauggccuggggcggcuccuacaucgcccucgacuccggcaagggcggcugggacugcaucaugaccuccuaccaguaccucaucauccagaacaccaccugggaggaccacugccaguucucccgccccucccccaucggcuaccucggccuccucucccagcgcacccgcgacaucuacaucucccgccgccuccucggcaccuucaccuggacccucuccgacuccgagggcaacgagacccccggcggcuacugccucacccgcuggaugcucaucgaggccgagcucaagugcuucggcaacaccgccgucgccaagugcaacgagaagcacgacgaggaguucugcgacaugcuccgccucuucgacuucaacaagcaggccauccgccgccucaagaccgaggcccagauguccauccagcucaucaacaaggccgucaacgcccucaucaacgaccagcucaucaugcgcaaccaccuccgcgacaucaugggcauccccuacugcaacuacuccaaguacugguaccucaaccacaccgucaccggcaagaccucccuccccaagugcuggcucgucuccaacggcuccuaccucaacgagacccacuucuccgacgacaucgagcagcaggccgacaacaugaucaccgagcuccuccagaaggaguacauggaccgccagggcaagaccccccucggccucgucgaccucuucgucuucuccaccuccuucuaccucaucuccaucuuccuccaccucgucaagauccccacccaccgccacgucaucggcaagcccugccccaagccccaccgccucaaccacaugggcgucugcuccugcggccucuacaagcaccccggcguccccgucaaguggaagcgcuga

SEQ ID NO: 797 - RNA, 1473 nt, Artificial Sequence
  derived and/or modified protein sequence (opt2) from LASV(ISTH2042-NIG-2012;Clade II)__AIT17506__GPC
augggccagaucaucaccuucuuccaggaggucccccacgucaucgaggaggucaugaacaucguccucaucgcccucucccuccucgccauccucaagggcaucuacaacgucgccaccugcggccucuucggccucgucuccuuccuccuccucugcggccgcuccugcuccaccaccuacaagggcgucuacgagcuccagacccucgagcucgacauggccucccucaacaugaccaugccccucuccugcaccaagaacaacucccaccacuacaucauggucggcaacgagaccggccucgagcucacccucaccaacaccuccaucaucaaccacaaguucugcaaccucuccgacgcccacaagaagaaccucuacgaccacgcccucauguccaucaucuccaccuuccaccucuccauccccaacuucaaccaguacgaggccauguccugcgacuucaacggcggcaagaucuccguccaguacaaccucucccacgccuacgccgucgacgccgccgagcacugcggcaccaucgccaacggcguccuccagaccuucaugcgcauggccuggggcggcuccuacaucgcccucgacuccggcaagggcuccugggacugcgucaugaccuccuaccaguaccucaucauccagaacaccaccugggaggaccacugccaguucucccgccccucccccaucggcuaccucggccuccucucccagcgcacccgcgacaucuacaucucccgccgccuccucggcaccuucaccuggacccucuccgacuccgagggcaacgagacccccggcggcuacugccucacccgcuggaugcucaucgaggccgagcucaagugcuucggcaacaccgccgucgccaagugcaacgagaagcacgacgaggaguucugcgacaugcuccgccucuucgacuucaacaagcaggccaucgagcgccucaagaccgaggcccagauguccauccagcucaucaacaaggccgucaacgcccucaucaacgaccagcucaucaugaagaaccaccuccgcgacaucaugggcauccccuacugcaacuacuccaaguacugguaccucaaccacaccgucaccggcaagaccucccucccccgcugcuggcucgucuccaacggcuccuaccucaacgagacccacuucuccgacgacaucgagcagcaggccgacaacaugaucaccgagaugcuccagaaggaguacaucgaccgccagggcaagaccccccucggccucgucgaccucuucgucuucuccaccuccuucuaccucaucuccaucuuccuccaccucgucaagauccccacccaccgccacgucaucggcaagcccugccccaagccccaccgccucaaccacaugggcaucugcuccugcggccucuacaagcaccccggcguccccgucaaguggaagcgcuga

SEQ ID NO: 798 - RNA, 1473 nt, Artificial Sequence
  derived and/or modified protein sequence (opt2) from LASV(ISTH2046-NIG-2012;Clade II)__AIT17510__GPC
augggccagaucaucaccuucuuccaggaggucccccacgucaucgaggaggucaugaacaucguccucaucgcccucucccuccucgccauccucaagggcaucuacaacgucgccaccugcggccucuucggccucgucuccuuccuccuccucugcggccgcuccugcuccaccaccuacaagggcgucuacgagcuccagacccucgagcucgacauggccucccucaacaugaccaugccccucuccugcaccaagaacaacucccaccacuacaucauggucggcaacgagaccggccucgagcucacccucaccaacaccuccaucaucaaccacaaguucugcaaccucuccgacgcccacaagaagaaccucuacgaccacgcccucauguccaucaucuccaccuuccaccucuccauccccaacuucaaccaguacgaggccauguccugcgacuucaacggcggcaagaucuccguccaguacaaccucucccacaccuacgccgucgacgccgccaaccacugcggcaccaucgccaacggcguccuccagaccuucaugcgcauggccuggggcggcuccuacaucgcccucgacuccggcaagggcuccugggacugcaucaugaccuccuaccaguaccucaucauccagaacaccaccugggaggaccacugccaguucucccgccccucccccaucggcuaccucggccuccucucccagcgcaccaaggacaucuacaucucccgccgccuccucggcaccuucaccuggacccucuccgacuccgagggcaacgagacccccggcggcuacugccucacccgcuggaugcucaucgaggccgagcucaagugcuucggcaacaccgccgucgccaagugcaacgagaagcacgacgaggaguucugcgacaugcuccgccucuucgacuucaacaagcaggccauccgccgccucaagaccgaggcccagauguccauccagcucaucaacaaggccgucaacgcccucaucaacgaccagcucaucaugaagaaccaccuccgcgacaucaugggcauccccuacugcaacuacuccaaguacugguaccucaaccacaccgucaccggcaagaccucccucccccgcugcuggcucgucuccaacggcuccuaccucaacgagacccacuucuccgacgacaucgagcagcaggccgacaacaugaucaccgagcuccuccagaaggaguacaucgaccgccagggcaagaccccccucggccucgucgaccucuucgucuucuccaccuccuucuaccucaucuccaucuuccuccaccucgucaagauccccacccaccgccacgucaucggcaagcccugccccaagccccaccgccucaaccacaugggcaucugcuccugcggccucuacaagcaccccggcguccccgucaaguggaagcgcuga

SEQ ID NO: 799 - RNA, 1473 nt, Artificial Sequence
  derived and/or modified protein sequence (opt2) from LASV(ISTH2050-NIG-2012;Clade II)__AIT17514__GPC
augggccagaucaucaccuucuuccaggaggucccccacgucaucgaggaggucaugaacaucguccucaucgcccucucccuccucgccguccucaagggcaucuacaacgucgccaccugcggccucuucggccucgucuccuuccuccuccucugcggccgcuccugcuccaccaccuacaagggcgucuacgagcuccagacccucgagcucgacauggccucccucaacaugaccaugccccucuccugcaccaagaacaacucccaccacuacaucauggucggcaacgagaccggccucgagcucacccucaccaacaccuccaucaucaaccacaaguucugcaaccucuccgacgcccacaagaagaaccucuacgaccacgcccucauguccaucaucuccaccuuccaccucuccauccccaacuucaaccaguacgaggccauguccugcgacuucaacggcggcaagaucuccguccaguacaaccucucccacaccuacgccgucgacgccgccaaccacugcggcaccaucgccaacggcguccuccagaccuucaugcgcauggccuggggcggcuccuacaucgcccucgacuccggcaagggcuccugggacugcaucaugaccuccuaccaguaccucaucauccagaacaccaccugggaggaccacugccaguucucccgccccucccccaucggcuaccucggccuccucucccagcgcacccgcgacaucuacaucucccgccgccuccucggcaccuucaccuggacccucuccgacuccgagggcaacgagacccccggcggcuacugccucacccgcuggaugcucaucgaggccgagcucaagugcuucggcaacaccgccgucgccaagugcaacgagaagcacgacgaggaguucugcgacaugcuccgccucuucgacuucaacaagcaggccauccgccgccucaagaccgaggcccagauguccauccagcucaucaacaaggccgucaacgcccucaucaacgaccagcucaucaugaagaaccaccuccgcgacaucaugggcauccccuacugcaacuacuccaaguacugguaccucaaccacaccgucaccggcaagaccucccucccccgcugcuggcucgucuccaacggcuccuaccucaacgagacccacuucuccgacgacaucgagcagcaggccgacaacaugaucaccgagcuccuccagaaggaguacaucgaccgccagggcaagaccccccucggccucgucgaccucuucgucuucuccaccuccuucuaccucaucuccaucuuccuccaccucgucaagauccccacccaccgccacgucaucggcaagcccugccccaagccccaccgccucaaccacaugggcaucugcuccugcggccucuaccgccaccccggcguccccgucaaguggaagcgcuga

SEQ ID NO: 800 - RNA, 1473 nt, Artificial Sequence
  derived and/or modified protein sequence (opt2) from LASV(ISTH2057-NIG-2012;Clade II)__AIT17518__GPC
augggccagaucaucaccuucuuccaggaggucccccacgucaucgaggaggucaugaacaucguccucaucgcccucucccuccucgccauccucaagggcaucuacaacgucgccaccugcggccucuucggccucgucuccuuccuccuccucugcggccgcuccugcuccaccaccuacaagggcgucuacgagcuccagacccucgagcucgacauggccucccucaacaugaccaugccccucuccugcaccaagaacaacucccaccacuacaucauggucggcaacgagaccggccucgagcucacccucaccaacaccuccaucaucaaccacaaguucugcaaccucuccgacgcccacaagaagaaccucuacgaccacgcccucauguccaucaucuccaccuuccaccucuccauccccaacuucaaccaguacgaggccauguccugcgacuucaacggcggcaagaucuccguccaguacaaccucucccacgccuacgccgucgacgccgccaaccacugcggcaccaucgccaacggcguccuccagaccuucaugcgcauggccuggggcggcuccuacaucgcccucgacuccggcaagggcuccugggacugcaucaugaccuccuaccaguaccucaucauccagaacaccaccugggaggaccacugccaguucucccgccccucccccaucggcuaccucggccuccucucccagcgcacccgcgacaucuacaucucccgccgccuccucggcaccuucaccuggacccucuccgacuccgagggcaacgagacccccggcggcuacugccucacccgcuggaugcucaucgaggccgagcucaagugcuucggcaacaccgccgucgccaagugcaacgagaagcacgacgaggaguucugcgacaugcuccgccucuucgacuucaacaagcaggccauccgccgccucaagaccgaggcccagauguccauccagcucaucaacaaggccgucaacgcccucaucaacgaccagcucaucaugaagaaccaccuccgcgacaucaugggcauccccuacugcaacuacuccaaguacugguaccucaaccacaccgucaccggcaagaccucccucccccgcugcuggcucgucuccaacggcuccuaccucaacgagacccacuucuccgacgacaucgagcagcaggccgacaacaugaucaccgagcuccuccagaaggaguacauggaccgccagggcaagaccccccucggccucgucgaccucuucgucuucuccaccuccuucuaccucaucuccaucuuccuccaccucgucaagauccccacccaccgccacgucaucggcaagcccugccccaagccccaccgccucaaccacaugggcaucugcuccugcggccucuacaagcaccccggcguccccgucaaguggaagcgcuga

SEQ ID NO: 801 - RNA, 1473 nt, Artificial Sequence
  derived and/or modified protein sequence (opt2) from LASV(ISTH2064-NIG-2012;Clade II)__AIT17524__GPC
augggccagaucaucaccuucuuccaggaggucccccacgucaucgaggaggucaugaacaucguccucaucgcccucucccuccucgccauccucaagggcaucuacaacgucgccaccugcggccucuucggccucgucuccuuccuccuccucugcggccgcuccugcuccaccaccuacaagggcgucuacgagcuccagacccucgagcucgacauggccucccucaacaugaccaugccccucuccugcaccaagaacaacucccaccacuacaucauggucggcaacgagaccggccucgagcucacccucaccaacaccuccaucaucaaccacaaguucugcaaccucuccgacgcccacaagaagaaccucuacgaccacgcccucauguccaucaucuccaccuuccaccucuccauccccaacuucaaccaguacgaggccauguccugcgacuucaacggcggcaagaucuccguccaguacaaccucucccacaccuacgccaucgacgccgccaaccacugcggcaccaucgccaacggcguccuccagaccuucaugcgcauggccuggggcggcuccuacaucgcccucgacuccggcaagggcuccugggacugcaucaugaccuccuaccaguaccucaucauccagaacaccaccugggaggaccacugccaguucucccgccccucccccaucggcuaccucggccuccucucccagcgcacccgcgacaucuacaucucccgccgccuccucggcaccuucaccuggacccucuccgacuccgagggcaacgagacccccggcggcuacugccucacccgcuggaugcucaucgaggccgagcucaagugcuucggcaacaccgccgucgccaagugcaacgagaagcacgacgaggaguucugcgacaugcuccgccucuucgacuucaacaagcaggccauccgccgccucaagaccgaggcccagauguccauccagcucaucaacaaggccgucaacgcccucaucaacgaccagcucaucaugaagaaccaccuccgcgacaucaugggcauccccuacugcaacuacuccaaguacugguaccucaaccacaccgucaccggcaagaccucccucccccgcugcuggcucgucuccaacggcuccuaccucaacgagacccacuucuccgacgacaucgagcagcaggccgacaacaugaucaccgagaugcuccagaaggaguacauggaccgccagggcaagaccccccucggccucgucgaccucuucgucuucuccaccuccuucuaccucaucuccaucuuccuccaccucgucaagauccccacccaccgccacgucaucggcaagcccugccccaagccccaccgccucaaccacaugggcaucugcuccugcggccucuacaagcaccccggcguccccgucaaguggaagcgcuga

SEQ ID NO: 802 - RNA, 1473 nt, Artificial Sequence
  derived and/or modified protein sequence (opt2) from LASV(ISTH2065-NIG-2012;Clade II)__AIT17528__GPC
augggccagaucaucaccuucuuccaggaggucccccacgucaucgaggaggucaugaacaucguccucaucgcccucucccuccucgccaugcucaagggcaucuacaacaucgccaccugcggccucuucggccucaucuccuuccuccuccucugcggccgcuccugcuccaccaccuacaagggcgucuacgagcuccaggcccucgagcucgacauggccaaccucaacaugaccaugccccucuccugcaccaagaacaacucccaccacuacaucauggucggcaacgagaccggccucgagcucacccucaccaacaccuccaucaucaaccacaaguucugcaaccucuccgacgcccacaagaagaaccucuacgaccacgcccucauguccaucaucuccaccuuccaccucuccauccccaacuucaaccaguacgaggccauguccugcgacuucaacggcggcaagaucuccguccaguacaaccucucccacaccuacgccggcgacgccgccaagcacugcggcaccaucgccaacggcguccuccagaccuucaugcgcauggccuggggcggcuccuacaucgcccucgacuccggcaagggcaacugggacugcaucaugaccuccuaccaguaccucaucauccagaacaccaccugggaggaccacugccaguucucccgccccucccccaucggcuaccucggccuccucucccagcgcacccgcgacaucuacaucucccgccgccuccucggcaccuucaccuggacccucuccgacuccgagggcaacgagacccccggcggcuacugccucacccgcuggaugcucaucgaggccgagcucaagugcuucggcaacaccgccgucgccaagugcaacgagaagcacgacgaggaguucugcgacaugcuccgccucuucgacuucaacaagcaggccauccgccgccucaagaccgaggcccagauguccauccagcucaucaacaaggccgucaacgcccucaucaacgaccagcucaucaugaagaaccaccuccgcgacaucaugggcauccccuacugcaacuacuccaaguacugguaccucaaccacuccgucaccggccgcaccucccucccccgcugcuggcucgucuccaacggcuccuaccucaacgagacccaguucuccgacgacaucgagcagcaggccgacaacaugaucaccgagaugcuccagaaggaguacaucgaccgccagggcaagaccccccucggccucgucgaccucuucgucuucuccaccuccuucuaccucaucuccaucuuccuccaccucaucaagauccccacccaccgccacaucgucggcaagcccugccccaagccccaccgccucaaccacaugggcaucugcuccugcggccucuacaagcaccccggcauccccgucaaguggaagcgcuga

SEQ ID NO: 803 - RNA, 1473 nt, Artificial Sequence
  derived and/or modified protein sequence (opt2) from LASV(ISTH2094-NIG-2012;Clade II)__AIT17538__GPC
augggccagaucaucaccuucuuccaggaggucccccacgucaucgaggaggucaugaacaucguccucaucgcccucucccuccucgccauccucaagggcaucuacaacaucgccaccugcggccucuucggccucaucuccuuccuccuccucugcggccgcuccugcuccaccaccuacaagggcgucuacgagcuccagacccucgagcucgacauggccaaccucaacaugaccaugccccucuccugcaccaagaacaacucccaccacuacaucauggucggcaacgagaccggccucgagcucacccucaccaacaccuccaucaucaaccacaaguucugcaaccucuccgacgcccacaagaagaaccucuacgaccacgcccucauguccaucaucuccaccuuccaccucuccauccccaacuucaaccaguacgaggccauguccugcgacuucaacgagggcaagaucuccguccaguacaaccucucccacuccuacgccaucgacgccgccggccacugcggcaccaucgccaacggcguccuccagaccuucaugcgcauggccuggggcggcuccuacaucgcccucgacuccggcaagggcaacugggacugcaucaugaccuccuaccaguaccucaucauccagaacaccaccugggaggaccacugccaguucucccgccccucccccaucggcuaccucggccuccucucccagcgcacccgcgacaucuacaucucccgccgccuccucggcaccuucaccuggacccucuccgacuccgagggcaacgaggcccccggcggcuacugccucacccgcuggaugcucaucgaggccgagcucaagugcuucggcaacaccgccaucgccaagugcaacgagaagcacgacgaggaguucugcgacaugcuccgccucuucgacuucaacaagcaggccaucaagcgccucaaggccgaggcccagauguccauccaccucaucaacaaggccgucaacgcccucaucaacgaccagcucaucaugaagaaccaccuccgcgacaucaugggcauccccuacugcaacuacuccaaguacugguaccucaaccacaccgucaccggcaagaccucccuccccaagugcuggcucgucuccaacggcuccuaccucaacgagacccacuucuccgacgacaucgagcagcaggccgacaacaugaucaccgagcuccuccagaaggaguacauggaccgccagggcaagaccccccucggccucgucgaccucuucgucuucuccaccuccuucuaccucaucuccaucuuccuccaccucgucaagauccccacccaccgccacaucgucggccgccccugccccaagccccaccgccucaaccacaugggcaucugcuccugcggccucuacaagcaccccggcguccccgucaaguggaagcgcuga

SEQ ID NO: 804 - RNA, 1473 nt, Artificial Sequence
  derived and/or modified protein sequence (opt2) from LASV(ISTH2129-NIG-2012;Clade II)__AIT17544__GPC
augggccagaucaucaccuucuuccaggaggucccccacgucaucgaggaggucaugaacaucguccucaucgcccucucccuccucgccauccucaagggcaucuacaacgucgccaccugcggccucuucggccucgucuccuuccuccuccucugcggccgcuccugcuccaccaccuacaagggcgucuacgagcuccagacccucgagcucgacaugggcucccucaacaugaccaugccccucuccugcaccaagaacaacucccaccacuacaucauggucggcaacgagaccggccucgagcucacccucaccaacaccuccaucaucaaccacaaguucugcaaccucuccgacgcccacaagaagaaccucuacgaccacgcccucauguccaucaucuccaccuuccaccucuccauccccaacuucaaccaguacgaggccauguccugcgacuucaacggcggcaagaucuccguccaguacaaccucucccacuccuacgccgucgacgccgccaaccacugcggcaccaucgccaacggcguccuccagaccuucaugcgcauggccuggggcggcuccuacaucgcccucgacuccggcaagggcuccugggacugcaucaugaccuccuaccaguaccucaucauccagaacaccaccugggaggaccacugccaguucucccgccccucccccaucggcuaccucggccuccucucccagcgcacccgcgacaucuacaucucccgccgccuccucggcaccuucaccuggacccucuccgacuccgagggcaacgagacccccggcggcuacugccucacccgcuggaugcucaucgaggccgagcucaagugcuucggcaacaccgccgucgccaagugcaacgagaagcacgacgaggaguucugcgacaugcuccgccucuucgacuucaacaagcaggccauccgccgccucaagaccgaggcccagauguccauccagcucaucaacaaggccgucaacgcccucaucaacgaccagcucaucaugaagaaccaccuccgcgacaucaugggcauccccuacugcaacuacuccaaguacugguaccucaaccacaccgucaccggcaagaccucccucccccgcugcuggcucgucuccaacggcuccuaccucaacgagacccacuucuccgacgacaucgagcagcaggccgacaacaugaucaccgagcuccuccagaaggaguacauggaccgccagggcaagaccccccucggccucgucgaccucuucgucuucuccaccuccuucuaccucaucuccaucuuccuccaccucgucaagauccccacccaccgccacaucaucggcaagcccugccccaagccccaccgccucaaccacaugggcaucugcuccugcggccucuacaagcaccccggcguccccgucaaguggaagcgcuga

SEQ ID NO: 805 - RNA, 1473 nt, Artificial Sequence
  derived and/or modified protein sequence (opt2) from LASV(ISTH2217-NIG-2012;Clade II)__AIT17548__GPC
augggccagaucaucaccuucuuccaggaggucccccacgucaucgaggaggucaugaacaucguccucaucgcccucucccuccucgccauccucaagggcaucuacaacgucgccaccugcggccucuucggccucgucuccuuccucuuccucugcggccgcuccugcuccaccaccuacaagggcgucuacgagcuccagacccucgagcucgacauggccucccucaacaugaccaugccccucuccugcaccaagaacaacucccaccacuacaucauggucggcaacgagaccggccucgagcucacccucaccaacaccuccaucaucaaccacaaguucugcaaccucuccgacgcccacaagcgcaaccucuacgaccacgcccucauguccaucaucuccaccuuccaccucuccauccccaacuucaaccaguacgaggccauguccugcgacuucaacggcggcaagaucuccguccaguacaaccucucccacgccuacgccggcgacgccgccaagcacugcggcaccaucgccaacggcguccuccagaccuucaugcgcauggccuggggcggcuccuacaucgcccucgacuccggcaagggcuccugggacugcaucaugaccuccuaccaguaccucaucauccagaacaccaccugggaggaccacugccaguucucccgccccucccccaucggcuaccucggccuccucucccagcgcacccgcgacaucuacaucucccgccgccuccucggcaccuucaccuggacccucuccgacuccgagggcaacgagacccccggcggcuacugccucacccgcuggaugcucaucgaggccgagcucaagugcuucggcaacaccgccgucgccaagugcaacgagaagcacgacgaggaguucugcgacaugcuccgccucuucgacuucaacaagcaggccauccgccgccuccgcaccgaggcccagauguccauccagcucaucaacaaggccgucaacgcccucaucaacgaccagcucaucaugaagaaccaccuccgcgacaucaugggcauccccuacugcaacuacuccaaguacugguaccucaaccacaccgucaccggcaagaccucccuccccaagugcuggcucgucuccaacggcuccuaccucaacgagacccacuucuccgacgacaucgagcagcaggccgacaacaugaucaccgagaugcuccagaaggaguacaucgaccgccagggcaagaccccccucggccucgucgaccucuucgucuucuccaccuccuucuaccucaucuccaucuuccuccaccucgucaagauccccacccaccgccacgucaucggcaagcccugccccaagccccaccgccucaaccacaugggcaucugcuccugcggccucuacaagcaccccggcguccccgucaaguggaagcgcuga

SEQ ID NO: 806 - RNA, 1473 nt, Artificial Sequence
  derived and/or modified protein sequence (opt2) from LASV(ISTH2271-NIG-2012;Clade II)__AIT17552__GPC
augggccagaucaucaccuucuuccaggaggucccccacgucaucgaggaggucaugaacaucguccucaucgcccucucccuccucgccauccucaagggcaucuacaacgucgccaccugcggccucuucggccucgucuccuuccuccuccucugcggccgcuccugcuccaccaccuacaagggcgucuacgagcuccagacccucgagcucgacauggccucccucaacaugaccaugccccucuccugcaccaagaacaacucccaccacuacaucauggucggcaacgagaccggccucgagcucacccucaccaacaccuccaucaucaaccacaaguucugcaaccucuccgacgcccacaagaagaaccucuacgaccacgcccucauguccaucaucuccaccuuccaccucuccauccccaacuucaaccaguacgaggccauguccugcgacuucaacggcggcaagaucuccguccaguacaaccucucccacgccuacgccgucaacgccgccaaccacugcggcaccaucgccaacggcguccuccagaccuucaugcgcauggccuggggcggcuccuacaucgcccucgacuccggcaagggcuccugggacugcaucaugaccuccuaccaguaccucaucauccagaacaccaccugggaggaccacugccaguucucccgccccucccccaucggcuaccucggccuccucucccagcgcacccgcgacaucuacaucucccgccgccuccucggcaccuucaccuggacccucuccgacuccgagggcaacgagacccccggcggcuacugccucacccgcuggaugcucaucgaggccgagcucaagugcuucggcaacaccgccgucgccaagugcaacgagaagcacgacgaggaguucugcgacaugcuccgccucuucgacuucaacaagcaggccauccgccgccucaagaccgaggcccagauguccauccagcucaucaacaaggccgucaacgcccucaucaacgaccagcucaucaugaagaaccaccuccgcgacaucaugggcauccccuacugcaacuacuccaaguacugguaccucaaccacaccgucaccggcaagaccucccucccccgcugcuggcucgucuccaacggcuccuaccucaacgagacccacuucuccgacgacaucgagcagcaggccgacaacaugaucaccgagcuccuccagaaggaguacauggaccgccagggcaagaccccccucggccucgucgaccucuucgucuucuccaccuccuucuaccucaucuccaucuuccuccaccucgucaagauccccacccaccgccacgucaucggcaagcccugccccaagccccaccgccucaaccacaugggcaucugcuccugcggccucuacaagcaccccggcguccccgucaaguggaagaaguga

SEQ ID NO: 807 - RNA, 1473 nt, Artificial Sequence
  derived and/or modified protein sequence (opt2) from LASV(ISTH2304-NIG-2012;Clade II)__AIT17556__GPC
augggccagaucaucaccuucuuccaggaggucccccacgucaucgaggaggucaugaacaucguccucaucgcccucucccuccucgccauccucaagggcaucuacaacgucgccaccugcggccucuucggccucgucuccuuccuccuccucugcggccgcuccugcuccaccaccuacaagggcgucuacgagcuccagacccucgagcucgacauggccucccucaacaugaccaugccccucuccugcaccaagaacaacucccaccacuacaucauggucggcaacgagaccggccucgagcucacccucaccaacaccuccaucaucaaccacaaguucugcaaccucuccgacgcccacaagaagaaccucuacgaccacgcccucauguccaucaucuccaccuuccaccucuccauccccaacuucaaccaguacgaggccauguccugcgacuucaacggcggcaagaucuccguccaguacaaccucucccacaccuacgccgucgacgccgccaaccacugcggcaccaucgccaacggcguccuccagaccuucaugcgcauggccuggggcggcuccuacaucgcccucgacuccggccgcggcuccugggacugcaucaugaccuccuaccaguaccucaucauccagaacaccaccugggaggaccacugccaguucucccgccccucccccaucggcuaccucggccuccucucccagcgcacccgcgacaucuacaucucccgccgccuccucggcaccuucaccuggacccucuccgacuccgagggcaacgagacccccggcggcuacugccucacccgcuggaugcucaucgaggccgagcucaagugcuucggcaacaccgccgucgccaagugcaacgagaagcacgacgaggaguucugcgacaugcuccgccucuucgacuucaacaagcaggccauccgccgccucaagaccgaggcccagauguccauccagcucaucaacaaggccgucaacgcccucaucaacgaccagcucaucaugaagaaccaccuccgcgacaucaugggcauccccuacugcaacuacuccaaguacugguaccucaaccacaccaucaccggcaagaccucccucccccgcugcuggcucgucuccaacggcuccuaccucaacgagacccacuucuccgacgacaucgagcagcaggccgacaacaugaucaccgagcuccuccagaaggaguacaucgaccgccagggcaagaccccccucggccucgucgaccucuucgucuucuccaccuccuucuaccucaucuccaucuuccuccaccucgucaagauccccacccaccgccacaucaccggcaagcccugccccaagccccaccgccucaaccacaugggcaucugcuccugcggccucuacaagcaccccggcguccccguccgcuggaagcgcuga

SEQ ID NO: 808 - RNA, 1473 nt, Artificial Sequence
  derived and/or modified protein sequence (opt2) from LASV(ISTH2312-NIG-2012;Clade II)__AIT17560__GPC
augggccagaucaucaccuucuuccaggaggucccccacgucaucgaggaggucaugaacaucguccucaucgcccucucccuccucgccguccucaagggcaucuacaacgucgccaccugcggccucuucggccucgucuccuuccuccuccucugcggccgcuccugcuccaccaccuacaagggcgucuacgagcuccagacccucgagcucgacauggccucccucaacaugaccaugccccucuccugcaccaccaacaacucccaccacuacaucauggucggcaacgagaccggccucgagcucacccucaccaacaccuccaucaucaaccacaaguucugcaaccucuccgacgcccacaagaagaaccucuacgaccacgcccucauguccaucaucuccaccuuccaccucuccauccccaacuucaaccaguacgaggccauguccugcgacuucaacggcggcaagaucuccguccaguacaaccucucccacgccuacgccggcgaggccgccaaccacugcggcaccaucgccaacggcguccuccagaccuucaugcgcauggccuggggcggcuccuacaucgcccucgacuccggcaagggcuccugggacugcaucaugaccuccuacaaguaccucaucauccagaacaccaccuggggcgaccacugccaguucucccgccccucccccaucggcuaccucggccuccucucccagcgcacccgcgacaucuacaucucccgccgccuccucggcaccuucaccuggacccucuccgacuccgagggcaacgagacccccggcggcuacugccucacccgcuggaugcucaucgaggccgagcucaagugcuucggcaacaccgccgucgccaagugcaacgagaagcacgacgaggaguucugcgacaugcuccgccucuucgacuucaacaagcaggccauccgcaagcucaagaccgaggcccagauguccauccagcucaucaacaaggccgucaacgcccucaucaacgaccagcucaucaugaagaaccaccuccgcgacaucaugggcauccccuacugcaacuacucccgcuacugguaccucaaccacaccgucaccggccgcaccucccucccccgcugcuggcucgucuccaacggcuccuaccucaacgagacccacuucuccgacgacaucgagcagcaggccgacaacaugaucaccgagcuccuccagaaggaguacaucgaccgccagggcaagaccccccucggccucgucgaccucuucgucuucuccaccuccuucuaccucaucuccaucuuccuccaccucgucaagauccccacccaccgccacaucaucggcaagcccugccccaagccccaccgccucaaccacaugggcaucugcuccugcggccucuacaagcaccccggcguccccgucaaguggaagcgcuga

SEQ ID NO: 809 - RNA, 1473 nt, Artificial Sequence
  derived and/or modified protein sequence (opt2) from LASV(ISTH2316-NIG-2012;Clade II)__AIT17564__GPC
augggccagaucaucaccuucuuccaggaggucccccacgucaucgaggaggucaugaacaucguccucaucgcccucucccuccucgccauccucaagggcaucuacaacgucgccaccugcggccucuucggccuccucuccuuccuccuccucugcggccgcuccugcuccaccaccuacaagggcgucuacgagcuccagacccucgagcucgacauggccucccucaacaugaccaugccccucuccugcaccaagaacaacucccaccacuacaucauggucggcaacgagaccggccucgagcucacccucaccaacaccuccaucaucaaccacaaguucugcaaccucuccgacgcccacaagaaggaccucuacgaccacgcccucauguccaucaucuccaccuuccaccucuccauccccaacuucaaccaguacgaggccauguccugcgacuucaacggcggcaagaucuccguccaguacaaccucucccacgccuacgccgucgacgccgccaagcacugcggcaccaucgccaacggcguccuccagaccuucaugcgcauggccuggggcggcuccuacaucgcccucgacuccggcaagggcuccugggacugcaucaugaccuccuaccaguaccucaucauccagaacaccuccugggaggaccacugccaguucucccgccccucccccaucggcuaccucggccuccucucccagcgcacccgcgacaucuacaucucccgccgccuccucggcaccuucaccuggacccucuccgacuccgagggcaacgagacccccggcggcuacugccucacccgcuggaugcucaucgaggccgagcucaagugcuucggcaacaccgccgucgccaagugcaacgagaagcacgacgaggaguucugcgacaugcuccgccucuucgacuucaacaagcaggccaucaagcgccucaagaccgaggcccagauguccauccagcucaucaacaaggccgucaacgcccucaucaacgaccagcucaucaugaagaaccaccuccgcgacaucaugggcauccccuacugcaacuacuccaaguacugguaccucaaccacaccgucaccggcaagaccucccucccccgcugcuggcucgucuccaacggcuccuaccucaacgagacccacuucuccgacgacaucgagcagcaggccgacaacaugaucaccgagcuccuccagaaggaguacaucgaccgccagggcaagaccccccucggccucgucgaccucuucgucuucuccaccuccuucuaccucaucuccaucuuccuccaccucgucaagauccccacccaccgccacgucaucggcaagcccugccccaagccccaccgccucaaccacaugggcaucugcuccugcggccucuacaagcaccccggcguccccgucaaguggaagcgcuga

SEQ ID NO: 810 - RNA, 1473 nt, Artificial Sequence
  derived and/or modified protein sequence (opt2) from LASV(ISTH2358-NIG-2012;Clade II)__AIT17572__GPC
augggccagaucaucaccuucuuccaggaggucccccacgucaucgaggaggucaugaacaucguccucaucgcccucucccuccucgccauccucaagggcaucuacaacgucgccaccugcggccucuucggccucgucuccuuccuccuccucugcggccgcuccugcuccaccaccuacaagggcgucuacgagcuccagacccucgagcucgacauggccaaccucaacaugaccaugccccucuccugcaccaagaacaacucccaccacuacaucauggucggcaacgagaccggccucgagcucacccucaccaacaccuccaucaucaaccacaaguucugcaaccucuccgacgcccacaagaagaaccucuacgaccacgcccucauguccaucaucuccaccuuccaccucuccauccccaacuucaaccaguacgaggccauguccugcgacuucaacggcggcaagaucuccguccaguacaaccucucccacaacuacgccgucgacgccgccaaccacugcggcaccaucgccaacggcguccuccagaccuucaugcgcauggccuggggcggcuccuacaucgcccucgacuccggcaagggcaacugggacugcaucaugaccuccuaccaguaccucaucauccagaacaccaccugggaggaccacugccaguucucccgccccucccccaucggcuaccucggccuccucucccagcgcacccgcgacaucuacaucucccgccgccuccucggcaccuucaccuggacccucuccgacuccgagggcaacgacaugcccggcggcuacugccucacccgcuggaugcucaucgaggccgagcucaagugcuucggcaacaccgccgucgccaagugcaacgagaagcacgacgaggaguucugcgacaugcuccgccucuucgacuucaacaagcaggccauccgccgccucaagaccgaggcccagaugaacauccagcucaucaacaaggccgucaacgcccucaucaacgaccagcucaucaugaagaaccaccuccgcgacaucaugggcauccccuacugcaacuacuccaaguacugguaccucaaccacaccgucaccggcaagaccucccucccccgcugcuggcucgucuccaacggcuccuaccucaacgagacccacuucuccgacgacaucgagcagcaggccgacaacaugaucaccgagcuccuccagaaggaguacauggaccgccagggcaagaccccccucggccucgucgaccucuucgucuucuccaccuccuucuaccucaucuccaucuuccuccaccucgucaagauccccacccaccgccacaucaucggcaagcccugccccaagccccaccgccucaaccacaugggcaucugcuccugcggccucuacaagcaccccggcguccccgucaaguggaagcgcuga

SEQ ID NO: 811 - RNA, 1473 nt, Artificial Sequence
  derived and/or modified protein sequence (opt2) from LASV(ISTH2376-NIG-2012;Clade II)__AIT17576__GPC
augggccagaucaucaccuucuuccaggaggucccccacgucaucgaggaggucaugaacaucguccucaucgcccucucccuccucgccauccucaagggcaucuacaacgucgccaccugcggccucuucggccucgucuccuuccuccuccucugcggccgcuccugcuccaccaccuacaagggcgucuacgagcuccagacccucgagcucgacauggccucccucaacaugaccaugccccucuccugcaccaagaacaacucccaccacuacaucauggucggcaacgagaccggccucgagcucacccucaccaacaccuccaucaucaaccacaaguucugcaaccucuccgacgcccacaagaagaaccucuacgaccacgcccucauguccaucaucuccaccuuccaccucuccauccccaacuucaaccaguacgaggccauguccugcgacuucaacggcggcaagaucuccguccaguacaaccucucccacaccuacgccgucgacgccgccaaccacugcggcaccaucgccaacggcguccuccagaccuucaugcgcauggccuggggcggcuccuacaucgcccucgacuccggcaagggcaacugggacugcaucaugaccuccuaccaguaccucaucauccagaacaccaccugggaggaccacugccaguucucccgccccucccccaucggcuaccucggccuccucucccagcgcacccgcgacaucuacaucucccgccgccuccucggcaccuucaccuggacccucuccgacuccgagggcaacgagacccccggcggcuacugccucacccgcuggaugcucaucgaggccgagcucaagugcuucggcaacaccgccgucgccaagugcaacgagaagcacgacgaggaguucugcgacaugcuccgccucuucgacuucaacaagcaggccaucucccgccucaagaccgaggcccagauguccauccagcucaucaacaaggccgucaacgcccucaucaacgaccagcucaucaugaagaaccaccuccgcgacaucaugggcauccccuacugcaacuacuccaaguacugguaccucaaccacaccgucaccggcaagaccucccucccccgcugcuggcucgucuccaacggcuccuaccucaacgagacccacuucuccgacgacaucgagcagcaggccgacaacaugaucaccgagaugcuccagaaggaguacaucgaccgccagggcaagaccccccucggccucgucgaccucuucgucuucuccaccuccuucuaccucaucuccaucuuccuccaccucgucaagauccccacccaccgccacaucaccggcaagcccugccccaagccccaccgccucaaccacaugggcaucugcuccugcggccucuacaagcaccccggcguccccgucaaguggaagcgcuga

SEQ ID NO: 812 - RNA, 1473 nt, Artificial Sequence
  derived and/or modified protein sequence (opt2) from LASV(Lassa virus/H.sapiens-wt/NGA/2015/ISTH_0543;Clade II)__AVO03639__GPC
augggccagaucaucaccuucuuccaggaggucccccacgucaucgaggaggucaugaacaucguccucaucgcccucucccuccucgccauccucaagggcaucuacaacgucgccaccugcggccucuucggccucgucuccuuccuccuccucugcggccgcuccugcuccaccaccuacaagggcgucuacgagcuccagacccucgagcucgacauggccaaccucaacaugaccaugccccucuccugcaccaagaacaacucccaccacuacaucauggucggcaacgagaccggccucgagcucacccucaccaacaccuccaucaucaaccacaaguucugcaaccucuccgacgcccacaagaagaaccucuacgaccacgcccucauguccaucaucuccaccuuccaccucuccauccccaacuucaaccaguacgaggccauguccugcgacuucaacggcggcaagaucuccguccaguacaaccucucccacaccuacgccgucgacgccgccaaccacugcggcaccaucgccaacggcguccuccagaccuucaugcgcauggccuggggcggcuccuacaucgcccucgacuccggcaagggcuccugggacugcaucaugaccuccuaccaguaccucgucauccagaacaccaccugggaggaccacugccaguucucccgccccucccccaucggcuaccucggccuccucucccagcgcacccgcgacaucuacaucucccgccgccuccucggcaccuucaccuggacccucuccgacuccgagggcaacgagacccccggcggcuacugccucacccgcuggaugcucaucgaggccgagcucaagugcuucggcaacaccgccgucgccaagugcaacgagaagcacgacgaggaguucugcgacaugcuccgccucuucgacuucaacaagcaggccauccgccgccucaagaccgaggcccagauguccauccagcucaucaacaaggccgucaacgcccucaucaacgaccagcucaucaugaagaaccaccuccgcgacaucaugggcauccccuacugcaacuacuccaaguacugguaccucaaccacaccgucaccggcaagaccucccucccccgcugcuggcucgucuccaacggcuccuaccucaacgagacccacuucuccgacgacaucgagcagcaggccgacaacaugaucaccgagcuccuccagaaggaguacaucgaccgccagggcaagaccccccucggccucgucgaccucuucgucuucuccaccuccuucuaccucaucuccaucuuccuccaccucgucaagauccccacccaccgccacaucaccggcaagcccugccccaagccccaccgccucaaccacaugggcaucugcuccugcggccucuacaagcaccccggcguccccgucaaguggaagcgcuga

SEQ ID NO: 813 - RNA, 1473 nt, Artificial Sequence
  derived and/or modified protein sequence (opt2) from LASV(Lassa virus/H.sapiens-wt/NGA/2015/ISTH_0547;Clade II)__AVO03583__GPC
augggccagaucaucaccuucuuccaggaggucccccacgucaucgaggaggucaugaacaucguccucaucgcccucucccuccucgccauccucaagggcaucuacaacgucgccaccugcggccucuucggccucgucuccuuccuccuccucugcggccgcuccugcuccaccaccuacaagggcgucuacgagcuccagacccucgagcucgacauggccucccucaacaugaccaugccccucuccugcaccaagaacaacucccaccacuacaucauggucggcaacgagaccggccucgagcucacccucaccaacaccuccaucaucaaccacaaguucugcaaccucuccgacgcccacaagaagaaccucuacgaccacgcccucauguccaucaucuccaccuuccaccucuccauccccaacuucaaccaguacgaggccauguccugcgacuucaacggcggcaagaucuccguccaguacaaccucucccacaccuacgccgucgacgccgccaaccacugcggcaccaucgccaacggcguccuccagaccuucaugcgcauggccuggggcggcuccuacaucgcccucgacuccggcaagggcuccugggacugcaucaugaccuccuaccaguaccucaucauccagaacaccaccugggaggaccacugccaguucucccgccccucccccaucggcuaccucggccuccucucccagcgcacccgcgacaucuacaucucccgccgccuccucggcaccuucaccuggacccucuccgacuccgagggcaacgagacccccggcggcuacugccucacccgcuggaugcucaucgaggccgagcucaagugcuucggcaacaccgccgucgccaagugcaacgagaagcacgacgaggaguucugcgacaugcuccgccucuucgacuucaacaagcaggccauccgccgccucaagaccgaggcccagauguccauccagcucaucaacaaggccgucaacgcccucaucaacgaccagcucaucaugaagaaccaccuccgcgacaucaugggcauccccuacugcaacuacuccaaguacugguaccucaaccacaccgucaccggcaagaccucccucccccgcugcuggcucgucuccaacggcuccuaccucaacgagacccacuucuccgacgacaucgagcagcaggccgacaacaugaucaccgagcuccuccagaaggaguacaucgagcgccagggcaagaccccccucggccucgucgaccucuucgucuucuccaccuccuucuaccucaucuccaucuuccuccaccucgucaagauccccacccaccgccacaucaccggcaagcccugccccaagccccaccgccucaaccacaugggcaucugcuccugcggccucuacaagcaccccggcguccccgucaaguggaagcgcuga

SEQ ID NO: 814 - RNA, 1473 nt, Artificial Sequence
  derived and/or modified protein sequence (opt2) from LASV(Lassa virus/H.sapiens-wt/NGA/2015/ISTH_0574;Clade II)__AVO03657__GPC
augggccagaucaucaccuucuuccaggaggucccccacgucaucgaggaggucaugaacaucguccucaucgcccucucccuccucgccauccucaagggcaucuacaacgucgccaccugcggccucuucggccucgucgccuuccuccuccucugcggccgcuccugcuccaccaccuacaagggcgucuacgagcuccagacccucgagcucgacauggccucccucaacaugaccaugccccucuccugcaccaagaacaacucccaccacuacaucauggucggcaacgagaccggccucgagcucacccucaccaacaccuccaucaucaaccacaaguucugcaaccucuccgacgcccacaagaagaaccucuacgaccacgcccucauguccaucaucuccaccuuccaccucuccauccccaacuucaaccaguacgaggccauguccugcgacuucaacggcggcaagaucuccguccaguacaaccucucccacaccuacgccgucgacgccgccaaccacugcggcaccaucaccaacggcguccuccagaccuucaugcgcauggccuggggcggcuccuacaucgcccucgacuccggcaagggcuccugggacugcaucaugaccuccuaccaguaccucaucauccagaacaccaccugggaggaccacugccaguucucccgccccucccccaucggcuaccucggccuccucucccagcgcacccgcgacaucuacaucucccgccgccuccucggcaccuucaccuggacccucuccgacuccgagggcaacgagacccccggcggcuacugccucacccgcuggaugcucaucgaggccgagcucaagugcuucggcaacaccgccgucgccaagugcaacgagaagcacgacgaggaguucugcgacaugcuccgccucuucgacuucaacaagcaggccauccgccgccucaagaccgaggcccagauguccauccagcucaucaacaaggccgucaacgcccucaucaacgaccagcucaucaugaagaaccaccuccgcgacaucaugggcauccccuacugcaacuacuccaaguacugguaccucaaccacaccgucaccggccgcaccucccucccccgcugcuggcucgucuccaacggcuccuaccucaacgagacccacuucuccgacgacaucgagcagcaggccgacaacaugaucaccgagcuccuccagaaggaguacauggaccgccagggcaagaccccccucggccucgucgaccucuucgucuucuccaccuccuucuaccucaucuccaucuuccuccaccucaucaagauccccacccaccgccacgucaucggcaagcccugccccaagccccaccgccucaaccacaugggcaucugcuccugcggccucuacaagcaccccggcguccccgucaaguggaagcgcuga

SEQ ID NO: 815 - RNA, 1473 nt, Artificial Sequence
  derived and/or modified protein sequence (opt2) from LASV(Lassa virus/H.sapiens-wt/NGA/2015/ISTH_0681;Clade II)__AVO03617__GPC
augggccagaucaucaccuucuuccaggaggucccccacgucaucgaggaggucaugaacaucguccucaucgcccucucccuccucgccauccucaagggcaucuacaacgucgccaccugcggccucuucggccucgucuccuuccuccuccucugcggccgcuccugcuccaccaccuacaagggcgucuacgagcuccagacccucgagcucgacauggccucccucaacaugaccaugccccucuccugcaccaagaacaacucccaccacuacaucauggucggcaacgagaccggccucgagcucacccucaccaacaccuccaucaucaaccacaaguucugcaaccucuccgacgcccacaagaagaaccucuacgaccacgcccucauguccaucaucuccaccuuccaccucuccauccccaacuucaaccaguacgaggccauguccugcgacuucaacggcggcaagaucuccguccaguacaaccucucccacaccuacgccgagggcgccgccaaccacugcggcaccaucgccaacggcguccuccagaccuucaugcgcauggccuggggcggcuccuacaucgcccucgacuccggcaagggcuccugggacugcaucaugaccuccuaccaguaccucaucauccagaacaccaccugggaggaccacugccaguucucccgccccucccccaucggcuaccucggccuccucucccagcgcacccgcgacaucuacaucucccgccgccuccucggcaccuucaccuggacccucuccgacuccgagggcaacgagacccccggcggcuacugccucacccgcuggaugcucaucgaggccgagcucaagugcuucggcaacaccgccgucgccaagugcaacgagaagcacgacgaggaguucugcgacaugcuccgccucuucgacuucaacaagcaggccaucaugcgccucaagaccgaggcccagauguccauccagcucaucaacaaggccgucaacgcccucaucaacgaccagcucaucaugaagaaccaccuccgcgacaucaugggcauccccuacugcaacuacuccaaguacugguaccucaaccacaccgucaccggcaagaccucccucccccgcugcuggcucgucuccaacggcuccuaccucaacgagacccacuucuccgacgacaucgagcagcaggccgacaacaugaucaccgagaugcuccagaaggaguacauggaccgccagggcaagaccccccucggccucgucgaccucuucgucuucuccaccuccuucuaccucaucuccaucuuccuccaccucgucaagauccccacccaccgccacgucaucggcaagcccugccccaagccccaccgccucaaccacaugggcaucugcuccugcggccucuacaagcaccccggcguccccgucaaguggaagcgcuga

SEQ ID NO: 816 - RNA, 1473 nt, Artificial Sequence
  derived and/or modified protein sequence (opt2) from LASV(Lassa virus/H.sapiens-wt/NGA/2015/ISTH_0682;Clade II)__AVO03625__GPC
augggccagaucaucaccuucuuccaggaggucccccacgucaucgaggaggucaugaacaucguccucaucgcccucucccuccucgccauccucaagggcaucuacaacgucgccaccugcggccucuucggccucgucuccuuccuccuccucugcggccgcuccugcuccaccaccuacaagggcgucuacgagcuccagacccucgagcucgacauggccucccucaacaugaccaugccccucuccugcaccaagaacaacucccaccacuacaucauggucggcaacgagaccggccucgagcucacccucaccaacaccuccaucaucaaccacaaguucugcaaccucuccgacgcccacaagaagaaccucuacgaccacgcccucauguccaucaucuccaccuuccaccucuccauccccaacuucaaccaguacgaggccauguccugcgacuucaacggcggcaagaucuccguccaguacaaccucucccacgccuacgccgucgacgccgccaaccacugcggcaccaucgccaacggcguccuccagaccuucaugcgcauggccuggggcggcuccuacaucgcccucgacuccggcaagggcuccugggacugcaucaugaccuccuaccacuaccucaucauccagaacaccaccugggaggaccacugccaguucucccgccccucccccaucggcuaccucggccuccucucccagcgcacccgcgacaucuacaucucccgccgccuccucggcaccuucaccuggacccucuccgacuccgagggcaacgagacccccggcggcuacugccucacccgcuggaugcucaucgaggccgagcucaagugcuucggcaacaccgccgucgccaagugcaacgagaagcacgacgaggaguucugcgacaugcuccgccucuucgacuucaacaagcaggccauccgccgccucaagaccgaggcccagauguccauccagcucaucaacaaggccgucaacgcccucaucaacgaccagcucaucaugaagaaccaccuccgcgacaucaugggcauccccuacugcaacuacuccaaguacugguaccucaaccacaccgucaccggcaagaccucccucccccgcugcuggcucgucuccaacggcuccuaccucaacgagacccacuucuccgacgacaucgagcagcaggccgacaacaugaucaccgagcuccuccagaaggaguacaucgaccgccagggcaagaccccccucggccucgucgaccucuucgucuucuccaccuccuucuaccucaucuccaucuuccuccaccucgucaagauccccacccaccgccacgucaucggcaagcccugccccaagccccaccgccucaaccacaugggcaucugcuccugcggccucuacaagcaccccggcguccccgucaaguggaagcgcuga

SEQ ID NO: 817 - RNA, 1473 nt, Artificial Sequence
  derived and/or modified protein sequence (opt2) from LASV(Lassa virus/H.sapiens-wt/NGA/2015/ISTH_0687;Clade II)__AVO03581__GPC
augggccagaucaucaccuucuuccaggaggucccccacgucaucgaggaggucaugaacaucguccucaucgcccucucccuccucgccauccucaagggcaucuacaacgucgccaccugcggccucuucggccucgucuccuuccuccuccucugcggccgcuccugcuccaccaccuacaagggcgucuacgagcuccagacccucgagcucgacaugaccaaccucaacaugaccaugccccucuccugcaccaagaacaacucccaccacuacaucauggucggcaacgagaccggccucgagcucacccucaccaacaccuccaucaucaaccacaaguucugcaaccucuccgacgcccacaagaagaaccucuacaaccacgcccucauguccaucaucuccaccuuccaccucuccauccccaacuucaaccaguacgaggccauguccugcgacuucaacggcggcaagaucuccguccaguacaaccucucccacaccuacgccgucgacgccgccaaccacugcggcaccgucgccaacggcguccuccagaccuucaugcgcauggccuggggcggcuccuacaucgcccucgacuccggcaagggcggcugggacugcaucaugaccuccuaccaguaccucaucauccagaacaccaccugggaggaccacugccaguucucccgccccucccccaucggcuaccucggccuccucucccagcgcacccgcgacaucuacaucucccgccgccuccucggcaccuucaccuggacccucuccgacuccgagggcaacgagacccccggcggcuacugccucacccgcuggaugcucaucgaggccgagcucaagugcuucggcaacaccgccgucgccaagugcaacgagaagcacgacgaggaguucugcgacaugcuccgccucuucgacuucaacaagcaggccauccgcaagcucaaggccgaggcccagauguccauccagcucaucaacaaggccgucaacgcccucaucaacgaccagcucaucaugaagaaccaccuccgcgacaucaugggcauccccuacugcaacuacuccaaguacugguaccucaaccacaccgucaccggcaagaccucccuccccaagugcuggcucgucuccaacggcuccuaccucaacgagacccacuucuccgacgacaucgagcagcaggccgacaacaugaucaccgagcuccuccagaaggaguacauggaccgccagggcaagaccccccucggccucgucgaccucuucgucuucuccaccuccuucuaccucaucuccaucuuccuccaccucgucaagauccccacccaccgccacaucaucggcaagcccugccccaagccccaccgccucaaccacaugggcaucugcuccugcggccucuacaagcaccccggcguccccgucaaguggaagcgcuga

SEQ ID NO: 818 - RNA, 1473 nt, Artificial Sequence
  derived and/or modified protein sequence (opt2) from LASV(Lassa virus/H.sapiens-wt/NGA/2015/ISTH_0736;Clade II)__AVO03573__GPC
augggccagaucaucaccuucuuccaggaggucccccacgucaucgaggaggucaugaacaucguccucaucgcccucucccuccucgccguccucaagggcaucuacaacgucgccaccugcggccucuucggccucgucuccuuccuccuccucugcggccgcuccugcuccaccaccuacaagggcgucuacgagcuccagacccucgagcucgacauggccucccucaacaugaccaugccccucuccugcaccaagaacaacucccaccacuacaucauggucggcaacgagaccggccucgagcucacccucaccaacaccuccaucaucaaccacaaguucugcaaccucuccgacgcccacaagaagaaccucuacgaccacgcccucauguccaucaucuccaccuuccaccucuccauccccaacuucaaccaguacgaggccauguccugcgacuucaacggcggcaagaucuccguccaguacaaccucucccacacccacgccgucgacgccgccaaccacugcggcaccaucgccaacggcguccuccagaccuucaugcgcauggccuggggcggcuccuacaucgcccucgacuccggcaagggcuccugggacugcaucaugaccuccuaccaguaccucaucauccagaacaccaccugggaggaccacugccaguucucccgccccucccccaucggcuaccucggccuccucucccagcgcacccgcgacaucuacaucucccgccgccuccucggcaccuucaccuggacccucuccgacuccgagggcaacgagacccccggcggcuacugccucacccgcuggaugcucaucgaggccgagcucaagugcuucggcaacaccgccgucgccaagugcaacgagaagcacgacgaggaguucugcgacaugcuccgccucuucgacuucaacaagcaggccauccgccgccucaagaccgaggcccagauguccauccagcucaucaacaaggccgucaacgcccucaucaacgaccagcucaucaugaagaaccaccuccgcgacaucaugggcauccccuacugcaacuacucccgcuacugguaccucaaccacaccgucaccggcaagaccucccucccccgcugcuggcucgucuccaacggcuccuaccucaacgagacccacuucuccgacgacaucgagcagcaggccgacaacaugaucaccgagcuccuccagaaggaguacaucgaccgccagggccgcaccccccucggccucgucgaccucuucgucuucuccaccuccuucuaccucaucuccaucuuccuccaccucgucaagauccccacccaccgccacgucaucggcaagcccugccccaagccccaccgccucaaccacaugggcaucugcuccugcggccucuacaagcaccccggcguccccgucaaguggaagcgcuga

SEQ ID NO: 819 - RNA, 1473 nt, Artificial Sequence
  derived and/or modified protein sequence (opt2) from LASV(Lassa virus/H.sapiens-wt/NGA/2015/ISTH_0789;Clade II)__AVO03551__GPC
augggccagaucgucaccuucuuccaggaggucccccacgucaucgaggagaucaugaacaucguccucaucacccucucccuccucgccauccucaagggcgucuacaaccucgccaccugcggccucaucggccucaucaccuuccucuuccucugcggccgcuccugcuccaccaucuacaagggcuccuaccaguuccagacccucgagcucaacauggagacccucaacaugaccaugccccucuccugcaccaagaacuccucccaccacuacauccgcgucuccaacgagaccggccucgagcucacccucaccaacaccuccaucaucaaccacaaguucugcaaccucuccgacgcccacaagaagaaccucuacgaccacacccucauguccaucaucuccaccuuccaccucuccauccccaacuucaaccaguacgaggccauguccugcgacuucaacggcggcaagaucuccguccaguacaaccucucccacuccuacgccgucgacgccgccaaccacugcggcaccgucgccaacggcguccuccagaccuucaugcgcauggccuggggcggcuccuacaucgcccucgacuccggccgcggcaacugggacugcaucaugaccuccuaccaguaccucaucauccagaacaccaccugggaggaccacugccaguucucccgccccucccccaucggcuaccucggccuccucucccagcgcacccgcgacaucuacaucucccgccgccuccucggcaccuucaccuggacccucuccgacuccgagggcaaggagacccccggcggcuacugccucacccgcuggaugcucaucgaggccgagcucaagugcuucggcaacaccgccgucgccaagugcaacgagaagcacgacgaggaguucugcgacaugcuccgccucuucgacuucaacaagcaggccauccagcgccucaaggccgaggcccagauguccauccagcucaucaacaaggccgucaacgcccucaucaacgaccagcucaucaugaagaaccaccuccgcgacaucaugggcauccccuacugcaacuacuccaaguacugguaccucaaccacaccuccaccggccgcaccucccuccccaagugcuggcucgucuccaacggcuccuaccucaacgagacccacuucuccgacgacaucgagcagcaggccgacaacaugaucaccgagaugcuccagaaggaguacaucgaccgccagggcaagaccccccucggccucgucgaccucuucgucuucuccaccuccuucuaccucaucuccaucuuccuccaccucgucaagauccccacccaccgccacaucgucggcaaguccugccccaagccccaccgccucaaccacaugggcaucugcuccugcggccucuacaagcgccccggcguccccgucaaguggaagcgcuga

SEQ ID NO: 820 - RNA, 1473 nt, Artificial Sequence
  derived and/or modified protein sequence (opt2) from LASV(Lassa virus/H.sapiens-wt/NGA/2015/ISTH_0821;Clade II)__AVO03641__GPC
augggccagaucaucaccuucuuccaggaggucccccacgucaucgaggaggucaugaacaucguccucaucgcccucucccuccucgccauccucaagggcaucuacaacgucgccaccugcggccucuucggccucgucuccuuccuccuccucugcggccgcuccugcuccaccaccuacaagggcgucuacgagcuccagacccucgagcucgacauggccucccucaacaugaccaugccccucuccugcaccaagaacaacucccaccacuacaucauggucggcaacgagaccggccucgagcucacccucaccaacaccuccaucaucaaccacaaguucugcaaccucuccgacgcccacaagaagaaccucuacgaccacacccucauguccaucaucuccaccuuccaccucuccauccccaacuucaaccaguacgaggccauguccugcgacuucaacggcggcaagaucuccguccaguacaaccucucccacaccuacgccgucgacgccgccaaccacugcggcaccaucgccaacggcguccuccagaccuucaugcgcauggccuggggcggcuccuacaucgcccucgacuccggcaagggcaacugggacugcaucaugaccuccuaccaguaccucaucauccagaacaccaccugggaggaccacugccaguucucccgccccucccccaucggcuaccucggccuccucucccagcgcacccgcgacaucuacaucucccgccgccuccucggcaccuucaccuggacccucuccgacuccgagggcaacgagacccccggcggcuacugccucacccgcuggaugcucaucgaggccgagcucaagugcuucggcaacaccgccgucgccaagugcaacgagaagcacgacgaggaguucugcgacaugcuccgccucuucgacuucaacaagcaggccaucucccgccucaagaccgaggcccagauguccauccagcucaucaacaaggccgucaacgcccucaucaacgaccagcucaucaugaagaaccaccuccgcgacaucaugggcauccccuacugcaacuacuccaaguacugguaccucaaccacaccgucaccggcaagaccucccucccccgcugcuggcucgucuccaacggcuccuaccucaacgagacccacuucuccgacgacaucgagcagcaggccgacaacaugaucaccgagaugcuccagaaggaguacaucgaccgccagggcaagaccccccucggccucgucgaccucuucgucuucuccaccuccuucuaccucaucuccaucuuccuccaccucgucaagauccccacccaccgccacgucaucggcaagcccugccccaagccccaccgccucaaccacaugggcaucugcuccugcggccucuacaagcaccccggcguccccgucaaguggaagcgcuga

SEQ ID NO: 821 - RNA, 1473 nt, Artificial Sequence
  derived and/or modified protein sequence (opt2) from LASV(Lassa virus/H.sapiens-wt/NGA/2015/ISTH_0831;Clade II)__AVO03545__GPC
augggccagaucgucaccuucuuccaggaggucccccacgucaucgaggagaucaugaacaucguccucaucacccucucccuccucgccauccucaagggcgucuacaaccucgccaccugcggccucaucggccucaucaccuuccucuuccucugcggccgcuccugcuccaugaccuacaagggcuccuaccagcucgagacccucgagcucaacauggagacccucaacaugaccaugccccucuccugcaccaagaacaccucccaccacuacauccgcgucggcaacgagaccggccucgagcucacccucaccaacaccuccaucaucaaccacaaguucugcaaccucuccgacgcccacaagaagaaccucuacgaccacucccucauguccaucgucuccaccuuccaccucuccauccccaacuucaaccaguacgaggccauguccugcgacuucaacggcggcaagaucuccauccaguacaaccucucccacgccuacgccggcgacgccgccaagcacugcggcacccucgccaacggcguccuccagaccuucaugcgcauggccuggggcggcuccuacaucgcccucgacuccggccgcggcaacugggacugcaucaugaccuccuaccaguaccucaucauccagaacaccaccugggacgaccacugccaguucucccgccccucccccaucggcuaccucggccuccucucccagcgcacccgcgagaucuacaucucccgccgccuccucggcaccuucaccuggacccucuccgacuccgagggcaacgaggcccccggcggcuacugccucacccgcuggaugcucaucgaggccgagcucaagugcuucggcaacaccgccgucgccaagugcaacgagaagcacgacgaggaguucugcgacaugcuccgccucuucgacuucaacaagcaggccauccagcgccucaagaccgaggcccagauguccauccagcucaucaacaaggccgucaacgcccucaucaacgaccagcucaucaugaagaaccaccuccgcgacaucaugggcauccccuacugcaacuacuccaaguacugguaccucaaccacaccaccaccggccgcaccucccucccccgcugcuggcucgucuccaacggcuccuaccucaacgagacccacuucuccgacgacaucgagcagcaggccgacaacaugaucaccgagaugcuccagaaggaguacaucgaccgccagggcaagaccccccucggccucgucgaccucuucgucuucuccaccuccuucuaccucaucuccaucuuccuccaccucgucaagauccccacccaccgccacaucgucggcaaguccugccccaagccccaccgccucaaccacaugggcaucugcuccugcggccucuacaagcagcccggcguccccguccgcuggaagcgcuga

SEQ ID NO: 822 - RNA, 1473 nt, Artificial Sequence
  derived and/or modified protein sequence (opt2) from LASV(Lassa virus/H.sapiens-wt/NGA/2016/ISTH_0009;Clade II)__AVO03571__GPC
augggccagaucaucaccuucuuccaggaggucccccacgucaucgaggaggucaugaacaucguccucaucgcccucucccuccucgccauccucaagggcaucuacaacgucgccaccugcggccuccucggccucgucuccuuccuccuccucugcggccgcuccugcuccaccaccuacaagggcgucuacgagcuccagacccucgagcucgacauggccucccucaacaugaccaugccccucuccugcaccaagaacaacucccaccacuacaucauggucggcaacgagaccggccucgagcucacccucaccaacaccuccaucaucaaccacaaguucugcaaccucuccgacgcccacaagaagaaccucuacgaccacgcccucauguccaucaucuccaccuuccaccucuccauccccaacuucaaccaguacgaggccauguccugcgacuucaacggcggccgcaucuccguccaguacaaccucucccacuccuacgccgucgacgccgccaaccacugcggcaccaucgccaacggcguccuccagaccuucaugcgcauggccuggggcggcuccuacaucgcccucgacuccggcaagggcuccugggacugcaucaugaccuccuaccaguaccucaucauccagaacaccaccugggaggaccacugccaguucucccgccccucccccaucggcuaccucggccuccucucccagcgcacccgcgacaucuacaucucccgccgccuccucggcaccuucaccuggacccucuccgacuccgagggcaacgagacccccggcggcuacugccucacccgcuggaugcucaucgaggccgagcucaagugcuucggcaacaccgccgucgccaagugcaacgagaagcacgacgaggaguucugcgacaugcuccgccucuucgacuucaacaagcaggccauccgccgccucaagaccgaggcccagauguccauccagcucaucaacaaggccgucaacgcccucaucaacgaccagcucaucaugaagaaccaccuccgcgacaucaugggcauccccuacugcaacuacuccaaguacugguaccucaaccacaccgucaccggcaagaccucccucccccgcugcuggcucgucuccaacggcuccuaccucaacgagacccacuucuccgacgacaucgagcagcaggccgacaacaugaucaccgagcuccuccagaaggaguacaucgaccgccagggcaagaccccccucggccucgucgaccucuucgucuucuccaccuccuucuaccucaucuccaucuuccuccaccucgucaagauccccacccaccgccacaucaccggcaagcccugccccaagccccaccgccucaaccacaugggcaucugcuccugcggccucuacaaccaccccggcguccccgucaaguggaagcgcuga

SEQ ID NO: 823 - RNA, 1473 nt, Artificial Sequence
  derived and/or modified protein sequence (opt2) from LASV(Lassa virus/H.sapiens-wt/NGA/2016/ISTH_0017;Clade II)__AVO03567__GPC
augggccagaucaucaccuucuuccaggaggucccccacgucaucgaggaggucaugaacaucguccucaucgcccucucccuccucgccauccucaagggcaucuacaacgucgccaccugcggccucuucggccucgucuccuuccuccuccucugcggccgcuccugcuccaccaccuacaagggcgucuacgagcuccagacccucgagcucgacauggccucccucaacaugaccaugccccucuccugcaccaagaacaacucccaccacuacaucauggucggcaacgagaccggccucgagcucacccucaccaacaccuccaucaucaaccacaaguucugcaaccucuccgacgcccacaagaagaaccucuacgaccacgcccucauguccaucaucuccaccuuccaccucuccauccccaacuucaaccaguacgaggccauguccugcgacuucaacggcggcaagaucuccguccaguacaaccucucccacaccuacgccaucgacgccgccaaccacugcggcaccaucgccaacggcguccuccagaccuucaugcgcauggccuggggcggcuccuacaucgcccucgacuccggcaagggcuccugggacugcaucaugaccuccuaccaguaccucaucauccagaacaccaccugggaggaccacugccaguucucccgccccucccccaucggcuaccucggccuccucucccagcgcacccgcgacaucuacaucucccgccgccuccucggcaccuucaccuggacccucuccgacuccgagggcaacgagacccccggcggcuacugccucacccgcuggaugcucaucgaggccgagcucaagugcuucggcaacaccgccgucgccaagugcaacgagaagcacgacgaggaguucugcgacaugcuccgccucuucgacuucaacaagcaggccauccgccgccucaagaccgaggcccagauguccauccagcucaucaacaaggccgucaacgcccucaucaacgaccagcucaucaugaagaaccaccuccgcgacaucaugggcauccccuacugcaacuacuccaaguacugguaccucaaccacaccgucaccggcaagaccucccucccccgcugcuggcucgucuccaacggcuccuaccucaacgagacccacuucuccgacgacaucgagcagcaggccgacaacaugaucaccgagcuccuccagaaggaguacauggaccgccagggcaagaccccccucggccucgucgaccucuucgucuucuccaccuccuucuaccucaucuccaucuuccuccaccucguccgcauccccacccaccgccacgucaucggcaagcccugccccaagccccaccgccucaaccacaugggcaucugcuccugcggccucuacaagcaccccggcguccccgucaaguggaagcgcuga

SEQ ID NO: 824 - RNA, 1473 nt, Artificial Sequence
  derived and/or modified protein sequence (opt2) from LASV(Lassa virus/H.sapiens-wt/NGA/2016/ISTH_0035;Clade II)__AVO03619__GPC
augggccagaucaucaccuucuuccaggaggucccccacgucaucgaggaggucaugaacaucguccucaucgcccucucccuccucgccauccucaagggcaucuacaacgucgccaccugcggccucuucggccucgucuccuuccuccuccucugcggccgcuccugcuccaugaccuacaagggcgucuacgagcuccagacccucgagcucgacauggccucccucaacaugaccaugccccucuccugcaccaagaacaacucccaccacuacaucauggucggcaacgagaccggccucgagcucacccucaccaacaccuccaucaucaaccacaaguucugcaaccucuccgacgcccacaagaagaaccucuacgaccacgcccucauguccaucaucuccaccuuccaccucuccauccccaacuucaaccaguacgaggccauguccugcgacuucaacggcggcaagaucuccguccaguacaaccucucccacaccuacgccgucgacgccgccaaccacugcggcaccaucgccaacggcguccuccagaccuucaugcgcauggccuggggcggcuccuacaucgcccucgacuccggcaagggcuccugggacugcaucaugaccuccuaccaguaccucaucauccagaacaccaccugggaggaccacugccaguucucccgccccucccccaucggcuaccucggccuccucucccagcgcacccgcgacaucuacaucucccgccgccuccucggcaccuucaccuggacccucuccgacuccgagggcaacgagacccccggcggcuacugccucacccgcuggaugcucaucgaggccgagcucaagugcuucggcaacaccgccgucgccaagugcaacgagaagcacgacgaggaguucugcgacaugcuccgccucuucgacuucaacaagcaggccauccgccgccucaagaccgaggcccagauguccauccagcucaucaacaaggccgucaacgcccucaucaacgaccagcucaucaugaagaaccaccuccgcgacaucaugggcauccccuacugcaacuacuccaaguacugguaccucaaccacaccaucaccggcaagaccucccucccccgcugcuggcucgucuccaacggcuccuaccucaacgagacccacuucuccgacgacaucgagcagcaggccgacaacaugaucaccgagcuccuccagaaggaguacauggaccgccagggcaagaccccccucggccucgucgaccucuucgucuucuccaccuccuucuaccucaucuccaucuuccuccaccucgucaagauccccacccaccgccacgucaucggcaagcccugccccaagccccaccgccucaaccacaugggcaucugcuccugcggccucuacaagcaccccggcguccccgucaaguggaagcgcuga

SEQ ID NO: 825 - RNA, 1473 nt, Artificial Sequence
  derived and/or modified protein sequence (opt2) from LASV(Lassa virus/H.sapiens-wt/NGA/2016/ISTH_0104;Clade II)__AVO03631__GPC
augggccaggucaucaccuucuuccaggaggucccccacgucaucgaggaggucaugaacaucguccucaucgcccucucccuccucgccauccucaagggcaucuacaacgucgccaccugcggccucuucggccucaucuccuuccuccuccucugcggccgcuccugcuccaccaccuacaagggcgucuacgagcuccagacccucgagcucaacaugcagaaccucaacaugaccaugccccucuccugcaccaagaacuccucccaccacuacaucauggucggcaacgagaccggccucgagcucacccucaccaacaccuccaucaucaaccacaaguucugcaaccucuccgacgcccacaagaagaaccucuacgaccacgcccucauguccaucaucuccaccuuccaccucuccauccccaacuucaaccaguacgaggccauguccugcgacuucaacggcggcaagaucuccguccaguacaaccucucccacaccuacgccaucgacgccgccaaccacugcggcaccgucgccaacggcguccuccagaccuucaugcgcauggccuggggcggcuccuacaucgcccucgacuccggccgcggcaacugggacugcaucaugaccuccuaccaguaccucaucauccagaacaccaccugggaggaccacugccaguucucccgccccucccccaucggcuaccucggccuccucucccagcgcacccgcgacaucuacaucucccgccgccuccucggcaccuucaccuggacccucuccgacuccgagggcaacgaggcccccggcggcuacugccucacccgcuggaugcucaucgaggccgagcucaagugcuucggcaacaccgccgucgccaagugcaacgagaagcacgacgaggaguucugcgacaugcuccgccucuucgacuucaacaagcaggccaucaagcgccucaagaccgaggcccagauguccauccagcucaucaacaaggccgucaacgcccucaucaacgaccagcucaucaugaagaaccaccuccgcgacaucaugggcauccccuacugcaacuacuccaaguacugguaccucaaccacaccgucaccggccgcaccucccucccccgcugcuggcucgucuccaacggcuccuaccucaacgacacccaguucuccgacgacaucgagcagcaggccgacaacaugaucaccgagaugcuccagaaggaguacauggaccgccagggcaagaccccccucggccucgucgaccucuucgucuucuccaccuccuucuaccucaucuccaucuuccuccaccucgucaagauccccacccaccgccacaucgucggccgccccugccccaagccccaccgccucaaccacaugggcaucugcuccugcggccucuacaagcaccccggcguccccgucaaguggaagcgcuga

SEQ ID NO: 826 - RNA, 1476 nt, Artificial Sequence
  derived and/or modified protein sequence (opt2) from LASV(Lassa virus/H.sapiens-wt/NGA/2016/ISTH_0133;Clade II)__AVO03635__GPC
augggccagaucaucaccuucuuccaggaggucccccacgucaucgaggaggucaugaacaucguccucaucgcccucucccuccucgccguccucaaggccaucuacaacgucgccaccugcggcgucuucggccucaucuccuuccuccuccucugcggccgcuccugcuccaccaccuacaagggcgucuacgagcuccagacccucgagcucgacauggccaaccucaacaugaccaugccccucuccugcaccaagaacaacucccaccacuacaucauggucggcaacgagaccggccucgagcucacccucaccaacaccuccaucaucaaccacaaguucugcaaccucuccgacgcccacaagaagaaccucuacgaccacucccucauguccaucaucuccaccuuccaccucuccauccccaacuucaaccaguacgaggccauguccugcgacuucaacggcggcaagaucuccguccaguacaaccucucccacuccuacgccgucgacgccgccaagcacugcggcaccaucgccaacggcguccuccagaccuucaugcgcauggccuggggcggcuccuacaucgcccucgacuccggcaagggcggcugggacugcaucaugaccuccuaccaguaccucaucauccagaacaccaccugggaggaccacugccaguucucccgccccucccccaucggcuaccucggccuccucucccagcgcacccgcgacaucuacaucucccgccgccuccucggcaccuucaccuggacccucuccgacuccgagggcaacgacgcccccggcggcuacugccucacccgcuggaugcucaucgaggccgagcucaagugcuucggcaacaccgccaucgccaagugcaacgagaagcacgacgaggaguucugcgacaugcuccgccucuucgacuucaaccgccaggccaucaagcgccucaagaccgaggcccagauguccauccagcucaucaacaaggccgucaacgcccucaucaacgaccagcucaucaugaagaaccaccuccgcgacaucaugggcauccccuacugcaacuacuccaaguacugguaccucaaccacaccaucaccggcaagaccucccucccccgcugcuggcucgucuccaacggcuccuaccucaacgagacccacuucuccgacgacaucgagcagcaggccgacaacaugaucaccgagcuccuccagaaggaguacauggaccgccagggcaagaccccccucggccucgucgaccucuucgucuucuccaccuccuucuaccucaucuccaucuuccuccaccucgucaagauccccacccaccgccacaucgucggcaagcccugccccaagccccaccgccucaaccacaugggcaucugcuccugcggccucuacaagcaccccggcguccccgucaaguggaagcgccaguga

SEQ ID NO: 827 - RNA, 1473 nt, Artificial Sequence
  derived and/or modified protein sequence (opt2) from LASV(Lassa virus/H.sapiens-wt/NGA/2016/ISTH_0141;Clade II)__AVO03649__GPC
augggccagaucaucaccuucuuccaggaggucccccacgucaucgaggaggucaugaacaucguccucaucacccucucccuccucgccauccucaagggcaucuacaacgucgccaccugcggccucuucggccucgucuccuuccuccuccucugcggccgcuccugcuccaccaucuacaagggcgucuacgagcuccagacccucgagcucgacauggccucccucaacaugaccaugccccucuccugcaccaagaacaacucccaccacuacaucauggucggcaacgagaccggccucgagcucacccucaccaacaccuccaucaucaaccacaaguucugcaaccucuccgacgcccacaagaagaaccucuacgaccacgcccucauguccaucaucuccaccuuccaccucuccauccccaacuucaaccaguacgaggccauguccugcgacuucaacggcggcaagaucuccguccaguacaaccucucccacaccuacgccgucgacgccgccgagcacugcggcaccaucgccaacggcguccuccagaccuucaugcgcauggccuggggcggcuccuacaucgcccucgacuccggcaagggcuccugggacugcaucaugaccuccuaccaguaccucaucauccagaacaccaccugggaggaccacugccaguucucccgccccucccccaucggcuaccucggccuccucucccagcgcacccgcgacaucuacaucucccgccgccuccucggcaccuucaccuggacccucuccgacuccgagggcaacgagacccccggcggcuacugccucacccgcuggaugcucaucgaggccgagcucaagugcuucggcaacaccgccgucgccaagugcaacgagaagcacgacgaggaguucugcgacaugcuccgccucuucgacuucaacaagcaggccauccgccgccucaagaccgaggcccagauguccauccagcucaucaacaaggccgucaacgcccucaucaacgaccagcucaucaugaagaaccaccuccgcgacaucaugggcauccccuacugcaacuacuccaaguacugguaccucaaccacaccgucaccggcaagaccucccucccccgcugcuggcucgucuccaacggcuccuaccucaacgagacccgcuucuccgacgacaucgagcagcaggccgacaacaugaucaccgagcuccuccagaaggaguacaucgaccgccagggcaagaccccccucggccucgucgaccucuucgucuucuccaccuccuucuaccucaucuccaucuuccuccaccucgucaagauccccacccaccgccacaucaucggcaagcccugccccaagccccaccgccucaaccacaugggcaucugcuccugcggccucuacaagcaccccggcauccccgucaaguggaagcgcuga

SEQ ID NO: 828 - RNA, 1473 nt, Artificial Sequence
  derived and/or modified protein sequence (opt2) from LASV(Lassa virus/H.sapiens-wt/NGA/2016/ISTH_0146;Clade II)__AVO03633__GPC
augggccagaucaucaccuucuuccaggaggucccccacgucaucgaggaggucaugaacaucguccucaucgcccucucccuccucgccauccucaagggcaucuacaacgucgccaccugcggccucuucggccucgucuccuuccuccuccucugcggccgcuccugcuccaccaccuacaagggcgucuacgagcuccagacccucgagcucgacauggccucccucaacaugaccaugccccucuccugcaccaagaacaacucccaccacuacaucauggucggcaacgagaccggccucgagcucacccucaccaacaccuccaucaucaaccacaaguucugcaaccucuccgacgcccacaagaagaaccucuacgaccacgcccucauguccaucaucuccaccuuccaccucuccauccccaacuucaaccaguacgaggccauguccugcgacuucaacggcggcaagaucuccguccaguacaaccucucccacaccuacgccgucgacgccgccaaccacugcggcaccaucgccaacggcguccuccagaccuucaugcgcauggccuggggcggcuccuacaucgcccucgacuccggcaagggcuccugggacugcaucaugaccuccuaccaguaccucaucauccagaacaccaccugggaggaccacugccaguucucccgccccucccccaucggcuaccucggccuccucucccagcgcacccgcgacaucuacaucucccgccgccuccucggcaccuucaccuggacccucuccgacuccgagggcaacgagacccccggcggcuacugccucacccgcuggaugcucaucgaggccgagcucaagugcuucggcaacaccgccgucgccaagugcaacgagaagcacgacgaggaguucugcgacaugcuccgccucuucgacuucaacaagcaggccauccgccgccucaagaccgaggcccagauguccauccagcucaucaacaaggccgucaacgcccucaucaacgaccagcucaucaugaagaaccaccuccgcgacaucaugggcauccccuacugcaacuacuccaaguacugguaccucaaccacaccgucaccggcaagaccucccucccccgcugcuggcucgucuccaacggcuccuaccucaacgagacccacuucuccgacgacaucgagcagcaggccgacaacaugaucaccgagcuccuccagaaggaguacauggaccgccagggcaagaccccccucggccucgucgaccucuucgucuucuccaccuccuucuaccucaucuccaucuuccuccaccucgucaagauccccacccaccgccacgucaucggcaagcccugccccaagccccaccgccucaaccacaugggcaucugcuccugcggccucuacaagcaccccggcguccccgucaaguggaagcgcuga

SEQ ID NO: 829 - RNA, 1473 nt, Artificial Sequence
  derived and/or modified protein sequence (opt2) from LASV(Lassa virus/H.sapiens-wt/NGA/2016/ISTH_0187;Clade II)__AVO03549__GPC
augggccagaucgucaccuucuuccaggaggucccccacgucaucgaggaggucaugaacaucguccucaucgcccucuccguccucgccauccucaagggccucuacaacuucgccaccugcggccucaucggccucgucaccuuccuccuccucuccggccgcuccugcuccauggucuacaagggcgucuacgagcuccagacccucgagcucaacauggagacccucaacaugaccaugccccucuccugcaccaagaacaacucccaccacuacauccgcgucggcaacgacaccggccucgagcucacccucaccaacaacacccuccucaaccacaaguucugcaaccucuccgacgcccacaagaagaaccucuacgaccacgcccucauguccaucaucuccaccuuccaccucuccauccccaacuucaaccaguacgaggccauguccugcgacuucaacggcggccgcaucaccguccaguacaaccucucccacuccuacgccgucgacgccgccaaccacugcggcaccgucgccaacggcguccuccagaccuucaugcgcauggccuggggcggcuccuacaucgcccucgacucccgccacggcaacugggacugcaucaugaccuccuaccaguaccucaucauccagaacaccaccugggaggaccacugccaguucucccgccccucccccaucggcuaccucggccuccucucccagcgcacccgcgacaucuacaucucccgccgccuccucggcaccuucaccuggacccucuccgacuccgagggcaacgagacccccggcggcuacugccucacccgcuggaugcucaucgaggccgagcucaagugcuucggcaacaccgccgucgccaagugcaacgagaagcacgacgaggaguucugcgacaugcuccgccucuucgacuucaacaagcaggccauccgccgccucaaggccgaggcccagauguccauccagcucaucaacaaggccgucaacgcccucaucaacgaccagcucaucaugaagaaccaccuccgcgacaucaugggcauccccuacugcaacuacuccaaguacugguaccucaaccacaccuccaccggcaagaccucccucccccgcugcuggcucgucuccaacggcuccuaccucaacgagacccacuucuccgacgacaucgagcagcaggccgacaacaugaucaccgagaugcuccagaaggaguaccucgaccgccagggcaagaccccccucggccucgucgacaucuucgucuucuccaccuccuucuaccucaucuccaucuuccuccaccucaucaagauccccacccaccgccacaucgucggcaagcccugccccaagccccaccgccucaaccacaugggcaucugcuccugcggccucuacaagcagcccggcguccccguccgcuggaagcgcuga

SEQ ID NO: 830 - RNA, 1473 nt, Artificial Sequence
  derived and/or modified protein sequence (opt2) from LASV(Lassa virus/H.sapiens-wt/NGA/2016/ISTH_0199;Clade II)__AVO03653__GPC
augggccagaucaucaccuucuuccaggaggucccccacgucaucgaggaggucaugaacaucguccucaucgcccucucccuccucgccauccucaagggcaucuacaacgucgccaccugcggccucuucggccucgucuccuuccuccuccucugcggccgcuccugcuccaccaccuacaagggcgucuacgagcuccagacccucgagcucgacauggccucccucaacaugaccaugccccucuccugcaccaagaacaacucccaccacuacaucauggucggcaacgagaccggccucgagcucacccucaccaacaccuccaucaucaaccacaaguucugcaaccucuccgacgcccacaagaagaaccucuacgaccacgcccucauguccaucaucuccaccuuccaccucuccauccccaacuucaaccaguacgaggccauguccugcgacuucaacggcggcaagaucuccguccaguacaaccucucccacaccuacgccgucgacgccgccaaccacugcggcaccaucgccaacggcguccuccagaccuucaugcgcauggccuggggcggcuccuacaucgcccucgacuccggcaagggcaacugggacugcaucaugaccuccuaccaguaccucaucauccagaacaccaccugggaggaccacugccaguucucccgccccucccccaucggcuaccucggccuccucucccagcgcacccgcgacaucuacaucucccgccgccuccucggcaccuucaccuggacccucuccgacuccgagggcaacgagacccccggcggcuacugccucacccgcuggaugcucaucgaggccgagcucaagugcuucggcaacaccgccgucgccaagugcaacgagaagcacgacgaggaguucugcgacaugcuccgccucuucgacuucaacaagcaggccaucucccgccucaagaccgaggcccagauguccauccagcucaucaacaaggccgucaacgcccucaucaacgaccagcucaucaugaagaaccaccuccgcgacaucaugggcauccccuacugcaacuacuccaaguacugguaccucaaccacaccgucaccggcaagaccucccucccccgcugcuggcucgucuccaacggcuccuaccucaacgagacccacuucuccgacgacaucgagcagcaggccgacaacaugaucaccgagaugcuccagaaggaguacaucgaccgccagggcaagaccccccucggccucgucgaccucuucgucuucuccaccuccuucuaccucaucuccaucuuccuccaccucgucaagauccccacccaccgccacgucaucggcaagcccugccccaagccccaccgccucaaccacaugggcaucugcuccugcggccucuacaagcaccccggcguccccgucaaguggaagcgcuga

SEQ ID NO: 831 - RNA, 1473 nt, Artificial Sequence
  derived and/or modified protein sequence (opt2) from LASV(Lassa virus/H.sapiens-wt/NGA/2016/ISTH_0419;Clade II)__AVO03539__GPC
augggccagaucgucaccuucuuccaggaggucccccacgucaucgaggaggucaugaacaucguccucaucgcccucucccuccucgccauccucaagggcaucuacaacuucgccaccugcggccucaucggccucaucaccuuccucuuccucugcggccgcuccugcuccgccaucuacaagggcuccuaccagcuccagaccaucgagcucaacauggagacccucaacaugaccaugccccucuccugcaccaagaacuccucccaccacuacauccgcgucggcaacgagaccggccucgagcucacccucaccaacaucuccaucaucgaccacaaguucugcaaccucuccgacgcccacaagaagaaccucuacgaccacgcccucauguccaucaucuccaccuuccaccucuccauccccaacuucaaccaguacgaggccauguccugcgacuucaacggcggcaagaucuccguccaguacaaccucucccacaccuacgccgucgacgccgccaaccacugcggcaccgucgccaacggcguccuccagaccuucaugcgcauggccuggggcggcuccuacaucgcccucgacuccggccgcggcaacugggacugcaucaugaccuccuaccaguaccucaucauccagaacaccaccugggaggaccacugccaguucucccgccccucccccaucggcuaccucggccuccucucccagcgcacccgcgacaucuacaucucccgccgccuccucggcaccuucaccuggacccucuccgacuccgagggcaaggagacccccggcggcuacugccucacccgcuggaugcucaucgaggccgagcucaagugcuucggcaacaccgccgucgccaagugcaacgagaagcacgacgaggaguucugcgacaugcuccgccucuucgacuucaacaagcaggccauccagcgccucaaggccgaggcccagauguccauccagcucaucaacaaggccgucaacgcccucaucaacgaccagcucaucaugaagaaccaccuccgcgacaucaugggcauccccuacugcaacuacuccaaguacugguaccucaaccacaccuccaccggccgcaccucccucccccgcugcuggcucgucuccaacggcuccuaccucaacgagacccacuucuccgacgacaucgagcagcaggccgacaacaugaucaccgagaugcuccagaaggaguacaucgaccgccagggcaagaccccccucggccucgucgaccucuucgucuucuccaccuccuucuaccucaucuccaucuuccuccaccucaucaagauccccacccaccgccacaucgucggcaaguccugccccaagccccaccgccucaaccacaugggcaucugcuccugcggccucuacaagcagcccggcguccccgucaaguggaagcgcuga

SEQ ID NO: 832 - RNA, 1473 nt, Artificial Sequence
  derived and/or modified protein sequence (opt2) from LASV(Lassa virus/H.sapiens-wt/NGA/2016/ISTH_0447;Clade II)__AVO03559__GPC
augggccagaucaucaccuucuuccaggaggucccccacgucaucgaggaggucaugaacaucguccucaucgcccucucccuccucgccauccucaagggcaucuacaacaucgccaccugcggccucuucggccucgucuccuuccuccuccucugcggccgcuccugcuccaccaccuacaagggcgucuacgagcuccagacccucgagcucgacauggccucccucaacaugaccaugccccucuccugcaccaagaacaacucccaccacuacaucauggucggcaacgagaccggccucgagcucacccucaccaacaccuccaucaucaaccacaaguucugcaaccucuccgacgcccacaagaagaaccucuacgaccacacccucauguccaucaucuccaccuuccaccucuccauccccaacuucaaccaguacgaggccauguccugcgacuucaacggcggcaagaucuccguccaguacaaccucucccacgccuacgccgucgacgccgccaaccacugcggcaccaucgccaacggcguccuccagaccuucaugcgcauggccuggggcggcuccuacaucgcccucgacuccggcaagggcaacugggacugcaucaugaccuccuaccaguaccucaucauccagaacaccaccugggaggaccacugccaguucucccgccccucccccaucggcuaccucggccuccucucccagcgcacccgcgacaucuacaucucccgccgccuccucggcaccuucaccuggacccucuccgacuccgagggcaacgagacccccggcggcuacugccucacccgcuggaugcucaucgaggccgagcucaagugcuucggcaacaccgccgucgccaagugcaacgagaagcacgacgaggaguucugcgacaugcuccgccucuucgacuucaacaagcaggccauccgccgccucaagaccgaggcccagauguccauccagcucaucaacaaggccgucaacgcccucaucaacgaccagcucaucaugaagaaccaccuccgcgacaucaugggcauccccuacugcaacuacuccaaguacugguaccucaaccacaccgucaccggcaagaccucccucccccgcugcuggcucgucuccaacggcuccuaccucaacgagacccacuucuccgacgacaucgagcagcaggccgacaacaugaucaccgagcuccuccagaaggaguacaucgaccgccagggcaagaccccccucggccucgucgaccucuucgucuucuccaccuccuucuaccucaucuccaucuuccuccaccucgucaagauccccacccaccgccacgucgucggcaagcccugccccaagccccaccgccucaaccacaugggcaucugcuccugcggccucuacaagcaccccggcguccccgucaaguggaagcgcuga

SEQ ID NO: 833 - RNA, 1473 nt, Artificial Sequence
  derived and/or modified protein sequence (opt2) from LASV(Lassa virus/H.sapiens-wt/NGA/2016/ISTH_0543;Clade II)__AVO03595__GPC
augggccagaucaucaccuucuuccaggaggucccccacgucaucgaggaggucaugaacaucguccucaucgcccucucccuccucgccauccucaagggcaucuacaacaucgccaccugcggccucuucggccucaucuccuuccuccuccucugcggccgcuccugcuccaccaccuacaagggcgucuacgagcuccagacccucgagcucgacauggccaaccucaacaugaccaugccccucuccugcaccaagaacaacucccaccacuacaucauggucggcaacgagaccggccucgagcucacccucaccaacaccuccaucaucaaccacaaguucugcaaccucuccgacgcccacaagaagaaccucuacgaccacgcccucauguccaucaucuccaccuuccaccucuccauccccaacuucaaccaguacgaggccauguccugcgacuucaacggcggcaagaucuccguccaguacaaccucucccacuccuacgccgucgacgccgccggccacugcggcaccaucgccaacggcguccuccagaccuucaugcgcauggccuggggcggcuccuacaucgcccucgacuccggcaagggcaacugggacugcaucaugaccuccuaccaguaccucgucauccagaacaccaccugggaggaccacugccaguucucccgccccucccccaucggcuaccucggccuccucucccagcgcacccgcgacaucuacaucucccgccgccuccucggcaccuucaccuggacccucuccgacuccgagggcaacgaggcccccggcggcuacugccucacccgcuggaugcucaucgaggccgagcucaagugcuucggcaacaccgccaucgccaagugcaacgagaagcacgacgaggaguucugcgacaugcuccgccucuucgacuucaacaagcaggccauccgccgccucaaggccgaggcccagauguccauccagcucaucaacaaggccgucaacgcccucaucaacgaccagcucaucaugaagaaccaccuccgcgacaucaugggcauccccuacugcaacuacuccaaguacugguaccucaaccacaccgucaccggcaagaccucccuccccaagugcuggcucgucuccaacggcuccuaccucaacgagacccacuucuccgacgacaucgagcagcaggccgacaacaugaucaccgagcuccuccagaaggaguacauggaccgccagggcaagaccccccucggccucgucgaccucuucgucuucuccaccuccuucuaccucaucuccaucuuccuccaccucgucaagauccccacccaccgccacaucgucggccgccccugccccaagccccaccgccucaaccacaugggcaucugcuccugcggccucuacaagcaccccggcguccccgucaaguggaagcgcuga

SEQ ID NO: 834 - RNA, 1473 nt, Artificial Sequence
  derived and/or modified protein sequence (opt2) from LASV(Lassa virus/H.sapiens-wt/NGA/2016/ISTH_0565;Clade II)__AVO03637__GPC
augggccagaucgucaccuucuuccaggaggucccccacgucaucgaggaggucaugaacaucguccucaucgcccucucccuccucgccauccucaagggcaucuacaacgucgccaccugcggccucuucggccucaucuccuuccuccuccucugcggccgcuccugcuccaccaccuacaagggcgucuacgagcuccagacccucgagcucgacauggccaaccucaacaugaccaugccccucuccugcaccaagaacuccucccaccacuacaucauggucggcaacgagaccggccucgagcucacccucaccaacaccuccaucaucaaccacaaguucugcaaccucuccgacgcccacaagaagaaccucuacgaccacgcccucauguccaucaucuccaccuuccaccucuccauccccaacuucaaccaguacgaggccauguccugcgacuucaacggcggcaagaucuccguccaguacaaccucucccacaccuacgccgucgacgccgccaaccacugcggcaccaucgccaacggcguccuccagaccuucaugcgcauggccuggggcggcuccuacaucgcccucgacuccggcaagggcaacugggacugcaucaugaccuccuaccaguaccucaucauccagaacaccaccugggaggaccacugccaguucucccgccccucccccaucggcuaccucggccuccucucccagcgcacccgcgacaucuacaucucccgccgccuccucggcaccuucaccuggacccucuccgacuccgagggcaacgaggcccccggcggcuacugccucacccgcuggaugcucaucgaggccgagcucaagugcuucggcaacaccgccaucgccaagugcaacgagaagcacgacgaggaguucugcgacaugcuccgccucuucgacuucaacaagcaggccaucaagcgccucaaguccgaggcccagauguccauccagcucaucaacaaggccgucaacgcccucaucaacgaccagcucaucaugaagaaccaccuccgcgacaucaugggcauccccuacugcaacuacucccgcuacugguaccucaaccacaccgucaccggcaagaccucccucccccgcugcuggcucaucuccaacggcuccuaccucaacgagacccacuucuccgacgacaucgagcagcaggccgacaacaugaucaccgagcuccuccagaaggaguacauggaccgccagggcaagaccccccucggccucgucgaccucuucgucuucuccaccuccuucuaccucaucuccaucuuccuccaccucgucaagauccccacccaccgccacaucgucggccgccccugccccaagccccaccgccucaaccacaugggcaucugcuccugcggccucuacaagcaccccggcguccccgucaaguggaagcgcuga

SEQ ID NO: 835 - RNA, 1473 nt, Artificial Sequence
  derived and/or modified protein sequence (opt2) from LASV(Lassa virus/H.sapiens-wt/NGA/2016/ISTH_0572;Clade II)__AVO03611__GPC
augggccagaucaucaccuucuuccaggaggucccccacgucaucgaggaggucaugaacaucguccucaucgcccucucccuccucgccauccucaagggcaucuacaacgucgccaccugcggccucuucggccucgucgccuuccuccuccucugcggccgcuccugcuccaccaccuacaagggcgucuacgagcuccagacccucgagcucgacauggccucccucaacaugaccaugccccucuccugcaccaagaacaacucccaccacuacaucauggucggcaacgagaccggccucgagcucacccucaccaacaccuccaucaucaaccacaaguucugcaaccucuccgacgcccacaagaagaaccucuacgaccacgcccucauguccaucaucuccaccuuccaccucuccauccccaacuucaaccagcacgaggccauguccugcgacuucaacggcggcaagaucuccguccaguacaaccucucccacaccuacgccgucgacgccgccaaccacugcggcaccaucgccaacggcguccuccagaccuucaugcgcauggccuggggcggcuccuacaucgcccucgacuccggcaagggcuccugggacugcaucaugaccuccuaccaguaccucaucauccagaacaccaccugggaggaccacugccaguucucccgccccucccccaucggcuaccucggccuccucucccagcgcacccgcgacaucuacaucucccgccgccuccucggcaccuucaccuggacccucuccgacuccgagggcaacgagacccccggcggcuacugccucacccgcuggaugcucaucgaggccgagcucaagugcuucggcaacaccgccgucgccaagugcaacgagaagcacgacgaggaguucugcgacaugcuccgccucuucgacuucaacaagcaggccauccgccgccucaagaccgaggcccagauguccauccagcucaucaacaaggccgucaacgcccucaucaacgaccagcucaucaugaagaaccaccuccgcgacaucaugggcauccccuacugcaacuacuccaaguacugguaccucaaccacaccgucaccggccgcaccucccucccccgcugcuggcucgucuccaacggcuccuaccucaacgagacccacuucuccgacgacaucgagcagcaggccgacaacaugaucaccgagcuccuccagaaggaguacauggaccgccagggcaagaccccccucggccucgucgaccucuucgucuucuccaccuccuucuaccucaucuccaucuuccuccaccucaucaagauccccacccaccgccacgucaucggcaagcccugccccaagccccaccgccucaaccacaugggcaucugcuccugcggccucuacaagcaccccggcguccccgucaaguggaagcgcuga

SEQ ID NO: 836 - RNA, 1473 nt, Artificial Sequence
  derived and/or modified protein sequence (opt2) from LASV(Lassa virus/H.sapiens-wt/NGA/2016/ISTH_0610;Clade II)__AVO03585__GPC
augggccagaucaucaccuucuuccaggaggucccccacgucaucgaggaggucaugaacaucguccucaucgcccucucccuccucgccauccucaagggcgucuacaacgucgccaccugcggccucuucggccucgucuccuuccuccuccucugcggccgcuccugcuccaccaccuacaagggcgucuacgagcuccagacccucgagcucgacauggccucccucaacaugaccaugccccucuccugcaccaagaacaacucccaccacuacaucauggucggcaacgagaccggccucgagcucacccucaccaacaccuccaucaucaaccacaaguucugcaaccucuccgacgcccacaagaagaaccucuacgaccacgcccucauguccaucaucuccaccuuccaccucuccauccccaacuucaaccaguacgaggccauguccugcgacuucaacggcggcaagaucuccguccaguacaaccucucccacaccuacgccgucgacgccgccaaccacugcggcaccaucgccaacggcguccuccagaccuucaugcgcauggccuggggcggcuccuacaucgcccucgacuccggccgcggcuccugggacugcaucaugaccuccuaccaguaccucaucauccagaacaccaccugggaggaccacugccaguucucccgccccucccccaucggcuaccucggccuccucucccagcgcacccgcgacaucuacaucucccgccgccuccucggcaccuucaccuggacccucuccgacuccgagggcaacgagacccccggcggcuacugccucacccgcuggaugcucaucgaggccgagcucaagugcuucggcaacaccgccgucgccaagugcaacgagaagcacgacgaggaguucugcgacaugcuccgccucuucgacuucaacaagcaggccauccgccgccucaaggccgaggcccagauguccauccagcucaucaacaaggccgucaacgcccucaucaacgaccagcucaucaugaagaaccaccuccgcgacaucaugggcauccccuacugcaacuacuccaaguacugguaccucaaccacaccgucaccggccgcaccucccucccccgcugcuggcucgucuccaacggcuccuaccucaacgagacccacuucuccgacgacaucgagcagcaggccgacaacaugaucaccgagcuccuccagaaggaguacaucgaccgccagggcaagaccccccucggccucgucgaccucuucgucuucuccaccuccuucuaccucaucuccaucuuccuccaccucgucaagauccccacccaccgccacaucaucggcaagcccugccccaagccccaccgccucaaccacaugggcaucugcuccugcggccucuacaagcaccccggcguccccgucaaguggaagcgcuga

SEQ ID NO: 837 - RNA, 1473 nt, Artificial Sequence
  derived and/or modified protein sequence (opt2) from LASV(Lassa virus/H.sapiens-wt/NGA/2016/ISTH_0621;Clade II)__AVO03543__GPC
augggccagaucgucaccuucuuccaggagaucccccacgucgucgaggagaucaugaacaucguccucaucacccucucccuccucgccauccucaagggccucuacaacuucgccaccugcggccucaucggccucaucaccuuccucuuccucugcggccgcuccugcuccaccaucuacaagggcuccuaccagcuccaggcccucgagcucaacauggagacccucaacaugaccaugccccucuccugcaccaagaacaacucccaccacuacauccgcgucggcaacgagaccggccucgagcucacccucaccaacaccuccaucaucgaccacaaguucugcaaccucuccgacgcccacaagcgcaaccucuacgaccacacccucauguccaucaucuccaccuuccaccucuccauccccaacuucaaccaguacgaggccauguccugcgacuucaacggcggcaagaucuccguccaguacaaccucucccacuccuacgccggcgacgccgcccgccacugcggcaccgucgccaacggcguccuccagaccuucaugcgcauggccuggggcggcuccuacaucgcccucgacuccggcaagggcaacugggacugcaucaugaccuccuaccaguaccucaucauccagaacaccaccugggagaaccacugccaguucucccgccccucccccaucggcuaccucggccuccucucccagcgcacccgcgacaucuacaucucccgccgccuccucggcaccuucaccuggacccucuccgacuccgagggcaaggagacccccggcggcuacugccucacccgcuggaugcucaucgaggccgagcucaagugcuucggcaacaccgccgucgccaagugcaacgagaagcacgacgaggaguucugcgacaugcuccgccucuucgacuucaacaagcaggccauccagcgccucaagaccgaggcccagauguccauccagcucaucaacaaggccgucaacgcccucaucaacgaccagcucaucaugaagaaccaccuccgcgacaucaugggcauccccuacugcaacuacuccaaguacugguaccucaaccacaccaccaccggcaagaccucccuccccaagugcuggcucgucuccaacggcuccuaccucaacgagacccacuucuccgacgacaucgagcagcaggccgacaacaugaucaccgagaugcuccagaaggaguacaucgaccgccagggcaagaccccccucggccucgucgaccucuucgucuucuccaccuccuucuaccucaucuccaucuuccuccaccucaucaagauccccacccaccgccacaucgucggcaaguccugccccaagccccaccgccucaaccacaugggcaucugcuccugcggccucuacaagcagcccggcguccucgucaaguggaagcgcuga

SEQ ID NO: 838 - RNA, 1473 nt, Artificial Sequence
  derived and/or modified protein sequence (opt2) from LASV(Lassa virus/H.sapiens-wt/NGA/2016/ISTH_0701;Clade II)__AVO03629__GPC
augggccagaucaucaccuucuuccaggaggucccccacgucaucgaggaggucaugaacaucguccucaucgcccucucccuccucgccauccucaagggcaucuacaacgucgccaccugcggccucuucggccucgucuccuuccuccuccucugcggccgcuccugcuccaccaccuacaagggcgucuacgagcuccagacccucgagcucgacauggccucccucaacaugaccaugccccucuccugcaccaagaacaacucccaccacuacaucauggucggcaacgagaccggccucgagcucacccucaccaacaccuccaucaucggccacaaguucugcaaccucuccgacgcccacaagaagaaccucuacgaccacgcccucauguccaucaucuccaccuuccaccucuccauccccaacuucaaccaguacgaggccauguccugcgacuucaacggcggcaagaucuccguccaguacaaccucucccacgccuacgccgucgacgccgccaaccacugcggcaccaucgccaacggcguccuccagaccuucaugcgcauggccuggggcggcuccuacaucgcccucgacuccggcaagggcuccugggacugcaucaugaccuccuaccaguaccucaucauccagaacaccaccugggaggaccacugccaguucucccgccccucccccaucggcuaccucggccuccucucccagcgcacccgcgacaucuacaucucccgccgccuccucggcaccuucaccuggacccucuccgacuccgagggcaacgagacccccggcggcuacugccucacccgcuggaugcucaucgaggccgagcucaagugcuucggcaacaccgccgucgccaagugcaacgagaagcacgacgaggaguucugcgacaugcuccgccucuucgacuucaacaagcaggccauccgccgccucaagaccgaggcccagauguccauccagcucaucaacaaggccgucaacgcccucaucaacgaccagcucaucaugaagaaccaccuccgcgacaucaugggcauccccuacugcaacuacuccaaguacugguaccucaaccacaccgucaccggcaagaccucccucccccgcugcuggcucgucuccaacggcuccuaccucaacgagacccacuucuccgacgacaucgagcagcaggccgacaacaugaucaccgagcuccuccagaaggaguacaucgaccgccagggcaagaccccccucggccucgucgaccucuucgucuucuccaccuccuucuaccucaucuccaucuuccuccaccucgucaagauccccacccaccgccacgucaucggcaagcccugccccaagccccaccgccucaaccacaugggcaucugcuccugcggccucuacaagcaccccggcguccccgucaaguggaagcgcuga

SEQ ID NO: 839 - RNA, 1473 nt, Artificial Sequence
  derived and/or modified protein sequence (opt2) from LASV(Lassa virus/H.sapiens-wt/NGA/2016/ISTH_0702;Clade II)__AVO03557__GPC
augggccagaucaucaccuucuuccaggaggucccccacgucaucgaggaggucaugaacaucguccucaucgcccucucccuccucgccguccucaagggcaucuacaacgucgccaccugcggccucuucggccucgucgccuuccuccuccucugcggccgcuccugcuccaccaccuacaagggcgucuacgagcuccagacccucgagcucgacauggccaaccucaacaugaccaugccccucuccugcaccaagaacaacucccaccacuacaucauggucggcaacgagaccggccucgagcucacccucaccaacaccuccaucaucaaccacaaguucugcaaccucuccgacgcccacaagaagaaccucuacgaccacgcccucauguccaucaucuccaccuuccaccucuccauccccaacuucaaccaguacgaggccauguccugcgacuucaacggcggcaagaucuccguccaguacaaccucucccacaccuacgccgucgacgccgccaaccacugcggcaccaucgccaacggcguccuccagaccuucaugcgcauggccuggggcggcuccuacaucgcccucgacuccggcaagggcuccugggacugcaucaugaccuccuaccaguaccucaucauccagaacaccaccugggaggaccacugccaguucucccgccccucccccaucggcuaccucggccuccucucccagcgcacccgcgacaucuacaucucccgccgccuccucggcaccuucaccuggacccucuccgacuccgagggcaacgagacccccggcggcuacugccucacccgcuggaugcucaucgaggccgagcucaagugcuucggcaacaccgccgucgccaagugcaacgagaagcacgacgaggaguucugcgacaugcuccgccucuucgacuucaacaagcaggccauccgccgccucaagaccgaggcccagauguccauccagcucaucaacaaggccgucaacgcccucaucaacgaccagcucaucaugaagaaccaccuccgcgacaucaugggcauccccuacugcaacuacuccaaguacugguaccucaaccacaccgucaccggccgcaccucccucccccgcugcuggcucgucuccaacggcuccuaccucaacgagacccacuucuccgacgacaucgagcagcaggccgacaacaugaucaccgagcuccuccagaaggaguacauggaccgccagggcaagaccccccucggccucgucgaccucuucgucuucuccaccuccuucuaccucaucuccaucuuccuccaccucaucaagauccccacccaccgccacgucaucggcaagcccugccccaagccccaccgccucaaccacaugggcaucugcuccugcggccucuacaagcaccccggcguccccgucaaguggaagcgcuga

SEQ ID NO: 840 - RNA, 1473 nt, Artificial Sequence
  derived and/or modified protein sequence (opt2) from LASV(Lassa virus/H.sapiens-wt/NGA/2016/ISTH_0703;Clade II)__AVO03597__GPC
augggccagaucaucaccuucuuccaggaggucccccacgucaucgaggaggucaugaacaucguccucaucgcccucucccuccucgccauccucaagggcaucuacaacgucgccaccugcggccucuucggccucgucuccuuccuccuccucugcggccgcuccugcuccaccaccuacaagggcgucuacgagcuccagacccucgagcucgacauggccucccucaacaugaccaugccccucuccugcaccaagaacaacucccaccacuacaucauggucggcaacgagaccggccucgagcucacccucaccaacaccuccaucaucaaccacaaguucugcaaccucuccgacgcccacaagaagaaccucuacgaccacgcccucauguccaucaucuccaccuuccaccucuccauccccaacuucaaccaguacgaggccauguccugcgacuucaacggcggcaagaucuccguccaguacaaccucucccacaccuacgccgucgacgccgccucccacugcggcaccaucgccaacggcguccuccagaccuucaugcgcauggccuggggcggcuccuacaucgcccucgacuccggcaagggcuccugggacugcaucaugaccuccuaccaguaccucaucauccagaacaccaccugggaggaccacugccaguucucccgccccucccccaucggcuaccucggccuccucucccagcgcacccgcgacaucuacaucucccgccgccuccucggcaccuucaccuggacccucuccgacuccgagggcaacgagacccccggcggcuacugccucacccgcuggaugcucaucgaggccgagcucaagugcuucggcaacaccgccgucgccaagugcaacgagaagcacgacgaggaguucugcgacaugcuccgccucuucgacuucaacaagcaggccauccgccgccucaagaccgaggcccagauguccauccagcucaucaacaaggccgucaacgcccucaucaacgaccagcucaucaugaagaaccaccuccgcgacaucaugggcauccccuacugcaacuacuccaaguacugguaccucaaccacaccgucaccggccgcaccucccucccccgcugcuggcucgucuccaacggcuccuaccucaacgagacccacuucuccgacgacaucgagcagcaggccgacaacaugaucaccgagcuccuccagaaggaguacaucgagcgccagggcaagaccccccucggccucgucgaccucuucgucuucuccaccuccuucuaccucaucuccaucuuccuccaccucaucaagauccccacccaccgccacgucaucggcaagcccugccccaagccccaccgccucaaccacaugggcaucugcuccugcggccucuacaagcaccccggcguccccgucaaguggaagcgcuga

SEQ ID NO: 841 - RNA, 1473 nt, Artificial Sequence
  derived and/or modified protein sequence (opt2) from LASV(Lassa virus/H.sapiens-wt/NGA/2016/ISTH_0717;Clade II)__AVO03547__GPC
augggccagaucgucaccuucuuccaggaggucccccacgucaucgaggaggucaugaacaucguccucaucgcccucuccauccucgccauccucaagggccucuacaacgucgccaccugcggccucaucggccucgucaccuuccuccuccucuccggccgcuccugcuccaugaucuacaagggcgucuacgagcuccagacccucgagcucaacauggagacccucaacaugaccaugccccucuccugcaccaagaacaacucccaccacuacaucauggucggcaacgagaccggccucgagcucacccucaccaacaccucccuccucaaccacaaguucugcaaccucuccgacgcccacaagaagaaccucuacgaccacacccucauguccaucaucuccaccuuccaccucuccauccccaacuucaaccaguacgaggccauguccugcgacuucaacggcggcaagaucaccguccaguacaaccucucccacaccuacgccgucgacgccgucaaccacugcggcacccucgccaacggcauccuccagaccuucaugcgcauggccuggggcggcuccuacaucgcccucgacucccgccacggcuccugggacugcaucaugaccuccuaccaguaccucaucauccagaacaccaccugggaggaccacugccaguucucccgccccucccccaucggcuaccucggccuccucucccagcgcacccgcgacaucuacaucucccgccgccuccucggcaccuucaccuggacccucuccgacuccgagggcaacgagacccccggcggcuacugccucacccgcuggaugcucaucgaggccgagcucaagugcuucggcaacaccgccgucgccaagugcaacgagaagcacgacgaggaguucugcgacaugcuccgccucuucgacuucaacaagcaggccauccgccgccucaaggccgaggcccagauguccauccagcucaucaacaaggccgucaacgcccucaucaacgaccagcucaucaugaagaaccaccuccgcgacaucaugggcauccccuacugcaacuacuccaaguacugguaccucaaccacaccuccaccggccgcaccucccucccccgcugcuggcucgucuccaacggcuccuaccucaacgagacccacuucuccgacgacaucgagcagcaggccgacaacaugaucaccgagaugcuccagaaggaguaccucgaccgccagggcaagaccccccucggccucgucgaccucuucgucuucuccaccuccuucuaccucaucuccaucuuccuccaccucaucaagauccccacccaccgccacaucgucggcaagcccugccccaagccccaccgccucaaccacaugggcaucugcuccugcggccucuacaagcagcccggcguccccguccgcuggaagcgcuga

SEQ ID NO: 842 - RNA, 1473 nt, Artificial Sequence
  derived and/or modified protein sequence (opt2) from LASV(Lassa virus/H.sapiens-wt/NGA/2016/ISTH_0753;Clade II)__AVO03609__GPC
augggccagaucaucaccuucuuccaggaggucccccacgucaucgaggaggucaugaacaucguccucaucgcccucucccuccucgccauccucaagggcaucuacaacgucgccaccugcggccucuucggccucgucuccuuccuccuccucugcggccgcuccugcuccaccaccuacaagggcgucuacgagcuccagacccucgagcucgacauggccucccucaacaugaccaugccccucuccugcaccaagaacaacucccaccacuacaucauggucggcaacgagaccggccucgagcucacccucaccaacaccuccaucaucaaccacaaguucugcaaccucuccgacgcccacaagaagaaccucuacgaccacgcccucauguccaucaucuccaccuuccaccucuccauccccaacuucaaccaguacgaggccauguccugcgacuucaacggcggcaagaucuccguccaguacaaccucucccacaccuacgccgucgacgccgccaaccacugcggcaccaucgccaacggcguccuccagaccuucaugcgcauggccuggggcggcuccuacaucgcccucgacuccggcaagggcaacugggacugcaucaugaccuccuaccaguaccucaucauccagaacaccaccugggaggaccacugccaguucucccgccccucccccaucggcuaccucggccuccucucccagcgcacccgcgacaucuacaucucccgccgccuccucggcaccuucaccuggacccucuccgacuccgagggcaacgagacccccggcggcuacugccucacccgcuggaugcucaucgaggccgagcucaagugcuucggcaacaccgccgucgccaagugcaacgagaagcacgacgaggaguucugcgacaugcuccgccucuucgacuucaacaagcaggccaucucccgccucaagaccgaggcccagauguccauccagcucaucaacaaggccgucaacgcccucaucaacgaccagcucaucaugaagaaccaccuccgcgacaucaugggcauccccuacugcaacuacuccaaguacugguaccucaaccacaccgucaccggccgcaccucccucccccgcugcuggcucgucuccaacggcuccuaccucaacgagacccacuucuccgacgacaucgagcagcaggccgacaacaugaucaccgagcuccuccagaaggaguacauggaccgccagggcaagaccccccucggccucgucgaccucuucgucuucuccaccuccuucuaccucaucuccaucuuccuccaccucgucaagauccccacccaccgccacgucaucggcaagcccugccccaagccccaccgccucaaccacaugggcaucugcuccugcggccucuacaagcaccccggcguccccgucaaguggaagcgcuga

SEQ ID NO: 843 - RNA, 1473 nt, Artificial Sequence
  derived and/or modified protein sequence (opt2) from LASV(Lassa virus/H.sapiens-wt/NGA/2016/ISTH_0759;Clade II)__AVO03593__GPC
augggccagaucaucaccuucuuccaggaggucccccacgucaucgaggaggucaugaacaucguccucaucgcccucucccuccucgccauccucaagggcaucuacaacgucgccaccugcggccucuucggccucgucuccuuccuccuccucugcggccgcuccugcuccaccaccuacaagggcgucuacgagcuccagacccucgagcucgacauggccucccucaacaugaccaugccccucuccugcaccaagaacaacucccaccacuacaucauggucggcaacgagaccggccucgagcucacccucaccaacaccuccaucaucaaccacaaguucugcaaccucuccgacgcccacaagaagaaccucuacgaccacacccucauguccaucaucuccaccuuccaccucuccauccccaacuucaaccaguacgaggccauguccugcgacuucaacggcggcaagaucuccguccaguacaaccucucccacaccuacgccgucgacgccgccaaccacugcggcaccaucgccaacggcguccuccagaccuucaugcgcauggccuggggcggcuccuacaucgcccucgacuccggcaagggcuccugggacugcaucaugaccuccuaccaguaccucaucauccagaacaccuccugggaggaccacugccaguucucccgccccucccccaucggcuaccucggccuccucucccagcgcacccgcgacaucuacaucucccgccgccuccucggcaccuucaccuggacccucuccgacuccgagggcaacgagacccccggcggcuacugccucacccgcuggaugcucaucgaggccgagcucaagugcuucggcaacaccgccgucgccaagugcaacgagaagcacgacgaggaguucugcgacaugcuccgccucuucgacuucaacaagcaggccauccgccgccucaagaccgaggcccagauguccauccagcucaucaacaaggccgucaacgcccucaucaacgaccagcucaucaugaagaaccaccuccgcgacaucaugggcauccccuacugcaacuacuccaaguacugguaccucaaccacaccgucaccggcaagaccucccucccccgcugcuggcucgucuccaacggcuccuaccucaacgagacccacuucuccgacgacaucgagcagcaggccgacaacaugaucaccgagcuccuccagaaggaguacaucgaccgccagggcaagaccccccucggccucgucgaccucuucgucuucuccaccuccuucuaccucaucuccaucuuccuccaccucgucaagauccccacccaccgccacgucaucggcaagcccugccccaagccccaccgccucaaccacaugggcaucugcuccugcggccucuacaagcaccccggcguccccgucaaguggaagcgcuga

SEQ ID NO: 844 - RNA, 1473 nt, Artificial Sequence
  derived and/or modified protein sequence (opt2) from LASV(Lassa virus/H.sapiens-wt/NGA/2016/ISTH_0777;Clade II)__AVO03615__GPC
augggccagaucaucaccuucuuccaggaggucccccacgucaucgaggaggucaugaacaucguccucaucgcccucucccuccucgccauccucaagggcaucuacaacgucgccaccugcggccuccucggccucaucuccuuccuccuccucugcggccgcuccugcuccaccaccuacaagggcgucuacgagcuccagacccucgagcucgacauggccaaccucaacaugaccaugccccucuccugcaccaagaacuccucccaccacuacaucauggucggcaacgagaccggccucgagcucacccucaccaacaccuccaucaucaaccacaaguucugcaaccucuccgacgcccacaagaagaaccucuacgaccacgcccucauguccaucaucuccaccuuccaccucuccauccccaacuucaaccaguacgaggccauguccugcgacuucaacggcggcaagaucuccguccaguacaaccucucccacgccuacgccgucgacgccgccaaccacugcggcaccaucgccaacggcguccuccagaccuucaugcgcauggccuggggcggcuccuacaucgcccucgacuccggcaagggcaacugggacugcaucaugaccuccuaccaguaccucaucauccagaacaccaccugggaggaccacugccaguucucccgccccucccccaucggcuaccucggccuccucucccagcgcacccgcgacaucuacaucucccgccgccuccucggcaccuucaccuggacccucuccgacuccgagggcaacgaggcccccggcggcuacugccucacccgcuggaugcucaucgaggccgagcucaagugcuucggcaacaccgccaucgccaagugcaacgagaagcacgacgaggaguucugcgacaugcuccgccucuucgacuucaacaagcaggccauccgccgccucaagaccgaggcccagauguccauccagcucaucaacaaggccgucaacgcccucaucaacgaccagcucaucaugaagaaccaccuccgcgacaucaugggcauccccuacugcaacuacuccaaguacugguaccucaaccacaccgucaccggcaagaccucccucccccgcugcuggcucaucuccaacggcuccuaccucaacgagacccacuucuccgacgacaucgagcagcaggccgacaacaugaucaccgagcuccuccagaaggaguacauggaccgccagggcaagaccccccucggccucgucgaccucuucgucuucuccaccuccuucuaccucaucuccaucuuccuccaccucgucaagauccccacccaccgccacaucgucggcaagcccugccccaagccccaccgccucaaccacaugggcaucugcuccugcggccucuacaagcaccccggcguccccgucaaguggaagcgcuga

SEQ ID NO: 845 - RNA, 1473 nt, Artificial Sequence
  derived and/or modified protein sequence (opt2) from LASV(Lassa virus/H.sapiens-wt/NGA/2016/ISTH_0779;Clade II)__AVO03655__GPC
augggccagaucaucaccuucuuccaggaggucccccacgucgucgaggaggucaugaacgucguccucaucgcccucucccuccucgccauccucaagggcaucuacaacaucgccaccugcggccucuucggccucaucuccuuccuccuccucugcggccgcuccugcuccaccaccuacaagggcgucuacgagcuccagacccucgagcucgacauggccaaccucaacaugaccaugccccucuccugcaccaagaacaacucccaccacuacaucauggucggcaacgagaccggccucgagcucacccucaccaacaccuccaucaucaaccacaaguucugcaaccucuccgacgcccacaagaagaaccucuacgaccacacccucauguccaucaucuccaccuuccaccucuccauccccaacuucaaccaguacgaggccauguccugcgacuucaacggcggcaagaucuccguccaguacaaccucucccacggcuacgccgucgacgccgccaaccacugcggcaccaucgccaacggcguccuccagaccuucaugcgcauggccuggggcggcuccuacaucgcccucgacuccggcaagggcaacugggacugcaucaugaccuccuaccaguaccucgucauccagaacaccaccugggaggaccacugccaguucucccgccccucccccaucggcuaccucggccuccucucccagcgcacccgcgacaucuacaucucccgccgccuccucggcaccuucaccuggacccucuccgacuccgagggcaacgacgcccccggcggcuacugccucacccgcuggaugcucaucgaggccgagcucaagugcuucggcaacaccgccaucgccaagugcaacgagaagcacgacgaggaguucugcgacaugcuccgccucuucgacuucaaccgccaggccaucaagcgccucaagaccgaggcccagauguccauccagcucaucaacaaggccgucaacgcccucaucaacgaccagcucaucaugaagaaccaccuccgcgacaucaugggcauccccuacugcaacuacuccaaguacugguaccucaacaacaccgucaccggcaaguccucccuccccaagugcuggcucgucuccaacggcuccuaccucaacgagacccacuucuccgacgacaucgagcagcaggccgacaacaugaucaccgagaugcuccagaaggaguacaucgaccgccagggcaagaccccccucggccucgucgaccucuucgucuucuccaccuccuucuaccucaucuccaucuuccuccaccucguccgcauccccacccaccgccacaucaccggcaagcccugccccaagccccaccgccucaaccacaugggcaucugcuccugcggccucuacaagcagcccggcguccccgucaaguggaagcgcuga

SEQ ID NO: 846 - RNA, 1473 nt, Artificial Sequence
  derived and/or modified protein sequence (opt2) from LASV(Lassa virus/H.sapiens-wt/NGA/2016/ISTH_0917;Clade II)__AVO03535__GPC
augggccagaucgucaccuucuuccaggaggucccccacgucaucgaggagaucaugaacaucguccucaucacccucucccuccucgccauccucaagggcgucuacaaccucgccaccugcggccucaucggccucaucaccuuccucuuccucugcggccgcuccugcuccaugaccuacaagggcaacuaccagcucgagacccucgagcucaacauggagaugcucaacaugaccaugccccucuccugcaccaagaacaacucccaccacuacauccgcgucggcaacgagaccggccucgagcucacccucaccaacaccuccaucauccagcacaaguucugcaaccucuccgacgcccacaagcgcaaccucuacgaccacucccucauguccaucgucuccaccuuccaccucuccauccccaacuucaaccaguacgaggccauguccugcgacuucaacggcggcaagaucuccauccaguacaaccucucccacaccuacgccggcgacgccgccaagcacugcggcacccucgccaacggcauccuccagaccuucaugcgcauggccuggggcggcuccuacaucgcccucgacuccggccgcggcggcugggacugcaucaugaccaacuaccaguaccucaucauccagaacgucaccugggaggaccacugccaguucucccgccccucccccaucggcuaccucggccuccucucccagcgcacccgcgaggucuacaucucccgccgccuccucggcaccuucaccuggacccucuccgacuccgagggcaacgaggcccccggcggcuacugccucacccgcuggaugcucaucgaggccgagcucaagugcuucggcaacaccgccgucgccaagugcaacgagaagcacgacgaggaguucugcgacaugcuccgccucuucgacuucaacaagcaggccauccgccgccucaaggccgagacccagauguccauccagcucaucaacaaggccgucaacgcccucaucaacgaccagcucaucaugaagaaccaccuccgcgacaucaugggcauccccuacugcaacuacuccaaguacugguaccucaaccacaccaucaccggccgcaccucccucccccgcugcuggcucgucuccaacggcuccuaccucaacgagacccacuucuccgacgacaucgagcagcaggccgacaacaugaucaccgagaugcuccagaaggaguacaucgaccgccagggcaagaccccccucggccucgucgaccucuucgucuucuccaccuccuucuaccucaucuccaucuuccuccaccucgucaagauccccacccaccgccacaucgucggcaaguccugccccaagccccaccgccucaaccacaugggcaucugcuccugcggccucuacaagcgccccggcgucuccguccgcuggaagcgcuga

SEQ ID NO: 847 - RNA, 1473 nt, Artificial Sequence
  derived and/or modified protein sequence (opt2) from LASV(Lassa virus/H.sapiens-wt/NGA/2016/ISTH_1006;Clade II)__AVO03643__GPC
augggccagaucaucaccuucuuccaggaggucccccacgucaucgaggaggucaugaacaucguccucaucgcccucucccuccucgccauccucaagggcaucuacaacgucgccaccugcggccucuucggccucgucgccuuccuccuccucugcggccgcuccugcuccaccaccuacaagggcgucuacgagcuccagacccucgagcucgacauggccucccucaacaugaccaugccccucuccugcaccaagaacaacucccaccacuacaucauggucggcaacgagaccggccucgagcucacccucaccaacaccuccaucaucaaccacaaguucugcaaccucuccgacgcccacaagaagaaccucuacgaccacgcccucauguccaucaucuccaccuuccaccucuccauccccaacuucaaccaguacgaggccaugggcugcgacuucaacggcggcaagaucuccguccaguacaaccucucccacuccuacgccgucgacgccgccaaccacugcggcaccaucgccaacggcguccuccagaccuucaugcgcauggccuggggcggcuccuacaucgcccucgacuccggcaagggcuccugggacugcaucaugaccuccuaccaguaccucaucauccagaacaccaccugggaggaccacugccaguucucccgccccucccccaucggcuaccucggccuccucucccagcgcacccgcgacaucuacaucucccgccgccuccucggcaccuucaccuggacccucuccgacuccgagggcaacgagacccccggcggcuacugccucacccgcuggaugcucaucgaggccgagcucaagugcuucggcaacaccgccgucgccaagugcaacgagaagcacgacgaggaguucugcgacaugcuccgccucuucgacuucaacaagcaggccauccgccgccucaagaccgaggcccagauguccauccagcucaucaacaaggccgucaacgcccucaucaacgaccagcucaucaugaagaaccaccuccgcgacaucaugggcauccccuacugcaacuacuccaaguacugguaccucaaccacaccgucaccggccgcaccucccucccccgcugcuggcucgucuccaacggcuccuaccucaacgagacccacuucuccgacgacaucgagcagcaggccgacaacaugaucaccgagcuccuccagaaggaguacauggaccgccagggcaagaccccccucggccucgucgaccucuucgucuucuccaccuccuucuaccucaucuccaucuuccuccaccucaucaagauccccacccaccgccacgucaucggcaagcccugccccaagccccaccgccucaaccacaugggcaucugcuccugcggccucuacaagcaccccggcguccccgucaaguggaagcgcuga

SEQ ID NO: 848 - RNA, 1473 nt, Artificial Sequence
  derived and/or modified protein sequence (opt2) from LASV(Lassa virus/H.sapiens-wt/NGA/2016/ISTH_1026;Clade II)__AVO03589__GPC
augggccagaucaucaccuucuuccaggaggucccccacgucaucgaggaggucaugaacaucguccucaucgcccucucccuccucgccauccucaagggcaucuacaacgucgccaccugcggccucuucggccucgucuccuuccuccuccucugcggccgcuccugcuccaccaccuacaagggcgucuacgagcuccagacccucgagcucgacauggccucccucaacaugaccaugccccucuccugcaccaagaacaacucccaccacuacaucauggucggcaacgagaccggccucgagcucacccucaccaacaccuccaucaucaaccacaaguucugcaaccucuccgacgcccacaagaagaaccucuacgaccacgcccucauguccaucaucuccaccuuccaccucuccauccccaacuucaaccaguacgaggccauguccugcgacuucaacggcggcaagaucuccguccaguacaaccucucccacgccuacgccaucgacgccgccucccacugcggcaccaucgccaacggcguccuccagaccuucaugcgcauggccuggggcggcuccuacaucgcccucgacuccggcaagggcuccugggacugcaucaugaccuccuaccaguaccucaucauccagaacaccaccugggaggaccacugccaguucucccgccccucccccaucggcuaccucggccuccucucccagcgcacccgcgacaucuacaucucccgccgccuccucggcaccuucaccuggacccucuccgacuccgagggcaacgagacccccggcggcuacugccucacccgcuggaugcucaucgaggccgagcucaagugcuucggcaacaccgccgucgccaagugcaacgagaagcacgacgaggaguucugcgacaugcuccgccucuucgacuucaacaagcaggccauccgccgccucaagaccgaggcccagauguccauccagcucaucaacaaggccgucaacgcccucaucaacgaccagcucaucaugaagaaccaccuccgcgacaucaugggcauccccuacugcaacuacuccaaguacugguaccucaaccacaccgucaccggcaagaccucccucccccgcugcuggcucgucuccaacggcuccuaccucaacgagacccacuucuccgacgacaucgagcagcaggccgacaacaugaucaccgagcuccuccagaaggaguaccucgaccgccagggcaagaccccccucggccucgucgaccucuucgucuucuccaccuccuucuaccucaucuccaucuuccuccaccucgucaagauccccacccaccgccacgucaucggccgccccugccccaagccccaccgccucaaccacaugggcaucugcuccugcggccucuacaagcaccccggcguccccgucaaguggaagcgcuga

SEQ ID NO: 849 - RNA, 1473 nt, Artificial Sequence
  derived and/or modified protein sequence (opt2) from LASV(Lassa virus/H.sapiens-wt/NGA/2016/ISTH_1070;Clade II)__AVO03651__GPC
augggccagaucaucaccuucuuccaggaggucccccacgucaucgaggaggucaugaacaucguccucaucgcccucucccuccucgccauccucaagggcaucuacaacgucgccaccugcggccucuucggccucgucuccuuccuccuccucugcggccgcuccugcuccaccaccuacaagggcgucuacgagcuccagacccucgagcucgacauggccucccucaacaugaccaugccccucuccugcaccaagaacaacucccaccacuacaucauggucggcaacgagaccggccucgagcucacccucaccaacaccuccaucaucaaccacaaguucugcaaccucuccgacgcccacaagaagaaccucuacgaccacgcccucauguccaucaucuccaccuuccaccucuccauccccaacuucaaccaguacgaggccauguccugcgacuucaacggcggcaagaucuccguccaguacaaccucucccacaccuucgccgucgacgccgccaaccacugcggcaccaucgccaacggcguccuccagaccuucaugcgcauggccuggggcggcuccuacaucgcccucgacuccggcaagggcuccugggacugcaucaugaccuccuaccaguaccucaucauccagaacaccaccugggaggaccacugccaguucucccgccccucccccaucggcuaccucggccuccucucccagcgcacccgcgacaucuacaucucccgccgccuccucggcaccuucaccuggacccucuccgacuccgagggcaacgagacccccggcggcuacugccucacccgcuggaugcucaucgaggccgagcucaagugcuucggcaacaccgccgucgccaagugcaacgagaagcacgacgaggaguucugcgacaugcuccgccucuucgacuucaacaagcaggccauccgccgccucaagaccgaggcccagauguccauccagcucaucaacaaggccgucaacgcccucaucaacgaccagcucaucaugaagaaccaccuccgcgacaucaugggcauccccuacugcaacuacuccaaguacugguaccucaaccacaccgucaccggcaagaccucccucccccgcugcuggcucgucuccaacggcuccuaccucaacgagacccacuucuccgacgacaucgagcagcaggccgacaacaugaucaccgagcuccuccagaaggaguacauggaccgccagggcaagaccccccucggccucgucgaccucuucgucuucuccaccuccuucuaccucaucuccaucuuccuccaccucgucaagauccccacccaccgccacaucaucggcaagcccugccccaagccccaccgccucaaccacaugggcaucugcuccugcggccucuacaagcaccccggcguccccgucaaguggaagcgcuga

SEQ ID NO: 850 - RNA, 1473 nt, Artificial Sequence
  derived and/or modified protein sequence (opt2) from LASV(Lassa virus/H.sapiens-wt/NGA/2016/ISTH_1123;Clade II)__AVO03645__GPC
augggccagaucaucaccuucuuccaggaggucccccacgucaucgaggaggucaugaacaucguccucaucgcccucucccuccucgccauccucaagggcaucuacaacgucgccaccugcggccucuucggccucgucuccuuccuccuccucugcggccgcuccugcuccaccaccuacaagggcgucuacgagcuccagacccucgagcucgacaugggcucccucaacaugaccaugccccucuccugcaccaagaacaacucccaccacuacaucauggucggcaacgagaccggccucgagcucacccucaccaacaccuccaucaucaaccacaaguucugcaaccucuccgacgcccacaagaagaaccucuacgaccacgcccucauguccaucaucuccaccuuccaccucuccauccccaacuucaaccaguacgaggccauguccugcgacuucaacggcggcaagaucuccguccaguacaaccucucccacgccuacgccgucgacgccgccaaccacugcggcaccaucgccaacggcguccuccagaccuucaugcgcauggccuggggcggcuccuacaucgcccucgacuccggcaagggcuccugggacugcaucaugaccuccuaccaguaccucaucauccagaacaccuccugggaggaccacugccaguucucccgccccucccccaucggcuaccucggccuccucucccagcgcacccgcgacaucuacaucucccgccgccuccucggcaccuucaccuggacccucuccgacuccgagggcaacgagacccccggcggcuacugccucacccgcuggaugcucaucgaggccgagcucaagugcuucggcaacaccgccgucgccaagugcaacgagaagcacgacgaggaguucugcgacaugcuccgccucuucgacuucaacaagcaggccauccgccgccucaagaccgaggcccagauguccauccagcucaucaacaaggccgucaacgcccucaucaacgaccagcucaucaugaagaaccaccuccgcgacaucaugggcauccccuacugcaacuacuccaaguacugguaccucaaccacaccgucaccggcaagaccucccucccccgcugcuggcucgucuccaacggcuccuaccucaacgagacccacuucuccgacgacaucgagcagcaggccgacaacaugaucaccgagcuccuccagaaggaguacaucgaccgccagggcaagaccccccucggccucgucgaccucuucgucuucuccaccuccuucuaccucaucuccaucuuccuccaccucgucaagauccccacccaccgccacgucaucggcaagcccugccccaagccccaccgccucaaccacaugggcaucugcuccugcggccucuacaagcaccccggcguccccgucaaguggaagcgcuga

SEQ ID NO: 851 - RNA, 1473 nt, Artificial Sequence
  derived and/or modified protein sequence (opt2) from LASV(Lassa virus/H.sapiens-wt/NGA/2016/ISTH_1150;Clade II)__AVO03627__GPC
augggccaggucaucaccuucuuccaggagaucccccacgucaucgaggaggucaugaacaucguccucaucacccucucccuccucgccauccucaagggcaucuacaacgucgccaccugcggccucuucggccucaucuccuuccuccuccucugcggccgcuccugcuccaccaccuacaagggcgucuacgagcuccagacccucgagcucgacauggccaaccucaacaugaccaugccccucuccugcaccaagaacuccucccaccacuacaucauggucggcaacgagaccggccucgagcucacccucaccaacaccuccaucaucaaccacaaguucugcaaccucuccgacgcccacaagaagaaccucuacgaccacgcccucauguccaucaucuccaccuuccaccucuccauccccaacuucaaccaguacgaggccauguccugcgacuucaacggcggcaagaucuccguccaguacaaccucucccacgccuacgccgucgacgccgccaaccacugcggcaccaucgccaacggcguccuccagaccuucaugcgcauggccuggggcggcuccuacaucgcccucgacuccggcaagggcaacugggacugcaucaugaccuccuaccaguaccucaucauccagaacaccaccugggaggaccacugccaguucucccgccccucccccaucggcuaccucggccuccucucccagcgcacccgcgacaucuacaucucccgccgccuccucggcaccuucaccuggacccucuccgacuccgagggcaacgaggcccccggcggcuacugccucacccgcuggaugcucaucgaggccgagcucaagugcuucggcaacaccgccaucgccaagugcaacgagaagcacgacgaggaguucugcgacaugcuccgccucuucgacuucaacaagcaggccauccgccgccucaagaccgaggcccagaaguccauccagcucaucaacaaggccgucaacgcccucaucaacgaccagcucaucaugaagaaccaccuccgcgacaucaugggcauccccuacugcaacuacuccaaguacugguaccucaaccacaccgucaccggcaagaccucccuccccaagugcuggcucaucuccaacggcuccuaccucaacgagacccacuucuccgacgacaucgagcagcaggccgacaacaugaucaccgagcuccuccagaaggaguacauggaccgccagggcaagaccccccucggccucgucgaccucuucgucuucuccaccuccuucuaccucaucuccaucuuccuccaccucgucaagauccccacccaccgccacaucgucggccgccccugccccaagccccaccgccucaaccacaugggcaucugcuccugcggccucuacaagcaccccggcguccccgucaaguggaagcgcuga

SEQ ID NO: 852 - RNA, 1473 nt, Artificial Sequence
  derived and/or modified protein sequence (opt2) from LASV(Lassa virus/H.sapiens-wt/NGA/2016/ISTH_1174;Clade II)__AVO03555__GPC
augggccagaucaucaccuucuuccaggaggucccccacgucaucgaggaggucaugaacaucguccucaucgcccucucccuccucgccauccucaagggcaucuacaacgucgccaccugcggcuucuucggccucgucuccuuccuccuccucugcggccgcuccugcuccaccaucuacaagggcgucuacgagcuccagacccucgagcucgacauggccucccucaacaugaccaugccccucuccugcaccaagaacaacucccaccacuacaucauggucggcaacgagaccggccucgagcucacccucaccaacaccuccaucaucaaccacaaguucugcaaccucuccgacgcccacaagaagaaccucuacgaccacgcccucauguccaucaucuccaccuuccaccucuccaucccccacuucaaccaguacgaggccauguccugcgacuucaacggcggcaagaucuccguccaguacaaccucucccacaccuacgccgucgacgccgccaaccacugcggcaccaucgccaacggcguccuccagaccuucaugcgcauggccuggggcggcuccuacaucgcccucgacuccggcaagggcuccugggacugcaucaugaccuccuaccaguaccucaucauccagaacaccaccugggaggaccacugccaguucucccgccccucccccaucggcuaccucggccuccucucccagcgcacccgcgacaucuacaucucccgccgccuccucggcaccuucaccuggacccucuccgacuccgagggcaacgagacccccggcggcuacugccucacccgcuggaugcucaucgaggccgagcucaagugcuucggcaacaccgccgucgccaagugcaacgagaagcacgacgaggaguucugcgacaugcuccgccucuucgacuucaacaagcaggccauccgcaagcucaagaccgaggcccagauguccauccagcucaucaacaaggccgucaacgcccucaucaacgaccagcucaucaugaagaaccaccuccgcgacaucaugggcauccccuacugcaacuacuccaaguacugguaccucaaccacaccgucaccggcaagaccucccucccccgcugcuggcucgucuccaacggcuccuaccucaacgagacccacuucuccgacgacaucgagcagcaggccgacaacaugaucaccgagcuccuccagaaggaguacauggaccgccagggcaagaccccccucggccucgucgaccucuucgucuucuccaccuccuucuaccucaucuccaucuuccuccaccucgucaagauccccacccaccgccacgucaucggcaagcccugccccaagccccaccgccucaaccacaugggcaucugcuccugcggccucuacaagcaccccggcguccccgucaaguggaagcgcuga

SEQ ID NO: 853 - RNA, 1473 nt, Artificial Sequence
  derived and/or modified protein sequence (opt2) from LASV(Lassa virus/H.sapiens-wt/NGA/2016/ISTH_1207;Clade II)__AVO03599__GPC
augggccagaucaucaccuucuuccaggaggucccccacgucaucgaggaggucaugaacaucguccucaucgcccucucccuccucgccauccucaagggcaucuacaacgucgccaccugcggccucuucggccucgucuccuuccuccuccucugcggccgcuccugcuccaccaccuacaagggcgucuacgagcuccagacccucgagcucgacaugaccucccucaacaugaccaugccccucuccugcaccaagaacaacucccaccacuacaucauggucggcaacgagaccggccucgagcucacccucaccaacaccuccaucaucaaccacaaguucugcaaccucuccgacgcccacaagaagaaccucuacgaccacgcccucauguccaucaucuccaccuuccaccucuccauccccaacuucaaccaguacgaggccauguccugcgacuucaacggcggcaagaucuccguccaguacaaccucucccacaccuacgccgucgacgccgccaaccacugcggcaccaucgccaacggcguccuccagaccuucaugcgcauggccuggggcggcuccuacaucgcccucgacuccggcaagggcuccugggacugcaucaugaccuccuaccaguaccucaucauccagaacaccaccugggaggaccacugccaguucucccgccccucccccaucggcuaccucggccuccucucccagcgcacccgcgacaucuacaucucccgccgccuccucggcaccuucaccuggacccucuccgacuccgagggcaacgacacccccggcggcuacugccucacccgcuggaugcucaucgaggccgagcucaagugcuucggcaacaccgccgucgccaagugcaacgagaagcacgacgaggaguucugcgacaugcuccgccucuucgacuucaacaagcaggccauccgccgccucaagaccgaggcccagauguccauccagcucaucaacaaggccgucaacgcccucaucaacgaccagcucaucaugaagaaccaccuccgcgacaucaugggcauccccuacugcaacuacuccaaguacugguaccucaaccacaccgucaccggcaagaccucccucccccgcugcuggcucgucuccaacggcuccuaccucaacgagacccacuucuccgacgacaucgagcagcaggccgacaacaugaucaccgagcuccuccagaaggaguacaucgaccgccagggcaagaccccccucggccucgucgaccucuucgucuucuccaccuccuucuaccucaucuccaucuuccuccaccucgucaagauccccacccaccgccacgucaucggcaagcccugccccaagccccaccgccucaaccacaugggcaucugcuccugcggccucuacaagcaccccggcguccccgucaaguggaagcgcuga

SEQ ID NO: 854 - RNA, 1473 nt, Artificial Sequence
  derived and/or modified protein sequence (opt2) from LASV(Lassa virus/H.sapiens-wt/NGA/2016/ISTH_1306;Clade II)__AVO03623__GPC
augggccagaucaucaccuucuuccaggaggucccccacgucaucgaggaggucaugaacaucguccucaucgcccucucccuccucgccauccucaagggcaucuacaacgucgccaccugcggccucuucggccucgucuccuuccuccuccucugcggccgcuccugcuccaccaccuacaagggcgucuacgagcuccagacccucgagcucgacauggccucccucaacaugaccaugccccucuccugcaccaagaacaacucccaccacuacaucauggucggcaacgagaccggccucgagcucacccucaccaacaccuccaucaucaaccacaaguucugcaaccucuccgacgcccacaagaagaaccucuacgaccacgcccucauguccaucaucuccaccuuccaccucuccauccccaacuucaaccaguacgaggccauguccugcgacuucaacggcggcaagaucuccguccaguacaaccucucccacaccuacgccgucgacgccgccaaccacugcggcaccgucgccaacggcguccuccagaccuucaugcgcauggccuggggcggcuccuacaucgcccucgacuccggcaagggcuccugggacugcaucaugaccuccuaccaguaccucaucauccagaacaccaccugggaggaccacugccaguucucccgccccucccccaucggcuaccucggccuccucucccagcgcacccgcgacaucuacaucucccgccgccuccucggcaccuucaccuggacccucuccgacuccgagggcaacgagacccccggcggcuacugccucacccgcuggaugcucaucgaggccgagcucaagugcuucggcaacaccgccgucgccaagugcaacgagaagcacgacgaggaguucugcgacaugcuccgccucuucgacuucaacaagcaggccauccgccgccucaagaccgaggcccagauguccauccagcucaucaacaaggccgucaacgcccucaucaacgaccagcucaucaugaagaaccaccuccgcgacaucaugggcauccccuacugcaacuacuccaaguacugguaccucaaccacaccgucaccggccgcaccucccucccccgcugcuggcucgucuccaacggcuccuaccucaacgagacccacuucuccgacgacaucgagcagcaggccgacaacaugaucaccgagcuccuccagaaggaguacaucgaccgccagggcaagaccccccucggccucgucgaccucuucgucuucuccaccuccuucuaccucaucuccaucuuccuccaccucgucaagauccccacccaccgccacgucaucggcaagcccugccccaagccccaccgccucaaccacaugggcaucugcuccugcggccucuacaagcaccccggcguccccgucaaguggaagcgcuga

SEQ ID NO: 855 - RNA, 1473 nt, Artificial Sequence
  derived and/or modified protein sequence (opt2) from LASV(Lassa virus/H.sapiens-wt/NGA/2016/ISTH_1311;Clade II)__AVO03575__GPC
augggccagaucgucaccuucuuccaggaggucccccacgucaucgaggaggucaugaacaucguccucaucgcccucucccuccucgccauccucaagggcaucuacaacgucgccaccugcggccucuucggccucaucuccuuccuccuccucugcggccgcuccugcuccaccaccuacaagggcgucuacgagcuccagacccucgagcucgacauggccaaccucaacaugaccaugccccucuccugcaccaagaacaacucccaccacuacaucauggucggcaacgagaccggccucgagcucacccucaccaacaccuccaucaucaaccacaaguucugcaaccucuccgacgcccacaagaagaaccucuacgaccacgcccucauguccaucaucuccaccuuccaccucuccauccccaacuucaaccaguacgaggccauguccugcgacuucaacggcggcaagaucuccguccaguacaaccucucccacgccuacgccggcgacgccgccucccacugcggcaccaucgccaacggcguccuccagaccuucaugcgcauggccuggggcggcuccuacaucgcccucgacuccggcaagggcaacugggacugcaucaugaccuccuaccaguaccucaucauccagaacaccaccugggaggaccacugccaguucucccgccccucccccaucggcuaccucggccuccucucccagcgcacccgcgacaucuacaucucccgccgccuccucggcaccuucaccuggacccucuccgacuccgagggcaacgacgcccccggcggcuacugccucacccgcuggaugcucaucgaggccgagcucaagugcuucggcaacaccgccaucgccaagugcaacgagaagcacgacgaggaguucugcgacaugcuccgccucuucgacuucaacaagcaggccaucaagcgccucaagaccgaggcccagauguccauccagcucaucaacaaggccgucaacgcccucaucaacgaccagcucaucaugaagaaccaccuccgcgacaucaugggcauccccuacugcaacuacuccaaguacugguaccucaaccacaccaccaccggcaagaccucccuccccaagugcuggcucaucuccaacggcuccuaccucaacgagacccacuucuccgacgacaucgagcagcaggccgacaacaugaucaccgagcuccuccagaaggaguaccucgaccgccagggcaagaccccccucggccucgucgaccucuucgucuucuccaccuccuucuaccucaucuccaucuuccuccaccucaucaagauccccacccaccgccacaucgucggccgccccugccccaagccccaccgccucaaccacaugggcaucugcuccugcggccucuacaagcaccccggcguccccgucaaguggaagcgcuga

SEQ ID NO: 856 - RNA, 1473 nt, Artificial Sequence
  derived and/or modified protein sequence (opt2) from LASV(Lassa virus/H.sapiens-wt/NGA/2016/ISTH_1423;Clade II)__AVO03577__GPC
augggccagaucgucaccuucuuccaggaggucccccacgucaucgaggaggucaugaacaucguccucaucgcccucucccuccucgccauccucaagggcaucuacaacgucgccaccugcggccucuucggccucgucuccuuccuccuccucugcggccgcuccugcuccaccaccuacaagggcgucuacgagcuccagacccucgagcucgacauggccaaccucaacaugaccaugccccucuccugcaccaagaacaacucccaccacuacaucauggucggcaacgagaccggccucgagcucacccucaccaacaccuccaucaucaaccacaaguucugcaaccucuccgacgcccacaagaagaaccucuacgaccacgcccucauguccaucaucuccaccuuccaccucuccauccccaacuucaaccaguacgaggccauguccugcgacuucaacggcggcaagaucuccguccaguacaaccucucccacuccuacgccgucgacgccgccaaccacugcggcaccgucgccaacggcguccuccagaccuucaugcgcauggccuggggcggcuccuacaucgcccucgacuccggcaagggcuccugggacugcaucaugaccuccuaccaguaccucaucauccagaacaucaccugggaggaccacugccaguucucccgccccucccccaucggcuaccucggccuccucucccagcgcacccgcgacaucuacaucucccgccgccuccucggcaccuucaccuggacccucuccgacuccgagggcaaggagacccccggcggcuacugccucacccgcuggaugcucaucgaggccgagcucaagugcuucggcaacaccgccgucgccaagugcaacgagaagcacgacgaggaguucugcgacaugcuccgccucuucgacuucaacaagcaggccauccgccgccucaagaccgaggcccagauguccauccagcucaucaacaaggccgucaacgcccucaucaacgaccagcucaucaugaagaaccaccuccgcgacaucaugggcauccccuacugcaacuacuccaaguacugguaccucaaccacaccgucaccggcaagaccucccucccccgcugcuggcucgucuccaacggcuccuaccucaacgagacccacuucuccgacgacaucgagcagcaggccgacaacaugaucaccgagcuccuccagaaggaguacaucgaccgccagggcaagaccccccucggccucgucgaccucuucgucuucuccaccuccuucuaccucaucuccaucuuccuccaccucgucaagauccccacccaccgccacauccucggcaagcccugccccaagccccaccgccucaaccacaugggcaucugcuccugcggccucuacaagcaccccggcguccccgucaaguggaagcgcuga

SEQ ID NO: 857 - RNA, 1473 nt, Artificial Sequence
  derived and/or modified protein sequence (opt2) from LASV(Lassa virus/H.sapiens-wt/NGA/2016/ISTH_1462;Clade II)__AVO03587__GPC
augggccagaucaucaccuucuuccaggaggucccccacgucaucgaggaggucaugaacaucguccucaucgcccucucccuccucgccauccucaagggcaucuacaacgucgccaccugcggccucuucggccucgucuccuuccuccuccucugcggccgcuccugcuccaccaccuacaagggcgucuacgagcuccagacccucgagcucgacauggccucccucaacaugaccaugccccucuccugcaccaagaacaacucccaccacuacaucauggucggcaacgagaccggccucgagcucacccucaccaacaccuccaucaucaaccacaaguucugcaaccucuccgacgcccacaagaagaaccucuacgaccacgcccucauguccaucaucuccaccuuccaccucuccauccccaacuucaaccaguacgaggccauguccugcgacuucaacggcggcaagaucuccguccaguacaaccucucccacaccuacgccgucgacgccgccaaccacugcggcaccaucgccaacggcguccuccagaccuucaugcgcauggccuggggcggcuccuacaucgcccucgacuccggcaagggcuccugggacugcaucaugaccuccuaccaguaccucaucauccagaacaccaccugggaggaccacugccaguucucccgccccucccccaucggcuaccucggccuccucucccagcgcacccgcgacaucuacaucucccgccgccuccucggcaccuucaccuggacccucuccgacuccgagggcaacgagacccccggcggcuacugccucacccgcuggaugcucaucgaggccgagcucaagugcuucggcaacaccgccgucgccaagugcaacgagaagcacgacgaggaguucugcgacaugcuccgccucuucgacuucaacaagcaggccauccgccgccucaagaccgaggcccagauguccauccagcucaucaacaaggccgucaacgcccucaucaacgaccagcucaucaugaagaaccaccuccgcgacaucaugggcauccccuacugcaacuacuccaaguacugguaccucaaccacaccgucaccggccgcaccucccucccccgcugcuggcucgucuccaacggcuccuaccucaacgagacccacuucuccgacgacaucgagcagcaggccgacaacaugaucaccgagcuccuccagaaggaguacaucgagcgccagggcaagaccccccucggccucgucgaccucuucgucuucuccaccuccuucuaccucaucuccaucuuccuccaccucaucaagauccccacccaccgccacgucaucggcaagcccugccccaagccccaccgccucaaccacaugggcaucugcuccugcggccucuacaagcaccccggcguccccgucaaguggaagcgcuga

SEQ ID NO: 858 - RNA, 1473 nt, Artificial Sequence
  derived and/or modified protein sequence (opt2) from LASV(Lassa virus/H.sapiens-wt/NGA/2016/ISTH_1472;Clade II)__AVO03605__GPC
augggccagaucaucaccuucuuccaggaggucccccacgucaucgaggaggucaugaacaucguccucaucgcccucucccuccucgccauccucaagggcaucuacaacgucgccaccugcggccucuucggccucgucuccuuccuccuccucugcggccgcuccugcuccaccaccuacaagggcgucuacgagcuccagacccucgagcucgacauggccucccucaacaugaccaugccccucuccugcaccaagaacaacucccaccacuacaucauggucggcaacgagaccggccucgagcucacccucaccaacaccuccaucaucaaccacaaguucugcaaccucuccgacgcccacaagaagaaccucuacgaccacgcccucauguccaucaucuccaccuuccaccucuccauccccaacuucaaccaguacgaggccauguccugcgacuucaacggcggcaagaucuccguccaguacaaccucucccacaccuacgccgucgacgccgccaaccacugcggcaccaucgccaacggcguccuccagaccuucaugcgcauggccuggggcggcuccuacaucgcccucgacuccggcaagggcuccugggacugcaucaugaccuccuaccaguaccucaucauccagaacaccaccugggaggaccacugccaguucucccgccccucccccaucggcuaccucggccuccucucccagcgcacccgcgacaucuacaucucccgccgccuccucggcaccuucaccuggacccucuccgacuccgagggcaacgagacccccggcggcuacugccucacccgcuggaugcucaucgaggccgagcucaagugcuucggcaacaccgccgucgccaagugcaacgagaagcacgacgaggaguucugcgacaugcuccgccucuucgacuucaacaagcaggccauccgccgccucaagaccgaggcccagauguccauccagcucaucaacaaggccgucaacgcccucaucaacgaccagcucaucaugaagaaccaccuccgcgacaucaugggcauccccuacugcaacuacuccaaguacugguaccucaaccacaccgucaccggccgcaccucccucccccgcugcuggcucgucuccaacggcuccuaccucaacgagacccacuucuccgacgacaucgagcagcaggccgacaacaugaucaccgagcuccuccagaaggaguacaucgaccgccagggcaagaccccccucggccucgucgaccucuucgucuucuccaccuccuucuaccucaucuccaucuuccuccaccucaucaagauccccacccaccgccacgucaucggcaagcccugccccaagccccaccgccucaaccacaugggcaucugcuccugcggccucuacaagcaccccggcguccccgucaaguggaagcgcuga

SEQ ID NO: 859 - RNA, 1473 nt, Artificial Sequence
  derived and/or modified protein sequence (opt2) from LASV(Lassa virus/H.sapiens-wt/NGA/2016/ISTH_1474;Clade II)__AVO03613__GPC
augggccagaucaucaccuucuuccaggaggucccccacgucaucgaggaggucaugaacaucguccucaucgcccucucccuccucgccauccucaagggcaucuacaacgucgccaccugcggccucuucggccucgucuccuuccuccuccucugcggccgcuccugcuccaccaccuacaagggcgucuacgagcuccagacccucgagcucgacauggccucccucaacaugaccaugccccucuccugcaccaagaacaacucccaccacuacaucauggucggcaacgagaccggccucgagcucacccucaccaacaccuccaucauccaccacaaguucugcaaccucuccgacgcccacaagaagaaccucuacgaccacgcccucauguccaucaucuccaccuuccaccucuccauccccaacuucaaccaguacgaggccauguccugcgacuucaacggcggcaagaucuccguccaguacaaccucucccacaccuacgccgucgacgccgccaaccacugcggcaccaucgccaacggcguccuccagaccuucaugcgcauggccuggggcggcuccuacaucgcccucgacuccggcaagggcuccugggacugcaucaugaccuccuaccaguaccucaucauccagaacaccaccugggaggaccacugccaguucucccgccccucccccaucggcuaccucggccuccucucccagcgcacccgcgacaucuacaucucccgccgccuccucggcaccuucaccuggacccucuccgacuccgagggcaacgagacccccggcggcuacugccucacccgcuggaugcucaucgaggccgagcucaagugcuucggcaacaccgccgucgccaagugcaacgagaagcacgacgaggaguucugcgacaugcuccgccucuucgacuucaacaagcaggccauccgccgccucaagaccgaggcccagauguccauccagcucaucaacaaggccgucaacgcccucaucaacgaccagcucaucaugaagaaccaccuccgcgacaucaugggcauccccuacugcaacuacuccaaguacugguaccucaaccacaccgucaccggccgcaccucccucccccgcugcuggcucgucuccaacggcuccuaccucaacgagacccacuucuccgacgacaucgagcagcaggccgacaacaugaucaccgagcuccuccagaaggaguacaucgaccgccagggcaagaccccccucggccucgucgaccucuucgucuucuccaccuccuucuaccucaucuccaucuuccuccaccucaucaagauccccacccaccgccacgucaucggcaagcccugccccaagccccaccgccucaaccacaugggcaucugcuccugcggccucuacaagcaccccggcguccccgucaaguggaagcgcuga

SEQ ID NO: 860 - RNA, 1476 nt, Artificial Sequence
  derived and/or modified protein sequence (opt2) from LASV(Lassa virus/H.sapiens-wt/NGA/2016/ISTH_1496;Clade II)__AVO03579__GPC
augggccagaucaucaccuucuuccaggaggucccccacgucaucgaggaggucaugaacaucguccucaucgcccucucccuccucgccauccucaagggcgucuacaacgucgccaccugcggccucuucggccucgucuccuuccuccuccucugcggccgcuccugcuccaccaccaucuacaagggcgucuacgagcuccagacccucgagcucgacauggccucccucaacaugaccaugccccucuccugcaccaagaacaacucccaccacuacaucauggucggcaacgagaccggccucgagcucacccucaccaacaccuccaucaucaaccacaaguucugcaaccucuccgacgcccacaagaagaaccucuacgaccacgcccucauguccaucaucuccaccuuccaccucuccauccccaacuucaaccaguacgaggccauguccugcgacuucaacggcggcaagaucuccguccaguacaaccucucccacgccuacgccgucgacgccgccaaccacugcggcaccaucgccaacggcguccuccagaccuucaugcgcauggccuggggcggcuccuacaucgcccucgacuccggcaagcgcuccugggacugcaucaugaccuccuaccaguaccucaucauccagaacaccaccugggaggaccacugccaguucucccgccccucccccaucggcuaccucggccuccucucccagcgcacccgcgacaucuacaucucccgccgccuccucggcaccuucaccuggacccucuccgacuccgagggcaacgagacccccggcggcuacugccucacccgcuggaugcucaucgaggccgagcucaagugcuucggcaacaccgccgucgccaagugcaacgagaagcacgacgaggaguucugcgacaugcuccgccucuucgacuucaacaagcaggccauccgccgccucaagaccgaggcccagauguccauccagcucaucaacaaggccgucaacgcccucaucaacgaccagcucaucaugaagaaccaccuccgcgacaucaugggcauccccuacugcaacuacuccaaguacugguaccucaaccacaccgucaccggcaagaccucccucccccgcugcuggcucgucuccaacggcuccuaccucaacgagacccacuucuccgacgacaucgagcagcaggccgacaacaugaucaccgagcuccuccagaaggaguacaucgaccgccagggcaagaccccccucggccucgucgaccucuucgucuucuccaccuccuucuaccucaucuccaucuuccuccaccucgucaagauccccacccaccgccacgucaucggcaagcccugccccaagccccaccgccucaaccacaugggcaucugcuccugcggccucuacaagcaccccggcguccccgucaaguggaagcgcuga

SEQ ID NO: 861 - RNA, 1473 nt, Artificial Sequence
  derived and/or modified protein sequence (opt2) from LASV(Lassa virus/H.sapiens-wt/NGA/2016/ISTH_1541;Clade II)__AVO03553__GPC
augggccagaucgucaccuucuuccaggaggucccccacgucaucgaggagaucaugaacaucguccucaucacccucucccuccucgccguccucaagggcaucuacaacuucgccaccugcggccucaucggccucaucaccuuccucuuccucugcggccgcuccugcuccaccaucuacaagggcaacuaccagcuccagacccucgagcucaacauggagacccucaacaugaccaugccccucuccugcaccaagaacaacucccaccacuacauccgcgucggcaacgagaccggccucgagcucacccucaccaacgucuccaucaucaaccaccgcuucugcaaccucuccgacgcccacaagcgcaaccucuacgaccacacccucauguccaucaucuccaccuuccaccucuccauccccaacuucaaccaguacgaggccauguccugcgacuucaacggcggcaagaucuccguccaguacaaccucucccacggcuacgccgucgacgccgccaagcacugcggcaccgucgccaacggcguccuccagaccuucaugcgcauggccuggggcggcuccuacaucgcccucgacuccggcaagggcaacugggacugcaucaugaccuccuaccaguaccucaucauccagaacaccaccugggaggaccacugccaguucucccgccccucccccaucggcuaccucggccuccucucccagcgcacccgcgacaucuacaucucccgccgccuccucggcaccuucaccuggacccucuccgacuccgagggccgcgagacccccggcggcuacugccucacccgcuggaugcucaucgaggccgagcucaagugcuucggcaacaccgccgucgccaagugcaacgagaagcacgacgaggaguucugcgacaugcuccgccucuucgacuucaacaagcaggccauccagcgccucaagaccgaggcccagauguccauccagcucaucaacaaggccgucaacgcccucaucaacgaccagcucaucaugaagaaccaccuccgcgacaucaugggcauccccuacugcaacuacuccaaguacugguaccucaaccacaccaccaccggcaagaccucccuccccaagugcuggcucgucaccaacggcuccuaccucaacgagacccacuucuccgacgacaucgagcagcaggccgacaacaugaucaccgagaugcuccagaaggaguacaucgaccgccagggcaagaccccccucggccucgucgaccucuucgucuucuccaccuccuucuaccucaucuccaucuuccuccaccucaucaagauccccaaccaccgccacaucgucggcaagcccugccccaagccccaccgccucaaccacaugggcaucugcuccugcggcuucuacaagcagcccggcguccccguccgcuggaagcgcuga

SEQ ID NO: 862 - RNA, 1473 nt, Artificial Sequence
  derived and/or modified protein sequence (opt2) from LASV(Lassa virus/H.sapiens-wt/NGA/2016/ISTH_1546;Clade II)__AVO03537__GPC
augggccagaucgucaccuucuuccaggagaucccccacgucgucgaggagaucaugaacaucguccucaucacccucucccuccucgccauccucaagggccucuacaacuucgccaccugcggccucaucggccucaucaccuuccucuuccucugcggccgcuccugcuccaccaucuacaagggcuccuaccagcuccaggcccucgagcucaacauggagacccucaacaugaccaugccccucuccugcaccaagaacaacucccaccacuacauccgcgucggcaacgagaccggccucgagcucacccucaccaacaccuccaucaucaaccacaaguucugcaaccucuccgacgcccacaagaagaaccucuacgaccacacccucauguccaucaucuccaccuuccaccucuccauccccaacuucaaccaguacgaggccauguccugcgacuucaacggcggcaagaucuccguccaguacaaccucucccacuccuacgccggcgacgccgcccgccacugcggcaccgucgccaacggcguccuccagaccuucaugcgcauggccuggggcggcuccuacaucgcccucgacuccggcaagggcaacugggacugcaucaugaccuccuaccaguaccucaucauccagaacaccaccugggaggaccacugccaguucucccgccccucccccaucggcuaccucggccuccucucccagcgcacccgcgacaucuacaucucccgccgccuccucggcaccuucaccuggacccucuccgacuccgagggcaaggagacccccggcggcuacugccucacccgcuggaugcucaucgaggccgagcucaagugcuucggcaacaccgccgucgccaagugcaacgagaagcacgacgaggaguucugcgacaugcuccgccucuucgacuucaacaagcaggccauccagcgccucaagaccgaggcccagauguccauccagcucaucaacaaggccgucaacgcccucaucaacgaccagcucaucaugaagaaccaccuccgcgacaucaugggcauccccuacugcaacuacuccaaguacugguaccucaaccacaccaccaccggcaagaccucccucccccgcugcuggcucgucuccaacggcuccuaccucaacgagacccacuucuccgacgacaucgagcagcaggccgacaacaugaucaccgagaugcuccagaaggaguacaucgaccgccagggcaagaccccccucggccucgucgaccucuucgucuucuccaccuccuucuaccucaucuccaucuuccuccaccucaucaagauccccacccaccgccacaucgucggcaaguccugccccaagccccaccgccucaaccacaugggcaucugcuccugcggccucuacaagcagcccggcguccccgucaaguggaagcgcuga

SEQ ID NO: 863 - RNA, 1473 nt, Artificial Sequence
  derived and/or modified protein sequence (opt2) from LASV(Lassa virus/H.sapiens-wt/NGA/2016/ISTH_1591;Clade II)__AVO03647__GPC
augggccagaucaucaccuucuuccaggaggucccccacgucaucgaggaggucaugaacaucguccucaucgcccucucccuccucgccauccucaagggcaucuacaacgucgccaccugcggccucuucggccucgucuccuuccuccuccucugcggccgcuccugcuccaccaccuacaagggcgucuacgagcuccagacccucgagcucgacauggccucccucaacaugaccaugccccucuccugcaccaagaacaacucccaccacuacaucauggucggcaacgagaccggccucgagcucacccucaccaacaccuccaucauccagcacaaguucugcaaccucuccgacgcccacaagaagaaccucuacgaccacgcccucauguccaucgucuccaccuuccaccucuccauccccaacuucaaccaguacgaggccauguccugcgacuucaacggcggcaagaucaccguccaguacaaccucucccacuccuacgccaucgacgccgccaaccacugcggcaccgucgccaacggcguccuccagaccuucaugcgcauggccuggggcggcuccuacaucgcccucgacuccggccgcggcuccugggacugcaucaugaccuccuaccaguaccucaucauccagaacaccaccugggaggaccacugccaguucucccgccccucccccaucggcuaccucggccuccucucccagcgcacccgcgacaucuacaucucccgccgccuccucggcaccuucaccuggacccucuccgacuccgagggcaacgagacccccggcggcuacugccucacccgcuggaugcucaucgaggccgagcucaagugcuucggcaacaccgccgucgccaagugcaacgagaagcacgacgaggaguucugcgacaugcuccgccucuucgacuucaacaagcaggccauccgccgccucaaggccgaggcccagauguccauccagcucaucaacaaggccgucaacgcccucaucaacgaccagcucaucaugaagaaccaccuccgcgacaucaugggcauccccuacugcaacuacuccaaguacugguaccucaaccacaccgucaccggccgcaccucccucccccgcugcuggcucgucuccaacggcuccuaccucaacgagacccacuucuccgacgacaucgagcagcaggccgacaacaugaucaccgagcuccuccagaaggaguacauggaccgccagggcaagaccccccucggccucgucgaccucuucgucuucuccaccuccuucuaccucaucuccaucuuccuccaccucgucaagauccccacccaccgccacaucaucggcaagcccugccccaagccccaccgccucaaccacaugggcgucugcuccugcggccucuacaagcaccccggcguccccgucaaguggaagcgcuga

SEQ ID NO: 864 - RNA, 1473 nt, Artificial Sequence
  derived and/or modified protein sequence (opt2) from LASV(Lassa virus/H.sapiens-wt/NGA/2016/ISTH_1604;Clade II)__AVO03541__GPC
augggccagaucgucaccuucuuccaggaggucccccacgucaucgaggagaucaugaacaucguccucaucacccucucccuccucgccauccucaagggcgucuacaaccucgccaccugcggccucaucggccucaucaccuuccucuuccucugcggccgcuccugcuccaugaccuacaagggcuccuaccagcucgagacccucgagcucaacauggagacccucaacaugaccaugccccucuccugcaccaagaacaccucccaccacuacauccgcgucggcaacgagaccggccucgagcucacccucaccaacaccuccaucaucaaccacaaguucugcaaccucuccgacgcccacaagaagaaccucuacgaccacucccucauguccaucgucuccaccuuccaccucuccauccccaacuucaaccaguacgaggccauguccugcgacuucaacggcggcaagaucuccauccaguacaaccucucccacgccuacgccggcgacgccgccaagcacugcggcacccucgccaacggcguccuccagaccuucaugcgcauggccuggggcggcuccuacaucgcccucgacuccggccgcggcaacugggacugcaucaugaccuccuaccaguaccucaucauccagaacaccaccugggaggaccacugccaguucucccgccccucccccaucggcuaccucggccuccucucccagcgcacccgcgagaucuacaucucccgccgccuccucggcaccuucaccuggacccucuccgacuccgagggcaacgaggcccccggcggcuacugccucacccgcuggaugcucaucgaggccgagcucaagugcuucggcaacgccgccgucgccaagugcaacgagaagcacgacgaggaguucugcgacaugcuccgccucuucgacuucaacaagcaggccauccagcgccucaagaccgaggcccagauguccauccagcucaucaacaaggccgucaacgcccucaucaacgaccagcucaucaugaagaaccaccuccgcgacaucaugggcauccccuacugcaacuacuccaaguacugguaccucaaccacaccaccaccggccgcaccucccucccccgcugcuggcucgucuccaacggcuccuaccucaacgagacccacuucuccgacgacaucgagcagcaggccgacaacaugaucaccgagaugcuccagaaggaguacaucgaccgccagggcaagaccccccucggccucgucgaccucuucgucuucuccaccuccuucuaccucaucuccaucuuccuccaccucgucaagauccccacccaccgccacaucgucggcaaguccugccccaagccccaccgccucaaccacaugggcaucugcuccugcggccucuacaagcagcccggcguccccguccgcuggaagcgcuga

SEQ ID NO: 865 - RNA, 1473 nt, Artificial Sequence
  derived and/or modified protein sequence (opt2) from LASV(Lassa virus/H.sapiens-wt/NGA/2016/ISTH_1609;Clade II)__AVO03661__GPC
augggccagaucgucaccuucuuccaggagaucccccacgucaucgaggaggucaugaacaucguccucaucacccucucccuccucgccguccucaagggcaucuacaacuucgccaccugcggccucaucggccucaucaccuuccucuuccucugcggccgcuccugcuccaccaucuacaagggcuccuaccagcuccagaagcucgagcucaacauggagacccucaacaugaccaugccccucuccugcaccaagaacuccucccaccacuacauccgcgucggcaacgagaccggccucgagcucacccucaccaacaccuccaucaucucccacaaguucugcaaccucuccgacgcccacaagaagaaccucuacgaccacgcccucauguccaucaucuccaccuuccaccucuccauccccaacuucaaccaguacgaggccauguccugcgacuucaacggcggcaagaucuccguccaguacaaccucucccacuccuacgccggcgacgccgcccgccacugcggcacccucgccaacggcguccuccagaccuucaugcgcauggccuggggcggcuccuacaucgcccucgacuccggcaagggcaacugggacugcaucaugaccuccuaccaguuccucaucauccagaacaccaccugggaggaccacugccaguucucccgccccucccccaugggcuaccucggccuccucucccagcgcacccgcgacaucuacaucucccgccgccuccucggcaccuucaccuggacccucuccgacuccgagggcaaggagacccccggcggcuacugccucacccgcuggaugcucaucgaggccgagcucaagugcuucggcaacaccgccgucgccaagugcaacgagaagcacgacgaggaguucugcgacaugcuccgccucuucgacuucaacaagcaggccauccagcgccucaagaccgaggcccagauguccauccagcucaucaacaaggccgucaacgcccucaucaacgaccagcucaucaugaagaaccaccuccgcgacaucaugggcauccccuacugcaacuacucccaguacugguaccucaaccacaccaucaccggcaagaccucccuccccaagugcuggcucgucuccaacggcuccuaccucaacgagacccacuucuccgacgacaucgagcagcaggccgacaacaugaucaccgagaugcuccagaaggaguacaucgaccgccagggcaagaccccccucggccucgucgaccucuucgucuucuccaccuccuucuaccucaucuccaucuuccuccaccucaucaagauccccacccaccgccacaucgucggcaaguccugccccaagccccaccgccucaaccgcaugggcaucugcuccugcggccucuacaagcagcccggcguccccgucaaguggaagcgcuga

SEQ ID NO: 866 - RNA, 1473 nt, Artificial Sequence
  derived and/or modified protein sequence (opt2) from LASV(Lassa virus/H.sapiens-wt/NGA/2016/ISTH_1610;Clade II)__AVO03603__GPC
augggccagaucaucaccuucuuccaggaggucccccacgucaucgaggaggucaugaacaucguccucaucgcccucucccuccucgccauccucaagggcaucuacaacgucgccaccugcggccucuucggccucgucuccuuccucuuccucugcggccgcuccugcuccaccaccuacaagggcgucuacgagcuccagacccucgagcucgacauggccucccucaacaugaccaugccccucuccugcaccaagaacaacucccaccacuacaucauggucggcaacgagaccggccucgagcucacccucaccaacaccuccaucaucaaccacaaguucugcaaccucuccgacgcccacaagaagaaccucuacgaccacgcccucauguccaucaucuccaccuuccaccucuccauccccaacuucaaccaguacgaggccauguccugcgacuucaacggcggcaagaucuccguccaguacaaccucucccacaccuacgccaucgacgccgccaaccacugcggcaccaucgccaacggcguccuccagaccuucaugcgcauggccuggggcggcuccuacaucgcccucgacuccggccgcggcuccugggacugcaucaugaccuccuaccaguaccucaucauccagaacaccaccugggaggaccacugccaguucucccgccccucccccaucggcuaccucggccuccucucccagcgcacccgcgacaucuacaucucccgccgccuccucggcaccuucaccuggacccucuccgacuccgagggcaacgagacccccggcggcuacugccucacccgcuggaugcucaucgaggccgagcucaagugcuucggcaacaccgccgucgccaagugcaacgagaagcacgacgaggaguucugcgacaugcuccgccucuucgacuucaacaagcaggccauccgccgccucaaggccgaggcccagaugaacauccagcucaucaacaaggccgucaacgcccucaucaacgaccagcucaucaugaagaaccaccuccgcgacaucaugggcauccccuacugcaacuacuccaaguacugguaccucaaccacaccgucaccggccgcaccucccucccccgcugcuggcucgucuccaacggcuccuaccucaacgagacccacuucuccgacgacaucgagcagcaggccgacaacaugaucaccgagcuccuccagaaggaguacauggaccgccagggcaagaccccccucggccucgucgaccucuucgucuucuccaccuccuucuaccucaucuccaucuuccuccaccucaucaagauccccacccaccgccacaucgucggcaagcccugccccaagccccaccgccucaaccacaugggcaucugcuccugcggccucuacaagcaccccggcguccccgucaaguggaagcgcuga

SEQ ID NO: 867 - RNA, 1473 nt, Artificial Sequence
  derived and/or modified protein sequence (opt2) from LASV(Lassa virus/H.sapiens-wt/NGA/2018/ISTH_0959;Clade II)__AVV65099__GPC
augggccagaucaucaccuucuuccaggaggucccccacgucaucgaggaggucaugaacaucguccucaucgcccucucccuccucgccauccucaagggcaucuacaacgucgucaccugcggccucuucggccucgucuccuuccuccuccucugcggccgcuccugcuccaccaccuacaagggcgucuacgagcuccagacccucgagcucgacauggccucccucaacaugaccaugccccucuccugcaccaagaacaacucccaccacuacaucauggucggcaacgagaccggccucgagcucacccucaccaacaccuccaucaucaaccacaaguucugcaaccucuccgacgcccacaagaagaaccucuacgaccacgcccucauguccaucaucuccaccuuccaccucuccauccccaacuucaaccaguacgaggccauguccugcgacuucaacggcggcaagaucuccguccaguacaaccucucccacgccuacgccaucgacgccgccaaccacugcggcaccaucgccaacggcguccuccagaccuucaugcgcauggccuggggcggcuccuacaucgcccucgacuccggcaagggcuccugggacugcaucaugaccuccuaccaguaccucaucauccagaacaccaccugggaggaccacugccaguucucccgccccucccccaucggcuaccucggccuccucucccagcgcacccgcgacaucuacaucucccgccgccuccucggcaccuucaccuggacccucuccgacuccgagggcaacgagacccccggcggcuacugccucacccgcuggaugcucaucgaggccgagcucaagugcuucggcaacaccgccgucgccaagugcaacgagaagcacgacgaggaguucugcgacaugcuccgccucuucgacuucaacaagcaggccauccgccgccucaagaccgaggcccagauguccauccagcucaucaacaaggccgucaacgcccucaucaacgaccagcucaucaugaagaaccaccuccgcgacaucaugggcauccccuacugcaacuacuccaaguacugguaccucaaccacaccgucaccggcaagaccucccucccccgcugcuggcucgucuccaacggcuccuaccucaacgagacccacuucuccgacgacaucgagcagcaggccgacaacaugaucaccgagcuccuccagaaggaguacaucgaccgccagggcaagaccccccucggccucgucgaccucuucgucuucuccaccuccuucuaccucaucuccaucuuccuccaccucgucaagauccccacccaccgccacgucaucggcaagcccugccccaagccccaccgccucaaccacaugggcaucugcuccugcggccucuacaagcaccccggcguccccgucaaguggaagcgcuga

SEQ ID NO: 868 - RNA, 1473 nt, Artificial Sequence
  derived and/or modified protein sequence (opt2) from LASV(Lassa virus/H.sapiens-wt/NGA/2018/ISTH_1024;Clade II)__AVV65105__GPC
augggccagaucaucaccuucuuccaggaggucccccacgucaucgaggaggucaugaacaucguccucaucgcccucucccuccucgccauccucaagggcgucuacaacgucgccaccugcggccucuucggccucgucuccuuccuccuccucugcggccgcuccugcuccaccaccuacaagggcgucuacgagcuccagacccucgagcucgacauggccaaccucaacaugaccaugccccucuccugcaccaagaacaacucccaccacuacauccgcgucggcaacgagaccggccucgagcucacccucaccaacaccuccaucaucaaccacaaguucugcaaccucuccgacgcccacaagaacaaccucuacgaccacgcccucauguccaucaucuccaccuuccaccucuccauccccaacuucaaccaguacgaggccauguccugcgacuucaacggcggcaagaucuccguccaguacaaccucucccacgccuacgccgucgacgccgccaaccacugcggcaccaucgccaacggcguccuccagaccuucaugcgcauggccuggggcggcuccuacaucgcccucgacuccggccgcggcuccugggacugcaucaugaccuccuaccaguaccucaucauccagaacaccaccugggaggaccacugccaguucucccgccccucccccaucggcuaccucggccuccucucccagcgcacccgcgacaucuacaucucccgccgccuccucggcaccuucaccuggacccucuccgacuccgagggcaacgagacccccggcggcuacugccucacccgcuggaugcucaucgaggccgagcucaagugcuucggcaacaccgccgucgccaagugcaacgagaagcacgacgaggaguucugcgacaugcuccgccucuucgacuucaacaagcaggccauccgccgccucaagaccgaggcccagauguccauccagcucaucaacaaggccgucaacgcccucaucaacgaccagcucaucaugaagaaccaccuccgcgacaucaugggcauccccuacugcaacuacuccaaguacugguaccucaaccacaccgucaccggcaagaccucccucccccgcugcuggcucgucuccaacggcaccuaccucaacgagacccacuucuccgacgacaucgagcagcaggccgacaacaugaucaccgagcuccuccagaaggaguacauggaccgccagggcaagaccccccucggccucgucgaccucuucgucuucuccaccuccuucuaccucaucuccaucuuccuccaccucgucaagauccccacccaccgccacgucaucggcaagcccugccccaagccccaccgccucaaccacaugggcaucugcuccugcggccucuacaagcaccccggcguccccgucaaguggaagcgcuga

SEQ ID NO: 869 - RNA, 1473 nt, Artificial Sequence
  derived and/or modified protein sequence (opt2) from LASV(Lassa virus/H.sapiens-wt/NGA/2018/ISTH_1079;Clade II)__AVV65107__GPC
augggccagaucaucaccuucuuccaggaggucccccacgucaucgaggaggucaugaacaucguccucaucgcccucucccuccucgccauccucaagggcaucuacaacgucgccaccugcggccucuucggccucgucgccuuccuccuccucugcggccgcuccugcuccaccaccuacaagggcgucuacgagcuccagacccucgagcucgacauggccucccucaacaugaccaugccccucuccugcaccaagaacaacucccaccacuacaucauggucggcaacgagaccggccucgagcucacccucaccaacaccuccaucaucaaccacaaguucugcaaccucuccgacgcccacaagaagaaccucuacgaccacgcccucauguccaucaucuccaccuuccaccucuccauccccaacuucaaccaguacgaggccauguccugcgacuucaacggcggcaagaucuccguccaguacaaccucucccacaccuacgccgucgacgccgccaaccacugcggcaccaucgccaacggcguccuccagaccuucaugcgcauggccuggggcggcuccuacaucgcccucgacuccggcaagggcuccugggacugcaucaugaccuccuaccaguaccucaucauccagaacaccaccugggaggaccacugccaguucucccgccccucccccaucggcuaccucggccuccucucccagcgcacccgcgacaucuacaucucccgccgccuccucggcaccuucaccuggacccucuccgacuccgagggcaacgagacccccggcggcuacugccucacccgcuggaugcucaucgaggccgagcucaagugcuucggcaacaccgccgucgccaagugcaacgagaagcacgacgaggaguucugcgacaugcuccgccucuucgacuucaacaagcaggccauccgccgccucaagaccgaggcccagauguccauccagcucaucaacaaggccgucaacgcccucaucaacgaccagcucaucaugaagaaccaccuccgcgacaucaugggcauccccuacugcaacuacuccaaguacugguaccucaaccacaccgucaccggccgcaccucccucccccgcugcuggcucgucuccaacggcuccuaccucaacgagacccacuucuccgacgacaucgagcagcaggccgacaacaugaucaccgagcuccuccagaaggaguacauggaccgccagggcaagaccccccucggccucgucgaccucuucgucuucuccaccuccuucuaccucaucuccaucuuccuccaccucaucaagauccccacccaccgccacgucaucggcaagcccugccccaagccccaccgccucaaccacaugggcaucugcuccugcggccucuacaagcaccccggcguccccgucaaguggaagcgcuga

SEQ ID NO: 870 - RNA, 1473 nt, Artificial Sequence
  derived and/or modified protein sequence (opt2) from LASV(Lassa virus/H.sapiens-wt/NGA/2018/ISTH_1177;Clade II)__AVV65101__GPC
augggccagaucaucaccuucuuccaggaggucccccacgucaucgaggaggucaugaacaucguccucaucgcccucucccuccucgccauccucaagggcaucuacaacgucgccaccugcggccucuucggccucgucuccuuccuccuccucugcggccgcuccugcuccaccaccuacaagggcgucuacgagcuccagacccucgagcucgacauggccucccucaacaugaccaugccccucuccugcaccaagaacaacucccaccacuacauccgcgucggcaacgagaccggccucgagcucacccucaccaacaccuccaucaucgaccacaaguucugcaaccucuccgacgcccacaagaagaaccucuacgaccacgcccucauguccaucaucuccaccuuccaccucuccauccccaacuucaaccaguacgaggccauguccugcgacuucaacggcggcaagaucuccguccaguacaaccucucccacaccuacgccgucgacgccgccaaccacugcggcaccaucgccaacggcguccuccagaccuucaugcgcauggccuggggcggcuccuacaucgcccucgacuccggcaagggcuccugggacugcaucaugaccuccuaccaguaccucaucauccagaacaccaccugggaggaccacugccaguucucccgccccucccccaucggcuaccucggccuccucucccagcgcacccgcgacaucuacaucucccgccgccuccucggcaccuucaccuggacccucuccgacuccgagggcaacgagacccccggcggcuacugccucacccgcuggaugcucaucgaggccgagcucaagugcuucggcaacaccgccgucgccaagugcaacgagaagcacgacgaggaguucugcgacaugcuccgccucuucgacuucaacaagcaggccauccgccgccucaagaccgaggcccagauguccauccagcucaucaacaaggccgucaacgcccucaucaacgaccagcucaucaugaagaaccaccuccgcgacaucaugggcauccccuacugcaacuacuccaaguacugguaccucaaccacaccaucaccggccgcaccucccucccccgcugcuggcucgucuccaacggcuccuaccucaacgagacccacuucuccgacgacaucgagcagcaggccgacaacaugaucaccgagcuccuccagaaggaguacauggaccgccagggcaagaccccccucggccucgucgaccucuucgucuucuccaccuccuucuaccucaucuccaucuuccuccaccucgucaagauccccacccaccgccacgucaucggcaagcccugccccaagccccaccgccucaaccacaugggcaucugcuccugcggccucuacaagcaccccggcguccccgucaaguggaagcgcuga

SEQ ID NO: 871 - RNA, 1473 nt, Artificial Sequence
  derived and/or modified protein sequence (opt2) from LASV(Lassa virus/H.sapiens-wt/NGA/2018/ISTH_1375;Clade II)__AVV65115__GPC
augggccagaucaucaccuucuuccaggaggucccccacgucaucgaggaggucaugaacaucguccucaucgcccucucccuccucgccauccucaagggcaucuacaacaucgccaccugcggccucuucggccucgucuccuuccuccuccucugcggccgcuccugcuccaccaccuacaagggcgucuacgagcuccagacccucgagcucgacauggccucccucaacaugaccaugccccucuccugcaccaagaacaacucccaccacuacaucauggucggcaacgagaccggccucgagcucacccucaccaacaccuccaucaucaaccaccgcuucugcaaccucuccgacgcccacaagaagaaccucuacgaccacgcccucauguccaucaucuccaccuuccaccucuccauccccaacuucaaccaguacgaggccauguccugcgacuucaacggcggcaagaucuccguccaguacaaccucucccacgccuacgccgucgacgccgccaaccacugcggcaccaucgccaacggcguccuccagaccuucaugcgcauggccuggggcggcuccuacaucgcccucgacuccggcaagggcuccugggacugcaucaugaccuccuaccaguaccucaucauccagaacaccaccugggaggaccacugccaguucucccgccccucccccaucggcuaccucggccuccucucccagcgcacccgcgacaucuacaucucccgccgccuccucggcaccuucaccuggacccucuccgacuccgagggcaacgagacccccggcggcuacugccucacccgcuggaugcucaucgaggccgagcucaagugcuucggcaacaccgccgucgccaagugcaacgagaagcacgacgaggaguucugcgacaugcuccgccucuucgacuucaacaagcaggccauccgccgccucaagaccgaggcccagauguccauccagcucaucaacaaggccgucaacgcccucaucaacgaccagcucaucaugaagaaccaccuccgcgacaucaugggcauccccuacugcaacuacuccaaguacugguaccucaaccacaccgucaccggcaagaccucccucccccgcugcuggcucgucuccaacggcuccuaccucaacgagacccacuucuccgacgacaucgagcagcaggccgacaacaugaucaccgagcuccuccagaaggaguacaucgaccgccagggcaagaccccccucggccucgucgaccucuucgucuucuccaccuccuucuaccucaucuccaucuuccuccaccucgucaagauccccacccaccgccacgucaucggcaagcccugccccaagccccaccgccucaaccacaugggcaucugcuccugcggccucuacaagcaccccggcguccccgucaaguggaagcgcuga

SEQ ID NO: 872 - RNA, 1473 nt, Artificial Sequence
  derived and/or modified protein sequence (opt2) from LASV(Lassa virus/H.sapiens-wt/NGA/2018/ISTH_1381;Clade II)__AVV65111__GPC
augggccagaucgucaccuucuuccaggaggucccccacgucaucgaggaggucaugaacaucguccucaucgcccucucccuccucgccauccucaagggcaucuacaacgucgccaccugcggccucuucggccucgucuccuuccuccuccucugcggccgcuccugcuccaccaccuacaagggcgucuacgagcuccagacccucgagcucgacauggccucccucaacaugaccaugccccucuccugcaccaagaacaacucccaccacuacaucauggucggcaacgagaccggccucgagcucacccucaccaacaccuccaucaucaaccacaaguucugcaaccucuccgacgcccacaagaagaaccucuacgaccacgcccucauguccaucaucuccaccuuccaccucuccauccccaacuucaaccaguacgaggccauguccugcgacuucaacggcggcaagaucuccguccaguacaaccucucccacaccuacgccgucgacgccgccaaccacugcggcaccaucgccaacggcguccuccagaccuucaugcgcauggccuggggcggcuccuacaucgcccucgacuccggcaagggcuccugggacugcaucaugaccuccuaccaguaccucaucauccagaacaccaccugggaggaccacugccaguucucccgccccucccccaucggcuaccucggccuccucucccagcgcacccgcgacaucuacaucucccgccgccuccucggcaccuucaccuggacccucuccgacuccgagggcaacgagacccccggcggcuacugccucacccgcuggaugcucaucgaggccgagcucaagugcuucggcaacaccgccgucgccaagugcaacgagaagcacgacgaggaguucugcgacaugcuccgccucuucgacuucaacaagcaggccauccgccgccucaagaccgaggcccagauguccauccagcucaucaacaaggccgucaacgcccucaucaacgaccagcucaucaugaagaaccaccuccgcgacaucaugggcauccccuacugcaacuacuccaaguacugguaccucaaccacaccgucaccggcaagaccucccucccccgcugcuggcucgucuccaacggcuccuaccucaacgagacccacuucuccgacgacaucgagcagcaggccgacaacaugaucaccgagcuccuccagaaggaguacauggaccgccagggcaagaccccccucggccucgucgaccucuucgucuucuccaccuccuucuaccucaucuccaucuuccuccaccucgucaagauccccacccaccgccacgucgucggcaagcccugccccaagccccaccgccucaaccacaugggcaucugcuccugcggccucuacaagcaccccggcguccccguccgcuggaagcgcuga

SEQ ID NO: 873 - RNA, 1473 nt, Artificial Sequence
  derived and/or modified protein sequence (opt2) from LASV(Lassa virus/H.sapiens-wt/NGA/2018/ISTH_1643;Clade II)__AVV65119__GPC
augggccagaucaucaccuucuuccaggaggucccccacgucaucgaggaggucaugaacaucguccucaucgcccucucccuccucgccauccucaagggcaucuacaacgucgccaccugcggccucuucggccucgucuccuuccuccuccucugcggccgcuccugcuccaccaccuacaagggcgucuacgagcuccagacccucgagcucgacauggccucccucaacaugaccaugccccucuccugcaccaagaacaacucccaccacuacaucauggucggcaacgagaccggccucgagcucacccucaccaacaccuccaucaucaaccacaaguucugcaaccucuccgacgcccacaagaagaaccucuacgaccacgcccucauguccaucaucuccaccuuccaccucuccauccccaacuucaaccaguacgaggccauguccugcgacuucaacggcggcaagaucuccguccaguacaaccucucccacaccuacgccgucgacgccgccaaccacugcggcaccaucgccaacggcguccuccagaccuucaugcgcauggccuggggcggcuccuacaucgcccucgacuccggcaagggcuccugggacugcaucaugaccuccuaccaguaccucaucauccagaacaccuccugggaggaccacugccaguucucccgccccucccccaucggcuaccucggccuccucucccagcgcacccgcgacaucuacaucucccgccgccuccucggcaccuucaccuggacccucuccgacuccgagggcaacgagacccccggcggcuacugccucacccgcuggaugcucaucgaggccgagcucaagugcuucggcaacaccgccgucgccaagugcaacgagaagcacgacgaggaguucugcgacaugcuccgccucuucgacuucaacaagcaggccauccgccgccucaagaccgaggcccagauguccauccagcucaucaacaaggccgucaacgcccucaucaacgaccagcucaucaugaagaaccaccuccgcgacaucaugggcauccccuacugcaacuacuccaaguacugguaccucaaccacaccgucaccggcaagaccucccucccccgcugcuggcucgucuccaacggcaccuaccucaacgagacccacuucuccgacgacaucgagcagcaggccgacaacaugaucaccgagcuccuccagaaggaguacaucgaccgccagggcaagaccccccucggccucgucgaccucuucgucuucuccaccuccuucuaccucaucuccaucuuccuccaccucgucaagauccccacccaccgccacgucaucggcaagcccugccccaagccccaccgccucaaccacaugggcaucugcuccugcggccucuacaagcaccccggcguccccgucaaguggaagcgcuga

SEQ ID NO: 874 - RNA, 1473 nt, Artificial Sequence
  derived and/or modified protein sequence (opt2) from LASV(LASV003-NIG-2008;Clade II)__AIT17580__GPC
augggccagaucaucaccuucuuccaggaggucccccacgucaucgaggaggucaugaacaucguccucaucgcccucucccuccucgccauccucaagggcaucuacaacgucgccaccugcggccucuucggccucgucuccuuccuccuccucugcggccgcuccugcuccaccaccuacaagggcgucuacgagcuccagacccucgagcucgacauggccucccucaacaugaccaugccccucuccugcaccaagaacaacucccaccacuacaucauggucggcaacgagaccggccucgagcucacccucaccaacaccuccaucaucaaccacaaguucugcaaccucuccgacgcccacaagaagaaccucuacgaccacgcccucauguccaucaucuccaccuuccaccucuccauccccaacuucaaccaguacgaggccauguccugcgacuucaacggcggcaagaucuccguccaguacaaccucucccacaccuacgccgucgacgccgccaaccacugcggcaccaucgccaacggcguccuccagaccuucaugcgcauggccuggggcggcuccuacaucgcccucgacuccggcaagggcuccugggacugcaucaugaccuccuaccaguaccucaucauccagaacaccaccugggaggaccacugccaguucucccgccccucccccaucggcuaccucggccuccucucccagcgcacccgcgacaucuacaucucccgccgccuccucggcaccuucaccuggacccucuccgacuccgaguccaacgagacccccggcggcuacugccucacccgcuggaugcucaucgaggccgagcucaagugcuucggcaacaccgccgucgccaagugcaacgagaagcacgacgaggaguucugcgacaugcuccgccucuucgacuucaacaagcaggccauccgccgccucaaggccgaggcccagauguccauccagcucaucaacaaggccgucaacgcccucaucaacgaccagcucaucaugaagaaccaccuccgcgacaucaugggcauccccuacugcaacuacuccaaguacugguaccucaaccacaccgucaccggccgcaccucccucccccgcugcuggcucgucuccaacggcuccuaccucaacgagacccacuucuccgacgacaucgagcagcaggccgacaacaugaucaccgagcuccuccagaaggaguacauggaccgccagggcaagaccccccucggccucgucgaccucuucgucuucuccaccuccuucuaccucaucuccaucuuccuccaccucgucaagauccccacccaccgccacgucaucggcaagcccugccccaagccccaccgccucaaccacaugggcaucugcuccugcggccucuacaagcaccccggcguccccgucaaguggaagcgcuga

SEQ ID NO: 875 - RNA, 1473 nt, Artificial Sequence
  derived and/or modified protein sequence (opt2) from LASV(LASV006-NIG-2008;Clade II)__AIT17584__GPC
augggccagaucaucaccuucuuccaggaggucccccaggucaucgaggaggucaugaacaucguccucaucgcccucucccuccucgccauccucaagggcaucuacaacgucgccaccugcggccucuucggccucgucuccuuccuccuccucugcggccgcuccugcuccaccaccuacaagggcgucuacgagcuccagacccucgagcucgacauggccucccucaacaugaccaugccccucuccugcaccaagaacaacucccaccacuacaucauggucggcaacgagaccggccucgagcucacccucaccaaccaguccaucaucaaccacaaguucugcaaccucuccgacgcccacaagaagaaccucuacgaccacgcccucauguccaucaucuccaccuuccaccucuccauccccaacuucaaccaguacgaggccauguccugcgacuucaacggcggcaagaucuccguccaguacaaccucucccacuccuucgccgucgacgccgccaaccacugcggcaccaucgccaacggcguccuccagaccuucaugcgcauggccuggggcggcuccuacaucgcccucgacuccggcaagggcuccugggacugcaucaugaccuccuaccaguaccucaucauccagaacaccaccugggaggaccacugccaguucucccgccccucccccaucggcuaccucggccuccucucccagcgcacccgcgacaucuacaucucccgccgccuccucggcaccuucaccuggacccucuccgacuccgagggcaacgagacccccggcggcuacugccucacccgcuggaugcucaucgaggccgagcucaagugcuucggcaacaccgccgucgccaagugcaacgagaagcacgacgaggaguucugcgacaugcuccgccucuucgacuucaacaagcaggccauccgccgccucaagaccgaggcccagauguccauccagcucaucaacaaggccgucaacgcccucaucaacgaccagcucaucaugaagaaccaccuccgcgacaucaugggcauccccuacugcaacuacuccaaguacugguaccucaaccacaccaagaccggcaagaccucccucccccgcugcuggcucgucuccaacggcuccuaccucaacgagacccacuucuccgacgacaucgagcagcaggccgacaacaugaucaccgagcuccuccagaaggaguacauggaccgccagggcaagaccccccucggccucgucgaccucuucgucuucuccaccuccuucuaccucaucuccaucuuccuccaccucgucaagauccccacccaccgccacgucaucggcaagcccugccccaagccccaccgccucaaccacaugggcaucugcuccugcggccucuacaagcaccccggcguccccgucaaguggaagcgcuga

SEQ ID NO: 876 - RNA, 1473 nt, Artificial Sequence
  derived and/or modified protein sequence (opt2) from LASV(LASV035-NIG-2009;Clade II)__AIT17588__GPC
augggccagaucaucaccuucuuccaggaggucccccacgucaucgaggaggucaugaacaucguccucaucgcccucucccuccucgccauccucaagggcaucuacaacgucgccaccugcggccucuucggccucgucuccuuccuccuccucugcggccgcuccugcuccaccaccuacaagggcgucuacgagcuccagacccucgagcucgacauggccucccucaacaugaccaugccccucuccugcaccaagaacaacucccaccacuacaucauggucggcaacgagaccggccucgagcucacccucaccaacaccuccaucaucaaccacaaguucugcaaccucuccgacgcccacaagaagaaccucuacgaccacgcccucauguccaucaucuccaccuuccaccucuccauccccaacuucaaccaguacgaggccauguccugcgacuucaacggcggcaagaucuccguccaguacaaccucucccacgccuacgccgucgacgccgccaaccacugcggcaccaucgccaacggcguccuccagaccuucaugcgcauggccuggggcggcuccuacaucgcccucgacuccggcaagggcuccugggacugcaucaugaccuccuaccaguaccucaucauccagaacaccaccugggaggaccacugccaguucucccgccccucccccaucggcuaccucggccuccucucccagcgcacccgcgacaucuacaucucccgccgccuccucggcaccuucaccuggacccucuccgacuccgagggcaacgagacccccggcggcuacugccucacccgcuggaugcucaucgaggccgagcucaagugcuucggcaacaccgccgucgccaagugcaacgagaagcacgacgaggaguucugcgacaugcuccgccucuucgacuucaacaagcaggccauccgccgccucaaggccgaggcccagauguccauccagcucaucaacaaggccgucaacgcccucaucaacgaccagcucaucaugaagaaccaccuccgcgacaucaugggcauccccuacugcaacuacuccaaguacugguaccucaaccacaccgucaccggcaagaccucccucccccgcugcuggcucgucuccaacggcuccuaccucaacgagacccacuucuccgacgacaucgagcagcaggccgacaacaugaucaccgagcuccuccagaaggaguacaucgaccgccagggcaagaccccccucggccucgucgaccucuucgucuucuccaccuccuucuaccucaucuccaucuuccuccaccucgucaagauccccacccaccgccacgucaucggcaagcccugccccaagccccaccgccucaaccacaugggcaucugcuccugcggccucuacaagcaccccggcguccccgucaaguggaagcgcuga

SEQ ID NO: 877 - RNA, 1473 nt, Artificial Sequence
  derived and/or modified protein sequence (opt2) from LASV(LASV042-NIG-2009;Clade II)__AIT17592__GPC
augggccagaucaucaccuucuuccaggaggucccccacgucaucgaggaggucaugaacaucguccucaucgcccucucccuccucgccauccucaagggcaucuacaacgucgccaccugcggccucuucggccucgucuccuuccuccuccucugcggccgcuccugcuccaccaccuacaagggcgucuacgagcuccagacccucgagcucgacauggccucccucaacaugaccaugccccucuccugcaccaagaacaacucccaccacuacaucauggucggcaacgagaccggccucgagcucacccucaccaacaccuccaucaucaaccacaaguucugcaaccucuccgacgcccacaagaagaaccucuacgaccacacccucauguccaucaucuccaccuuccaccucuccauccccaacuucaaccaguacgaggccauguccugcgacuucaacggcggccgcaucuccguccaguacaaccucucccacgccuacgccgucgacgccgccaaccacugcggcaccaucgccaacggcguccuccagaccuucaugcgcauggccuggggcggcuccuacaucgcccucgacuccggcaagggcuccugggacugcaucaugaccuccuaccaguaccucaucauccagaacaccaccugggaggaccacugccaguucucccgccccucccccaucggcuaccucggccuccucucccagcgcacccgcgacaucuacaucucccgccgccuccucggcaccuucaccuggacccucuccgacuccgagggcaacgagacccccggcggcuacugccucacccgcuggaugcucaucgaggccgagcucaagugcuucggcaacaccgccgucgccaagugcaacgagaagcacgacgaggaguucugcgacaugcuccgccucuucgacuucaacaagcaggccauccgccgccucaagaccgaggcccagauguccauccagcucaucaacaaggccgucaacgcccucaucaacgaccagcucaucaugaagaaccaccuccgcgacaucaugggcauccccuacugcaacuacuccaaguacugguaccucaaccacaccaucaccggcaagaccucccucccccgcugcuggcucgucuccaacggcuccuaccucaacgagacccacuucuccgacgacaucgagcagcaggccgacaacaugaucaccgagcuccuccagaaggaguacaucgaccgccagggcaagaccccccucggccucgucgaccucuucgucuucuccaccuccuucuaccucaucuccaucuuccuccaccucgucaagauccccacccaccgccacgucgucggcaagcccugccccaagccccaccgccucaaccacaugggcaucugcuccugcggccucuacaagcaccccggcguccccgucaaguggaagcgcuga

SEQ ID NO: 878 - RNA, 1473 nt, Artificial Sequence
  derived and/or modified protein sequence (opt2) from LASV(LASV045-NIG-2009;Clade II)__AIT17596__GPC
augggccagaucaucaccuucuuccaggaggucccccacgucaucgaggaggucaugaacaucguccucaucgcccucucccuccucgccauccucaagggcaucuacaacgucgccaccugcggccucuucggccucgucuccuuccuccuccucugcggccgcuccugcuccaccaccuacaagggcgucuacgagcuccagacccucgagcucgacauggccucccucaacaugaccaugccccucuccugcaccaagaacaacucccaccacuacaucauggucggcaacgagaccggccucgagcucacccucaccaacaccuccaucaucaaccacaaguucugcaaccucuccgacgcccacaagaagaaccucuacgaccacgcccucauguccaucaucuccaccuuccaccucuccauccccaacuucaaccaguacgaggccauguccugcgacuucaacggcggcaagaucuccguccaguacaaccucucccacaccuacgccgucgacgccgccaaccacugcggcaccaucgccaacggcguccuccagaccuucaugcgcauggccuggggcggcuccuacaucgcccucgacuccggcaagggcuccugggacugcaucaugaccuccuaccaguaccucaucauccagaacaccuccugggaggaccacugccaguucucccgccccucccccaucggcuaccucggccuccucucccagcgcacccgcgacaucuacaucucccgccgccuccucggcaccuucaccuggacccucuccgacuccgagggcaacgagacccccggcggcuacugccucacccgcuggaugcucaucgaggccgagcucaagugcuucggcaacaccgccgucgccaagugcaacgagaagcacgacgaggaguucugcgacaugcuccgccucuucgacuucaacaagcaggccauccgccgccucaagaccgaggcccagauguccauccagcucaucaacaaggccgucaacgcccucaucaacgaccagcucaucaugaagaaccaccuccgcgacaucaugggcauccccuacugcaacuacuccaaguacugguaccucaaccacaccgucaccggcaagaccucccucccccgcugcuggcucgucuccaacggcuccuaccucaacgagacccacuucuccgacgacaucgagcagcaggccgacaacaugaucaccgagcuccuccagaaggaguacaucgaccgccagggcaagaccccccucggccucgucgaccucuucgucuucuccaccuccuucuaccucaucuccaucuuccuccaccucgucaagauccccacccaccgccacgucaucggcaagcccugccccaagccccaccgccucaaccacaugggcaucugcuccugcggccucuacaagcaccccggcguccccgucaaguggaagcgcuga

SEQ ID NO: 879 - RNA, 1473 nt, Artificial Sequence
  derived and/or modified protein sequence (opt2) from LASV(LASV046-NIG-2009;Clade II)__AIT17600__GPC
augggccagaucaucaccuucuuccaggaggucccccacgucaucgaggaggucaugaacaucguccucaucgcccucucccuccucgccauccucaagggcaucuacaacgucgccaccugcggccucuucggccucgucuccuuccuccuccucugcggccgcuccugcuccaccaccuacaagggcgucuacgagcuccagacccucgagcucgacauggccucccucaacaugaccaugccccucuccugcaccaagaacaacucccaccacuacaucauggucggcaacgagaccggccucgagcucacccucaccaacaccuccaucaucaaccacaaguucugcaaccucuccgacgcccacaagaagaaccucuacgaccacgcccucauguccaucaucuccaccuuccaccucuccauccccaacuucaaccaguacgaggccauguccugcgacuucaacggcggcaagaucuccguccaguacaaccucucccacgccuacgccggcgacgccgccaaccacugcggcaccaucgccaacggcguccuccagaccuucaugcgcauggccuggggcggcuccuacaucgcccucgacuccggcaagggcuccugggacugcaucaugaccuccuaccaguaccucaucauccagaacaccaccugggaggaccacugccaguucucccgccccucccccaucggcuaccucggccuccucucccagcgcacccgcgacaucuacaucucccgccgccuccucggcaccuucaccuggacccucuccgacuccgagggcaacgagacccccggcggcuacugccucacccgcuggaugcucaucgaggccgagcucaagugcuucggcaacaccgccgucgccaagugcaacgagaagcacgacgaggaguucugcgacaugcuccgccucuucgacuucaacaagcaggccauccgccgccucaagaccgaggcccagauguccauccagcucaucaacaaggccgucaacgcccucaucaacgaccagcucaucaugaagaaccaccuccgcgacaucaugggcauccccuacugcaacuacuccaaguacugguaccucaaccacaccgucaccggcaagaccucccucccccgcugcuggcucgucuccaacggcuccuaccucaacgagacccacuucuccgacgacaucgagcagcaggccgacaacaugaucaccgagcuccuccagaaggaguacaucgaccgccagggcaagaccccccucggccucgucgaccucuucgucuucuccaccuccuucuaccucaucuccaucuuccuccaccucgucaagauccccacccaccgccacgucaucggcaagcccugccccaagccccaccgccucaaccacaugggcaucugcuccugcggccucuacaagcaccccggcguccccgucaaguggaagcgcuga

SEQ ID NO: 880 - RNA, 1473 nt, Artificial Sequence
  derived and/or modified protein sequence (opt2) from LASV(LASV049-NIG-2009;Clade II)__AIT17604__GPC
augggccagaucaucaccuucuuccaggaggucccccacgucaucgaggaggucaugaacaucguccucaucgcccucucccuccucgccauccucaagggcaucuacaacgucgccaccugcggccucuucggccucgucuccuuccuccuccucugcggccgcuccugcuccaccaccuacaagggcgucuacgagcuccagacccucgagcucgacaugaccucccucaacaugaccaugccccucuccugcaccaagaacaacucccaccacuacaucauggucggcaacgagaccggccucgagcucacccucaccaacaccuccaucaucaaccacaaguucugcaaccucuccgacgcccacaagaaggaccucuacgaccacgcccucauguccaucaucuccaccuuccaccucuccauccccaacuucaaccaguacgaggccauguccugcgacuucaacggcggcaagaucuccguccaguacaaccucucccacaccuacgccgucgacgccgccaagcacugcggcaccaucgccaacggcguccuccagaccuucaugcgcauggccuggggcggcuccuacaucgcccucgacuccggcaagggcuccugggacugcaucaugaccuccuaccaguaccucaucauccagaacaccaccugggaggaccacugccaguucucccgccccucccccgucggcuaccucggccuccucucccagcgcacccgcgacaucuacaucucccgccgccuccucggcaccuucaccuggacccucuccgacuccgagggcaacgagacccccggcggcuacugccucacccgcuggaugcucaucgaggccgagcucaagugcuucggcaacaccgccgucgccaagugcaacgagaagcacgacgaggaguucugcgacaugcuccgccucuucgacuucaacaagcaggccauccgccgccucaagaccgaggcccagauguccauccagcucaucaacaaggccgucaacgcccucaucaacgaccagcucaucaugaagaaccaccuccgcgacaucaugggcauccccuacugcaacuacuccaaguacugguaccucaaccacaccgucaccggcaagaccucccucccccgcugcuggcucgucuccaacggcuccuaccucaacgagacccacuucuccgacgacaucgagcagcaggccgacaacaugaucaccgagcuccuccagaaggaguaccucgaccgccagggcaagaccccccucggccucgucgaccucuucgucuucuccaccuccuucuaccucaucuccaucuuccuccaccucgucaagauccccacccaccgccacgucaucggcaagcccugccccaagccccaccgccucaaccacaugggcaucugcuccugcggccucuacaagcaccccggcguccccgucaaguggaagcgcuga

SEQ ID NO: 881 - RNA, 1473 nt, Artificial Sequence
  derived and/or modified protein sequence (opt2) from LASV(LASV052-NIG-2008;Clade II)__AIT17608__GPC
augggccagaucaucaccuucuuccaggaggucccccacgucaucgaggaggucaugaacaucguccucaucgcccucucccuccucgccauccucaagggcaucuacaacgucgccaccugcggccucuucggccucgucuccuuccuccuccucugcggccgcuccugcuccaccaccuacaagggcgucuacgagcuccagacccucgagcucgacauggccucccucaacaugaccaugccccucuccugcaccaagaacaacucccaccacuacaucauggucggcaacgagaccggccucgagcucacccucaccaacaccuccaucaucaaccacaaguucugcaaccucuccgacgcccacaagcgcaaccucuacaaccacgcccucauguccaucaucuccaccuuccaccucuccauccccaacuucaaccaguacgaggccauguccugcgacuucaacggcggcaagaucuccguccaguacaaccucucccacaccuacgccgucgacgccgccaaccacugcggcaccaucgccaacggcguccuccagaccuucaugcgcauggccuggggcggcuccuacaucgcccucgacuccggcaagggcuccugggacugcaucaugaccuccuaccaguaccucaucauccagaacaccaccugggaggaccacugccaguucucccgccccucccccaucggcuaccucggccuccucucccagcgcacccgcgacaucuacaucucccgccgccuccucggcaccuucaccuggacccucuccgacuccgagggcaacgagacccccggcggcuacugccucacccgcuggaugcucaucgaggccgagcucaagugcuucggcaacaccgccgucgccaagugcaacgagaagcacgacgaggaguucugcgacaugcuccgccucuucgacuucaacaagcaggccauccgccgccucaagaccgaggcccagauguccauccagcucaucaacaaggccgucaacgcccucaucaacgaccagcucaucaugaagaaccaccuccgcgacaucaugggcauccccuacugcaacuacuccaaguacugguaccucaaccacaccgucaccggcaagaccucccucccccgcugcuggcucgucuccaacggcuccuaccucaacgagacccacuucuccgacgacaucgagcagcaggccgacaacaugaucaccgagcuccuccagaaggaguacaucgaccgccagggcaagaccccccucggccucgucgaccucuucgucuucuccaccuccuucuaccucaucuccaucuuccuccaccucgucaagauccccacccaccgccacaucaucggcaagcccugccccaagccccaccgccucaaccacaugggcaucugcuccugcggccucuacaagcaccccggcguccccgucaaguggcgccgcuga

SEQ ID NO: 882 - RNA, 1473 nt, Artificial Sequence
  derived and/or modified protein sequence (opt2) from LASV(LASV056-NIG-2008;Clade II)__AIT17612__GPC
augggccagaucaucaccuucuuccaggaggucccccacgucaucgaggaggucaugaacaucguccucaucgcccucucccuccucgccauccucaagggcaucuacaacgucgccaccugcggccucuucggccucgucuccuuccuccuccucugcggccgcuccugcuccaccaccuacaagggcgucuacgagcuccagacccucgagcucgacauggccucccucaacaugaccaugccccucuccugcaccaagaacaacucccaccacuacauccgcgucggcaacgagaccggccucgagcucacccucaccaacaccuccaucaucaaccacaaguucugcaaccucuccgacgcccacaagaagaaccucuacgaccacucccucauguccaucaucuccaccuuccaccucuccauccccaacuucaaccaguacgaggccauguccugcgacuucaacggcggcaagaucuccguccaguacaaccucucccacaccuacgccgucgacgccgccaaccacugcggcaccaucgccaacggcguccuccagaccuucaugcgcauggccuggggcggcuccuacaucgcccucgacuccggcaagggcaacugggacugcaucaugaccuccuaccaguaccucaucauccagaacaccaccugggaggaccacugccaguucucccgccccucccccaucggcuaccucggccuccucucccagcgcacccgcgacaucuacaucucccgccgccuccucggcaccuucaccuggacccucuccgacuccgagggcaacgagacccccggcggcuacugccucacccgcuggaugcucaucgaggccgagcucaagugcuucggcaacaccgccgucgccaagugcaacgagaagcacgacgaggaguucugcgacaugcuccgccucuucgacuucaacaagcaggccauccgccgccucaagaccgaggcccagauguccauccagcucaucaacaaggccgucaacgcccucaucaacgaccagcucaucaugaagaaccaccuccgcgacaucaugggcauccccuacugcaacuacuccaaguacugguaccucaaccacaccgucaccggcaagaccucccucccccgcugcuggcucgucuccaacggcuccuaccucaacgagacccacuucuccgacgacaucgagcagcaggccgacaacaugaucaccgagcuccuccagaaggaguacaucgaccgccagggcaagaccccccucggccucgucgaccucuucgucuucuccaccuccuucuaccucaucuccaucuuccuccaccucgucaagauccccacccaccgccacgucgucggcaagcccugccccaagccccaccgccucaaccacaugggcaucugcuccugcggccucuacaagcaccccggcguccccgucaaguggaagcgcuga

SEQ ID NO: 883 - RNA, 1473 nt, Artificial Sequence
  derived and/or modified protein sequence (opt2) from LASV(LASV058-NIG-2008;Clade II)__AIT17616__GPC
augggccagaucaucaccuucuuccaggaggucccccacgucaucgaggaggucaugaacaucguccucaucgcccucucccuccucgccauccucaagggcaucuacaacgucgccaccugcggccucuucggccucgucuccuuccuccuccucugcggccgcuccugcuccaccaccuacaagggcgucuacgagcuccagacccucgagcucgacauggccucccucaacaugaccaugccccucuccugcaccaagaacaacucccaccacuacaucauggucggcaacgagaccggccucgagcucacccucaccaacaccuccaucaucaaccacaaguucugcaaccucuccgacgcccacaagaagaaccucuacgaccacgcccucauguccaucaucuccaccuuccaccucuccauccccaacuucaaccaguacgaggccauguccugcgacuucaacggcggcaagaucuccguccaguacaaccucucccacgccuacgccgucgacgccgccaaccacugcggcaccaucgccaacggcguccuccagaccuucaugcgcauggccuggggcggcuccuacaucgcccucgacuccggcaagggcuccugggacugcaucaugaccuccuaccaguaccucaucauccagaacaccaccugggaggaccacugccaguucucccgccccucccccaucggcuaccucggccuccucucccagcgcacccgcgacaucuacaucucccgccgccuccucggcaccuucaccuggacccucuccgacuccgagggcaacgagacccccggcggcuacugccucacccgcuggaugcucaucgaggccgagcucaagugcuucggcaacaccgccgucgccaagugcaacgagaagcacgacgaggaguucugcgacaugcuccgccucuucgacuucaacaagcaggccauccgccgccucaagaccgaggcccagauguccauccagcucaucaacaaggccgucaacgcccucaucaacgaccagcucaucaugaagaaccaccuccgcgacaucaugggcauccccuacugcaacuacuccaaguacugguaccucaaccacaccgucaccggcaagaccucccucccccgcugcuggcucgucuccaacggcuccuaccucaacgagacccacuucuccgacgacaucgagcagcaggccgacaacaugaucaccgagcuccuccagaaggaguacaucgaccgccagggcaagaccccccucggccucgucgaccucuucgucuucuccaccuccuucuaccucaucuccaucuuccuccaccucgucaagauccccacccaccgccacgucaucggcaagcccugccccaagccccaccgccucaaccacaugggcaucugcuccugcggccucuacaagcaccccggcguccccgucaaguggaagcgcuga

SEQ ID NO: 884 - RNA, 1473 nt, Artificial Sequence
  derived and/or modified protein sequence (opt2) from LASV(LASV063-NIG-2009;Clade II)__AIT17620__GPC
augggccagaucaucaccuucuuccaggaggucccccacgucaucgaggaggucaugaacaucguccucaucgcccucucccuccucgccauccucaagggcaucuacaacgucgccaccugcggccucuucggccucgucuccuuccuccuccucugcggccgcuccugcuccaccaccuacaagggcgucuacgagcuccagacccucgagcucgacauggccucccucaacaugaccaugccccucuccugcaccaagaacaacucccaccacuacaucauggucggcaacgagaccggccucgagcucacccucaccaacaccuccaucaucucccacaaguucugcaaccucuccgacgcccacaagaagaaccucuacgaccacgcccucauguccaucaucuccaccuuccaccucuccauccccaacuucaaccaguacgaggccauguccugcgacuucaacggcggcaagaucuccguccaguacaaccucucccacgccuacgccaucgacgccgccaaccacugcggcaccgucgccaacggcguccuccagaccuucaugcgcauggccuggggcggcuccuacaucgcccucgacuccggcaagggcuccugggacugcaucaugaccuccuaccaguaccucaucauccagaacaccaccugggaggaccacugccaguucucccgccccucccccaucggcuaccucggccuccucucccagcgcacccgcgacaucuacaucucccgccgccuccucggcaccuucaccuggacccucuccgacuccgagggcaacgagacccccggcggcuacugccucacccgcuggaugcucaucgaggccgagcucaagugcuucggcaacaccgccgucgccaagugcaacgagaagcacgacgaggaguucugcgacaugcuccgccucuucgacuucaacaagcaggccauccgccgccucaaggccgaggcccagauguccauccagcucaucaacaaggccgucaacgcccucaucaacgaccagcucaucaugaagaaccaccuccgcgacaucaugggcauccccuacugcaacuacuccaaguacugguaccucaaccacaccgucaccggcaagaccucccucccccgcugcuggcucgucuccaacggcuccuaccucaacgagacccacuucuccgacgacaucgagcagcaggccgacaacaugaucaccgagcuccuccagaaggaguacauggaccgccagggcaagaccccccucggccucgucgaccucuucgucuucuccaccuccuucuaccucaucuccaucuuccuccaccucgucaagauccccacccaccgccacgucaucggcaagcccugccccaagccccaccgccucaaccacaugggcaucugcuccugcggccucuacaagcaccccggcguccccgucaaguggaagcgcuga

SEQ ID NO: 885 - RNA, 1473 nt, Artificial Sequence
  derived and/or modified protein sequence (opt2) from LASV(LASV1000-NIG-2009;Clade II)__AIT17782__GPC
augggccagaucaucaccuucuuccaggaggucccccacgucaucgaggaggucaugaacaucguccucaucgcccucucccuccucgccauccucaagggcaucuacaacgucgccaccugcggccucuucggccucgucuccuuccuccuccucugcggccgcuccugcuccaccaccuacaagggcgucuacgagcuccagacccucgagcucgacauggccucccucaacaugaccaugccccucuccugcaccaagaacaacucccaccacuacaucauggucggcaacgagaccggccucgagcucacccucaccaacaccuccaucaucaaccacaaguucugcaaccucuccgacgcccacaagaagaaccucuacgaccacgcccucauguccaucaucuccaccuuccaccucuccauccccaacuucaaccaguacgaggccauguccugcgacuucaacggcggcaagaucuccguccaguacaaccucucccacaccuacgccgucgacgccgccaaccacugcggcaccaucgccaacggcguccuccagaccuucaugcgcauggccuggggcggcuccuacaucgcccucgacuccggcaagggcuccugggacugcaucaugaccuccuaccaguaccucaucauccagaacaccaccugggaggaccacugccaguucucccgccccucccccaucggcuaccucggccuccucucccagcgcacccgcgacaucuacaucucccgccgccuccucggcaccuucaccuggacccucuccgacuccgagggcaacgagacccccggcggcuacugccucacccgcuggaugcucaucgaggccgagcucaagugcuucggcaacaccgccgucgccaagugcaacgagaagcacgacgaggaguucugcgacaugcuccgccucuucgacuucaacaagcaggccaucaagcgccucaagaccgaggcccagauguccauccagcucaucaacaaggccgucaacgcccucaucaacgaccagcucaucaugaagaaccaccuccgcgacaucaugggcauccccuacugcaacuacuccaaguacugguaccucaaccacaccgucaccggcaagaccucccucccccgcugcuggcucgucuccaacggcuccuaccucaacgagacccacuucuccgacgacaucgagcagcaggccgacaacaugaucaccgagcuccuccagaaggaguacaucgaccgccagggcaagaccccccucggccucgucgaccucuucgucuucuccaccuccuucuaccucaucuccaucuuccuccaccucgucaagauccccacccaccgccacgucgucggcaagcccugccccaagccccaccgccucaaccacaugggcaucugcuccugcggccucuacaagcaccccggcguccccgucaaguggaagcgcuga

SEQ ID NO: 886 - RNA, 1473 nt, Artificial Sequence
  derived and/or modified protein sequence (opt2) from LASV(LASV1008-NIG-2009;Clade II)__AIT17786__GPC
augggccagaucaucaccuucuuccaggaggucccccacgucaucgaggaggucaugaacaucguccucaucgcccucucccuccucgccauccucaagggcaucuacaacgucgccaccugcggccucuucggccucgucuccuuccuccuccucugcggccgcuccugcuccaccaccuacaagggcgucuacgagcuccagacccucgagcucgacauggccucccucaacaugaccaugccccucuccugcaccaagaacaacucccaccacuacaucauggucggcaacgagaccggccucgagcucacccucaccaacaccuccaucaucaaccacaaguucugcaaccucuccgacgcccacaagaagaaccucuacgaccacgcccucauguccaucaucuccaccuuccaccucuccauccccaacuucaaccaguacgaggccauguccugcgacuucaacggcggcaagaucuccguccaguacaaccucucccacgccuacgccaucgacgccgccgaccacugcggcaccaucgccaacggcguccuccagaccuucaugcgcauggccuggggcggcuccuacaucgcccucgacuccggcaagggcuccugggacugcaucaugaccuccuaccaguaccucaucauccagaacaccaccugggaggaccacugccaguucucccgccccucccccaucggcuaccucggccuccucucccagcgcacccgcgacaucuacaucucccgccgccuccucggcaccuucaccuggacccucuccgacuccgagggcaacgagacccccggcggcuacugccucacccgcuggaugcucaucgaggccgagcucaagugcuucggcaacaccgccgucgccaagugcaacgagaagcacgacgaggaguucugcgacaugcuccgccucuucgacuucaacaagcaggccauccgccgccucaagaccgaggcccagauguccauccagcucaucaacaaggccgucaacgcccucaucaacgaccagcucaucaugaagaaccaccuccgcgacaucaugggcauccccuacugcaacuacuccaaguacugguaccucaaccacaccgucaccggcaagaccucccucccccgcugcuggcucgucuccaacggcuccuaccucaacgagacccacuucuccgacgacaucgagcagcaggccgacaacaugaucaccgagcuccuccagaaggaguacauggaccgccagggcaagaccccccucggccucgucgaccucuucgucuucuccaccuccuucuaccucaucuccaucuuccuccaccucgucaagauccccacccaccgccacaucaccggcaagcccugccccaagccccaccgccucaaccacaugggcaucugcuccugcggccucuacaagcaccccggcguccccgucaaguggaagcgcuga

SEQ ID NO: 887 - RNA, 1473 nt, Artificial Sequence
  derived and/or modified protein sequence (opt2) from LASV(LASV1011-NIG-2009;Clade II)__AIT17790__GPC
augggccagaucaucaccuucuuccaggaggucccccacgucaucgaggaggucaugaacaucguccucaucgcccucucccuccucgccauccucaagggcaucuacaacgucgccaccugcggccucuucggccucgucuccuuccuccuccucugcggccgcuccugcuccaccaccuacaagggcgucuacgagcuccagacccucgagcucgacauggccucccucaacaugaccaugccccucuccugcaccaagaacaacucccaccacuacaucauggucggcaacgagaccggccucgagcucacccucaccaacaccuccaucaucaaccacaaguucugcaaccucuccgacgcccacaagaagaaccucuacgaccacgcccucauguccaucaucuccaccuuccaccucuccauccccaacuucaaccaguacgaggccauguccugcgacuucaacggcggcaagaucuccguccaguacaaccucucccacaccuacgccgucgacgccgccaaccacugcggcaccaucgccaacggcguccuccagaccuucaugcgcauggccuggggcggcuccuacaucgcccucgacuccggcaagggcuccugggacugcaucaugaccuccuaccaguaccucaucauccagaacaccaccugggaggaccacugccaguucucccgccccucccccaucggcuaccucggccuccucucccagcgcacccgcgacaucuacaucucccgccgccuccucggcaccuucaccuggacccucuccgacuccgagggcaacgagacccccggcggcuacugccucacccgcuggaugcucaucgaggccgagcucaagugcuucggcaacaccgccgucgccaagugcaacgagaagcacgacgaggaguucugcgacaugcuccgccucuucgacuucaacaagcaggccauccgccgccucaagaccgaggcccagauguccauccagcucaucaacaaggccgucaacgcccucaucaacgaccagcucaucaugaagaaccaccuccgcgacaucaugggcauccccuacugcaacuacuccaaguacugguaccucaaccacaccgucaccggcaagaccucccucccccgcugcuggcucgucuccaacggcuccuaccucaacgagacccacuucuccgacgacaucgagcagcaggccgacaacaugaucaccgagcuccuccagaaggaguacauggaccgccagggcaagaccccccucggccucgucgaccucuucgucuucuccaccuccuucuaccucaucuccaucuuccuccaccucgucaagauccccacccaccgccacaucaccggcaagcccugccccaagccccaccgccucaaccacaugggcaucugcuccugcggccucuacaagcaccccggcguccccgucaaguggaagcgcuga

SEQ ID NO: 888 - RNA, 1473 nt, Artificial Sequence
  derived and/or modified protein sequence (opt2) from LASV(LASV1016-NIG-2009;Clade II)__AIT17798__GPC
augggccagaucaucaccuucuuccaggaggucccccacgucaucgaggaggucaugaacaucguccucaucgcccucucccuccucgccauccucaagggcaucuacaacgucgccaccugcggccucuucggccucgucuccuuccuccuccucugcggccgcuccugcuccaccaccuacaagggcgucuacgagcuccagacccucgagcucgacauggccucccucaacaugaccaugccccucuccugcaccaagaacaacucccaccacuacaucauggucggcaacgagaccggccucgagcucacccucaccaacaccuccaucaucaaccacaaguucugcaaccucuccgacgcccacaagaagaaccucuacgaccacgcccucauguccaucaucuccaccuuccaccucuccauccccaacuucaaccaguacgaggccauguccugcgacuucaacggcggcaagaucuccguccaguacaaccucucccacaccuacgccgucgacgccgccaaccacugcggcaccaucgccaacggcguccuccagaccuucaugcgcauggccuggggcggcuccuacaucgcccucgacuccggcaagggcuccugggacugcaucaugaccuccuaccaguaccucaucauccagaacaccaccugggaggaccacugccaguucucccgccccucccccaucggcuaccucggccuccucucccagcgcacccgcgacaucuacaucucccgccgccuccucggcaccuucaccuggacccucuccgacuccgagggcaacgagacccccggcggcuacugccucacccgcuggaugcucaucgaggccgagcucaagugcuucggcaacaccgccgucgccaagugcaacgagaagcacgacgaggaguucugcgacaugcuccgccucuucgacuucaacaagcaggccaucaugcgccucaagaccgaggcccagauguccauccagcucaucaacaaggccgucaacgcccucaucaacgaccagcucaucaugaagaaccaccuccgcgacaucaugggcauccccuacugcaacuacuccaaguacugguaccucaaccacaccgucaccggcaagaccucccucccccgcugcuggcucgucuccaacggcuccuaccucaacgagacccacuucuccgacgacaucgagcagcaggccgacaacaugaucaccgagaugcuccagaaggaguaccucgaccgccagggcaagaccccccucggccucgucgaccucuucgucuucuccaccuccuucuaccucaucuccaucuuccuccaccucgucaagauccccacccaccgccacaucaucggcaagcccugccccaagccccaccgccucaaccacaugggcaucugcuccugcggccucuacaagcaccccggcguccccgucaaguggaagcgcuga

SEQ ID NO: 889 - RNA, 1473 nt, Artificial Sequence; identical to SEQ ID NO: 801
  derived and/or modified protein sequence (opt2) from LASV(LASV221-NIG-2010;Clade II)__AIT17624__GPC

SEQ ID NO: 890 - RNA, 1473 nt, Artificial Sequence
  derived and/or modified protein sequence (opt2) from LASV(LASV224-NIG-2010;Clade II)__AIT17626__GPC
augggccagaucaucaccuucuuccaggaggucccccacgucaucgaggaggucaugaacaucguccucaucgcccucucccuccucgccauccucaagggcgucuacaacgucgccaccugcggccucuucggccucgucuccuuccuccuccucugcggccgcuccugcuccaccaccuacaagggcgucuacgagcuccagacccucgagcucgacauggccucccucaacaugaccaugccccucuccugcaccaagaacaacucccaccacuacaucauggucggcaacgagaccggccucgagcucacccucaccaacaccuccaucauccagcacaaguucugcaaccucuccgacgcccacaagaagaaccucuacgaccacgcccucauguccaucaucuccaccuuccaccucuccauccccaacuucaaccaguacgaggccauguccugcgacuucaacggcggcaagaucaccguccaguacaaccucucccacuccuacgccaucgacgccgccaaccacugcggcaccaucgccaacggcguccuccagaccuucaugcgcauggccuggggcggcuccuacaucgcccucgacuccggcaagggcuccugggacugcaucaugaccuccuaccaguaccucaucauccagaacaccaccugggaggaccacugccaguucucccgccccucccccaucggcuaccucggccuccucucccagcgcacccgcgacaucuacaucucccgccgccuccucggcaccuucaccuggacccucuccgacuccgagggcaacgagacccccggcggcuacugccucacccgcuggaugcucaucgaggccgagcucaagugcuucggcaacaccgccgucgccaagugcaacgagaagcacgacgaggaguucugcgacaugcuccgccucuucgacuucaacaagcaggccauccgccgccucaagaccgaggcccagauguccauccagcucaucaacaaggccgucaacgcccucaucaacgaccagcucaucaugaagaaccaccuccgcgacaucaugggcauccccuacugcaacuacuccaaguacugguaccucaaccacaccgucaccggccgcaccucccucccccgcugcuggcucgucuccaacggcuccuaccucaacgagacccacuucuccgacgacaucgagcagcaggccgacaacaugaucaccgagcuccuccagaaggaguacauggaccgccagggcaagaccccccucggccucgucgaccucuucgucuucuccaccuccuucuaccucaucuccaucuuccuccaccucgucaagauccccacccaccgccacaucaucggcaagcccugccccaagccccaccgccucaaccacaugggcgucugcuccugcggccucuacaagcaccccggcguccccgucaaguggaagcgcuga

SEQ ID NO: 891 - RNA, 1473 nt, Artificial Sequence
  derived and/or modified protein sequence (opt2) from LASV(LASV225-NIG-2010;Clade II)__AIT17630__GPC
augggccagaucaucaccuucuuccaggaggucccccacgucaucgaggaggucaugaacaucguccucaucgcccucucccuccucgccauccucaagggcaucuacaacgucgccaccugcggccucuucggccuccucuccuuccuccuccucugcggccgcuccugcuccaccaccuacaagggcgucuacgagcuccagacccucgagcucgacauggccucccucaacaugaccaugccccucuccugcaccaagaacaacucccaccacuacaucauggucggcaacgagaccggccucgagcucacccucaccaacaccuccaucaucaaccacaaguucugcaaccucuccgacgcccacaagaagaaccucuacgaccacgcccucauguccaucaucuccaccuuccaccucuccauccccaacuucaaccaguacgaggccauguccugcgacuucaacggcggcaagaucuccguccaguacaaccucucccacgccuacgccgucgacgccgccgagcacugcggcaccaucgccaacggcguccuccagaccuucaugcgcauggccuggggcggcuccuacaucgcccucgacuccggcaagggcuccugggacugcgucaugaccuccuaccaguaccucaucauccagaacaccuccugggaggaccacugccaguucucccgccccucccccaucggcuaccucggccuccucucccagcgcacccgcgacaucuacaucucccgccgccuccucggcaccuucaccuggacccucuccgacuccgagggcaacgagacccccggcggcuacugccucacccgcuggaugcucaucgaggccgagcucaagugcuucggcaacaccgccgucgccaagugcaacgagaagcacgacgaggaguucugcgacaugcuccgccucuucgacuucaacaagcaggccauccgccgccucaagaccgaggcccagauguccauccagcucaucaacaaggccgucaacgcccucaucaacgaccagcucaucaugaagaaccaccuccgcgacaucaugggcauccccuacugcaacuacuccaaguacugguaccucaaccacaccgucaccggcaagaccucccucccccgcugcuggcucgucuccaacggcuccuaccucaacgagacccacuucuccgacgacaucgagcagcaggccgacaacaugaucaccgagcuccuccagaaggaguacaucgaccgccagggcaagaccccccucggccucgucgaccucuucgucuucuccaccuccuucuaccucaucuccaucuuccuccaccucgucaagauccccacccaccgccacgucaucggcaagcccugccccaagccccaccgccucaaccacaugggcaucugcuccugcggccucuacaagcaccccggcguccccgucaaguggaagcgcuga

SEQ ID NO: 892 - RNA, 1473 nt, Artificial Sequence
  derived and/or modified protein sequence (opt2) from LASV(LASV229-NIG-2010;Clade II)__AIT17634__GPC
augggccagaucaucaccuucuuccaggaggucccccacgucaucgaggaggucaugaacaucguccucaucgcccucucccuccucgccauccucaagggcaucuacaacgucgccaccugcggccucuucggccucgucuccuuccuccuccucugcggccgcuccugcuccaccaucuacaaggacgucuacgagcuccagacccucgagcucgacauggccucccucaacaugaccaugccccucuccugcaccaagaacaacucccaccacuacaucauggucggcaacgagaccggccucgagcucacccucaccaacaccuccaucaucaaccacaaguucugcaaccucuccgacgcccacaagaagaaccucuacgaccacgcccucauguccaucaucuccaccuuccaccucuccauccccaacuucaaccaguacgaggccauguccugcgacuucaacggcggcaagaucuccguccaguacaaccucucccacaccuacgccaucgacgccgccaaccacugcggcaccaucgccaacggcguccuccagaccuucaugcgcauggccuggggcggcuccuacaucgcccucgacuccggcaagggcuccugggacugcaucaugaccuccuaccaguaccucaucauccagaacaccaccugggaggaccacugccaguucucccgccccucccccaucggcuaccucggccuccucucccagcgcacccgcgacaucuacaucucccgccgccuccucggcaccuucaccuggacccucuccgacuccgagggcaacgagacccccggcggcuacugccucacccgcuggaugcucaucgaggccgagcucaagugcuucggcaacaccgccgucgccaagugcaacgagaagcacgacgaggaguucugcgacaugcuccgccucuucgacuucaacaagcaggccauccgccgccucaagaccgaggcccagauguccauccagcucaucaacaaggccgucaacgcccucaucaacgaccagcucaucaugaagaaccaccuccgcgacaucaugggcauccccuacugcaacuacucccgcuacugguaccucaaccacaccgucaccggccgcaccucccucccccgcugcuggcucgucuccaacggcuccuaccucaacgagacccacuucuccgacgacaucgagcagcaggccgacaacaugaucaccgagcuccuccagaaggaguacauggaccgccagggcaagaccccccucggccucgucgaccucuucgucuucuccaccuccuucuaccucaucuccaucuuccuccaccucgucaagauccccacccaccgccacgucaucggcaagcccugccccaagccccaccgccucaaccacaugggcaucugcuccugcggccucuacaaccaccccggcguccccgucaaguggaagcgcuga

SEQ ID NO: 893 - RNA, 1473 nt, Artificial Sequence
  derived and/or modified protein sequence (opt2) from LASV(LASV237-NIG-2010;Clade II)__AIT17638__GPC
augggccagaucaucaccuucuuccaggaggucccccacgucaucgaggaggucaugaacaucguccucaucgcccucucccuccucgccauccucaagggcaucuacaacgucgccaccugcggccucuucggccucgucuccuuccuccuccucugcggccgcuccugcuccaccaccuacaagggcgucuacgagcuccagacccucgagcucgacauggccucccucaacaugaccaugccccucuccugcaccaagaacaacucccaccacuacaucauggucggcaacgagaccggccucgagcucacccucaccaacaccuccaucaucaaccacaaguucugcaaccucuccgacgcccacaagaaggaccucuacgaccacgcccucauguccaucaucuccaccuuccaccucuccauccccaacuucaaccaguacgaggccauguccugcgacuucaacggcggcaagaucuccguccaguacaaccucucccacaccuacgccgucgacgccgccaaccacugcggcaccaucgccaacggcguccuccagaccuucaugcgcauggccuggggcggcuccuacaucgcccucgacuccggcaagggcuccugggacugcaucaugaccuccuaccaguaccucaucauccagaacaccaccugggaggaccacugccaguucucccgccccucccccaucggcuaccucggccuccucucccagcgcacccgcgacaucuacaucucccgccgccuccucggcaccuucaccuggacccucuccgacuccgagggcaacgagacccccggcggcuacugccucacccgcuggaugcucaucgaggccgagcucaagugcuucggcaacaccgccgucgccaagugcaacgagaagcacgacgaggaguucugcgacaugcuccgccucuucgacuucaacaagcaggccauccgccgccucaagaccgaggcccagauguccauccagcucaucaacaaggccgucaacgcccucaucaacgaccagcucaucaugaagaaccaccuccgcgacaucaugggcauccccuacugcaacuacuccaaguacugguaccucaaccacaccgucaccggcaagaccucccucccccgcugcuggcucgucuccaacggcuccuaccucaacgagacccacuucuccgacgacaucgagcagcaggccgacaacaugaucaccgagcuccuccagaaggaguacauggaccgccagggcaagaccccccucggccucgucgaccucuucgucuucuccaccuccuucuaccucaucuccaucuuccuccaccucaucaagauccccacccaccgccacaucaccggcaagcccugccccaagccccaccgccucaaccacaugggcaucugcuccugcggccucuacaagcaccccggcguccccgucaaguggaagcgcuga

SEQ ID NO: 894 - RNA, 1473 nt, Artificial Sequence
  derived and/or modified protein sequence (opt2) from LASV(LASV239-NIG-2010;Clade II)__AIT17642__GPC
augggccagaucaucaccuucuuccaggaggucccccacgucaucgaggaggucaugaacaucguccucaucgcccucucccuccucgccauccucaagggcgucuacaacgucgccaccugcggccucuucggccucgucuccuuccuccuccucugcggccgcuccugcuccaccaccuacaagggcgucuacgagcuccagacccucgagcucgacauggccucccucaacaugaccaugccccucuccugcaccaagaacaacucccaccacuacaucauggucggcaacgacaccggccucgagcucacccucaccaacaccuccaucaucaaccacaaguucugcaaccucuccgacgcccacaagaagaaccucuacgaccacgcccucauguccaucaucuccaccuuccaccucuccauccccaacuucaaccaguacgaggccauguccugcgacuucaacggcggcaagaucuccguccaguacaaccucucccacgccuacgccgucgacgccgccucccacugcggcaccaucgccaacggcguccuccagaccuucaugcgcauggccuggggcggcuccuacaucgcccucgacuccggcaagggcuccugggacugcaucaugaccuccuaccaguaccucaucauccagaacaccaccugggaggaccacugccaguucucccgccccucccccaucggcuaccucggccuccucucccagcgcacccgcgacaucuacaucucccgccgccuccucggcaccuucaccuggacccucuccgacuccgagggcaacgagacccccggcggcuacugccucacccgcuggaugcucaucgaggccgagcucaagugcuucggcaacaccgccgucgccaagugcaacgagaagcacgacgaggaguucugcgacaugcuccgccucuucgacuucaacaagcaggccauccgccgccucaagaccgaggcccagauguccauccagcucaucaacaaggccgucaacgcccucaucaacgaccagcucaucaugaagaaccaccuccgcgacaucaugggcauccccuacugcaacuacuccaaguacugguaccucaaccacaccgucaccggcaagaccucccucccccgcugcuggcucgucuccaacggcuccuaccucaacgagacccacuucuccgacgacaucgagcagcaggccgacaacaugaucaccgagcuccuccagaaggaguacauggaccgccagggcaagaccccccucggccucgucgaccucuucgucuucuccaccuccuucuaccucaucuccaucuuccuccaccucgucaagauccccacccaccgccacaucaucggcaagcccugccccaagccccaccgccucaaccacaugggcaucugcuccugcggccucuacaagcaccccggcguccccgucaaguggaagcgcuga

SEQ ID NO: 895 - RNA, 1473 nt, Artificial Sequence
  derived and/or modified protein sequence (opt2) from LASV(LASV241-NIG-2011;Clade II)__AIT17646__GPC
augggccagaucaucaccuucuuccaggaggucccccacgucaucgaggaggucaugaacaucguccucaucgcccucucccuccucgccauccucaagggcaucuacaacgucgccaccugcggccucuucggccucgucuccuuccuccuccucugcggccgcuccugcuccaccaccuacaagggcgucuacgagcuccagacccucgagcucgacauggccucccucaacaugaccaugccccucuccugcaccaagaacaacucccaccacuacaucauggucggcaacgagaccggccucgagcucacccucaccaacaccuccaucaucaaccacaaguucugcaaccucuccgacgcccacaagaagaaccucuacgaccacgcccucauguccaucaucuccaccuuccaccucuccauccccaacuucaaccaguacgaggccauguccugcgacuucaacggcggcaagaucuccguccaguacaaccucucccacgccuacgccgucgacgccgccucccacugcggcaccgucgccaacggcguccuccagaccuucaugcgcauggccuggggcggcuccuacaucgcccucgacuccggcaagggcuccugggacugcaucaugaccuccuaccaguaccucaucauccagaacaccaccugggaggaccacugccaguucucccgccccucccccaucggcuaccucggccuccucucccagcgcacccgcgacaucuacaucucccgccgccuccucggcaccuucaccuggacccucuccgacuccgagggcaacgagacccccggcggcuacugccucacccgcuggaugcucaucgaggccgagcucaagugcuucggcaacaccgccgucgccaagugcaacgagaagcacgacgaggaguucugcgacaugcuccgccucuucgacuucaacaagcaggccauccgccgccucaagaccgaggcccagauguccauccagcucaucaacaaggccgucaacgcccucaucaacgaccagcucaucaugaagaaccaccuccgcgacaucaugggcauccccuacugcaacuacuccaaguacugguaccucaaccacaccgucaccggcaagaccucccucccccgcugcuggcucgucuccaacggcuccuaccucaacgagacccacuucuccgacgacaucgagcagcaggccgacaacaugaucaccgagcuccuccagaaggaguacauggaccgccagggcaagaccccccucggccucgucgaccucuucgucuucuccaccuccuucuaccucaucuccaucuuccuccaccucgucaagauccccacccaccgccacgucaucggcaagcccugccccaagccccaccgccucaaccacaugggcaucugcuccugcggccucuacaagcaccccggcguccccgucaaguggaagcgcuga

SEQ ID NO: 896 - RNA, 1473 nt, Artificial Sequence
  derived and/or modified protein sequence (opt2) from LASV(LASV242-NIG-2010;Clade II)__AIT17650__GPC
augggccagaucaucaccuucuuccaggaggucccccacgucaucgaggaggucaugaacaucguccucaucgcccucucccuccucgccauccucaagggcaucuacaacgucgccaccugcggccucuucggccucgucuccuuccuccuccucugcggccgcuccugcuccaccaccuacaagggcgucuacgagcuccagacccucgagcucgacauggccucccucaacaugaccaugccccucuccugcaccaagaacaacucccaccacuacaucauggucggcaacgagaccggccucgagcucacccucaccaacaucuccaucaucaaccacaaguucugcaaccucuccgacgcccacaagaagaaccucuacgaccacgcccucauguccaucaucuccaccuuccaccucuccauccccaacuucaaccaguacgaggccauguccugcgacuucaacggcggcaagaucuccguccaguacaaccucucccacaccuacgccgucgacgccgccaaccacugcggcaccaucgccaacggcguccuccagaccuucaugcgcauggccuggggcggcuccuacaucgcccucgacuccggcaagggcuccugggacugcaucaugaccuccuaccaguaccucaucauccagaacaccaccugggaggaccacugccaguucucccgccccucccccaucggcuaccucggccuccucucccagcgcacccgcgacaucuacaucucccgccgccuccucggcaccuucaccuggacccucuccgacuccgagggcaacgagacccccggcggcuacugccucacccgcuggaugcucaucgaggccgagcucaagugcuucggcaacaccgccgucgccaagugcaacgagaagcacgacgaggaguucugcgacaugcuccgccucuucgacuucaacaagcaggccauccgccgccucaaggccgaggcccagauguccauccagcucaucaacaaggccgucaacgcccucaucaacgaccagcucaucaugaagaaccaccuccgcgacaucaugggcauccccuacugcaacuacuccaaguacugguaccucaaccacaccgucaccggccgcaccucccucccccgcugcuggcucgucuccaacggcuccuaccucaacgagacccacuucuccgacgacaucgagcagcaggccgacaacaugaucaccgagcuccuccagaaggaguacaucgaccgccagggcaagaccccccucggccucgucgaccucuucgucuucuccaccuccuucuaccucaucuccaucuuccuccaccucgucaagauccccacccaccgccacaucaucggcaagcccugccccaagccccaccgccucaaccacaugggcaucugcuccugcggccucuacaagcaccccggcguccccgucaaguggaagcgcuga

SEQ ID NO: 897 - RNA, 1473 nt, Artificial Sequence
  derived and/or modified protein sequence (opt2) from LASV(LASV246-NIG-2010;Clade II)__AIT17658__GPC
augggccagaucaucaccuucuuccaggaggucccccacgucaucgaggaggucaugaacaucguccucaucgcccucucccuccucgccauccucaagggcgucuacaacgucgccaccugcggccucuucggccucgucuccuuccuccuccucugcggccgcuccugcuccaucaccuacaagggcgucuacgagcuccagacccucgagcucgacauggccaaccucaacaugaccaugccccucuccugcaccaagaacaacucccaccacuacaucauggucggcaacgagaccggccucgagcucacccucaccaacaccuccaucaucaaccacaaguucugcaaccucuccgacgcccacaagaagaaccucuacgaccacgcccucauguccaucaucuccaccuuccaccucuccauccccaacuucaaccaguacgaggccauguccugcgacuucaacggcggcaagaucuccguccaguacaaccucucccacaccuacgccggcgacgccgccgaccacugcggcaccaucgccaacggcguccuccagaccuucaugcgcauggccuggggcggcuccuacaucgcccucgacuccggcaagggcuccugggacugcaucaugaccuccuaccaguaccucaucauccagaacaccaccugggaggaccacugccaguucucccgccccucccccaugggcuaccucggccuccucucccagcgcacccgcgacaucuacaucucccgccgccuccucggcaccuucaccuggacccucuccgacuccgagggcaacgagacccccggcggcuacugccucacccgcuggaugcucaucgaggccgagcucaagugcuucggcaacaccgccgucgccaagugcaacgagaagcacgacgaggaguucugcgacaugcuccgccucuucgacuucaacaagcaggccauccgccgccucaagaccgaggcccagauguccauccagcucaucaacaaggccgucaacgcccucaucaacgaccagcucaucaugaagaaccaccuccgcgacaucaugggcauccccuacugcaacuacuccaaguacugguaccucaaccacaccaucaccggcaagaccucccucccccgcugcuggcucgucuccaacggcuccuaccucaacgagacccacuucuccgacgacaucgagcagcaggccgacaacaugaucaccgagcuccuccagaaggaguacaucgaccgccagggcaagaccccccucggccucgucgaccucuucgucuucuccaccuccuucuaccucaucuccaucuuccuccaccucgucaagauccccacccaccgccacaucaccggcaagcccugccccaagccccaccgccucaaccacaugggcaucugcuccugcggccucuacaagcaccccggcguccccguccgcuggaagcgcuga

SEQ ID NO: 898 - RNA, 1473 nt, Artificial Sequence
  derived and/or modified protein sequence (opt2) from LASV(LASV251-NIG-2010;Clade II)__AIT17666__GPC
augggccagaucgucaccuucuuccaggaggucccccacgucaucgaggaggucaugaacaucguccucaucgcccucucccuccucgccauccucaagggcaucuacaacgucgccaccugcggccucuucggccucgucuccuuccuccuccucugcggccgcuccugcuccaccaccuacaagggcgucuacgagcuccagacccucgagcucgacauggccucccucaacaugaccaugccccucuccugcaccaagaacaacucccaccacuacaucauggucggcaacgagaccggccucgagcucacccucaccaacaccuccaucaucaaccacaaguucugcaaccucuccgacgcccacaagaagaaccucuacgaccacgcccucauguccaucaucuccaccuuccaccucuccauccccaacuucaaccaguacgaggccauguccugcgacuucaacggcggcaagaucuccguccaguacaaccucucccacaccuacgccgucgacgccgccaaccacugcggcaccaucgccaacggcguccuccagaccuucaugcgcauggccuggggcggcuccuacaucgcccucgacuccggcaagggcuccugggacugcaucaugaccuccuaccaguaccucaucauccagaacaccaccugggaggaccacugccaguucucccgccccucccccaucggcuaccucggccuccucucccagcgcacccgcgacaucuacaucucccgccgccuccucggcaccuucaccuggacccucuccgacuccgagggcaacgagacccccggcggcuacugccucacccgcuggaugcucaucgaggccgagcucaagugcuucggcaacaccgccgucgccaagugcaacgagaagcacgacgaggaguucugcgacaugcuccgccucuucgacuucaacaagcaggccauccgccgccucaagaccgaggcccagauguccauccagcucaucaacaaggccgucaacgcccucaucaacgaccagcucaucaugaagaaccaccuccgcgacaucaugggcauccccuacugcaacuacuccaaguacugguaccucaaccacaccgucaccggcaagaccucccucccccgcugcuggcucgucuccaacggcuccuaccucaacgagacccacuucuccgacgacaucgagcagcaggccgacaacaugaucaccgagcuccuccagaaggaguacauggaccgccagggcaagaccccccucggccucgucgaccucuucgucuucuccaccuccuucuaccucaucuccaucuuccuccaccucgucaagauccccacccaccgccacaucaccggcaagcccugccccaagccccaccgccucaaccacaugggcaucugcuccugcggccucuacaagcaccccggcguccccgucaaguggaagcgcuga

SEQ ID NO: 899 - RNA, 1473 nt, Artificial Sequence
  derived and/or modified protein sequence (opt2) from LASV(LASV253-NIG-2011;Clade II)__AIT17670__GPC
augggccagaucaucaccuucuuccaggaggucccccacgucaucgaggaggucaugaacaucguccucaucgcccucucccuccucgccauccucaagggcaucuacaacgucgccaccugcggccucuucggccucgucuccuuccuccuccucugcggccgcuccugcuccaccaccuacaagggcgucuacgagcuccagacccucgagcucgacauggccucccucaacaugaccaugccccucuccugcaccaagaacaacucccaccacuacaucauggucggcaacgagaccggccucgagcucacccucaccaacaccuccaucaucaaccacaaguucugcaaccucuccgacgcccacaagaagaaccucuacgaccacgcccucauguccaucaucuccaccuuccaccucuccauccccaacuucaaccaguacgaggccauguccugcgacuucaacggcggcaagaucuccguccaguacaaccucucccacaccuacgccgucgacgccgccaaccacugcggcaccaucgccaacggcguccuccagaccuucaugcgcauggccuggggcggcuccuacaucgcccucgacuccggcaagggcuccugggacugcaucaugaccuccuaccaguaccucaucauccagaacaccaccugggaggaccacugccaguucucccgccccucccccaucggcuaccucggccuccucucccagcgcacccgcgacaucuacaucucccgccgccuccucggcaccuucaccuggacccucuccgacuccgagggcaacgagacccccggcggcuacugccucacccgcuggaugcucaucgaggccgagcucaagugcuucggcaacaccgccgucgccaagugcaacgagaagcacgacgaggaguucugcgacaugcuccgccucuucgacuucaacaagcaggccauccgccgccucaaggccgaggcccagauguccauccagcucaucaacaaggccgucaacgcccucaucaacgaccagcucaucaugaagaaccaccuccgcgacaucaugggcauccccuacugcaacuacuccaaguacugguaccucaaccacaccgucaccggccgcaccucccucccccgcugcuggcucgucuccaacggcuccuaccucaacgagacccacuucuccgacgacaucgagcagcaggccgacaacaugaucaccgagcuccuccagaaggaguacaucgaccgccagggcaagaccccccucggccucgucgaccucuucgucuucuccaccuccuucuaccucaucuccaucuuccuccaccucgucaagauccccacccaccgccacaucaucggcaagcccugccccaagccccaccgccucaaccacaugggcaucugcuccugcggccucuacaagcaccccggcguccccgucaaguggaagcgcuga

SEQ ID NO: 900 - RNA, 1473 nt, Artificial Sequence
  derived and/or modified protein sequence (opt2) from LASV(LASV254-NIG-2011;Clade II)__AIT17674__GPC
augggccagaucaucaccuucuuccaggaggucccccacgucaucgaggaggucaugaacaucguccucaucgcccucucccuccucgccauccucaagggcaucuacaacgucgccaccugcggccucuucggccucgucuccuuccuccuccucugcggccgcuccugcuccaccaccuacaagggcgucuacgagcuccagacccucgagcucgacaugaccaaccucaacaugaccaugccccucuccugcaccaagaacaacucccaccacuacaucauggucggcaacgagaccggccucgagcucacccucaccaacaccuccaucaucaaccacaaguucugcaaccucuccgacgcccacaagaagaaccucuacaaccacgcccucauguccaucaucuccaccuuccaccucuccauccccaacuucaaccaguacgaggccauguccugcgacuucaacggcggcaagaucuccguccaguacaaccucucccacuccuacgccgucgacgccgccaaccacugcggcaccaucgccaacggcguccuccagaccuucaugcgcauggccuggggcggcuccuacaucgcccucgacuccggcaagggcaacugggacugcaucaugaccuccuaccaguaccucaucauccagaacaccaccugggaggaccacugccaguucucccgccccucccccaucggcuaccucggccuccucucccagcgcacccgcgacaucuacaucucccgccgccuccucggcaccuucaccuggacccucuccgacuccgagggcaacgagacccccggcggcuacugccucacccgcuggaugcucaucgaggccgagcucaagugcuucggcaacaccgccgucgccaagugcaacgagaagcacgacgaggaguucugcgacaugcuccgccucuucgacuucaacaagcaggccauccgccgccucaagaccgaggcccaggccaacauccagcucaucaacaaggccgucaacgcccucaucaacgaccagcucaucaugaagaaccaccuccgcgacaucaugggcauccccuacugcaacuacuccaaguacugguaccucaaccacaccgucaccggcaagaccucccucccccgcugcuggcucgucuccaacggcuccuaccucaacgagacccacuucuccgacgacaucgagcagcaggccgacaacaugaucaccgagcuccuccagaaggaguacauggaccgccagggcaagaccccccucggccucgucgaccucuucgucuucuccaccuccuucuaccucaucuccaucuuccuccaccucgucaagauccccacccaccgccacgucaucggcaagcccugccccaagccccaccgccucaaccacaugggcaucugcuccugcggccucuacaagcaccccggcguccccgucaaguggaagcgcuga

SEQ ID NO: 901 - RNA, 1473 nt, Artificial Sequence
  derived and/or modified protein sequence (opt2) from LASV(LASV256-NIG-2010;Clade II)__AIT17678__GPC
augggccagaucaucaccuucuuccaggaggucccccacgucaucgaggaggucaugaacaucguccucaucacccucucccuccucgccauccucaagggcaucuacaacaucgccaccugcggccucuucggccucgucuccuuccuccuccucugcggccgcuccugcuccaccaccuacaagggcgucuacgagcuccagacccucgagcucgacaugaccucccucaacaugaccaugccccucuccugcaccaagaacaacucccaccacuacaucauggucggcaacgagaccggccucgagcucacccucaccaacaccuccaucaucaaccacaaguucugcaaccucuccgacgcccacaagaagaaccucuacgaccacgcccucauguccaucaucuccaccuuccaccucuccauccccaacuucaaccaguacgaggccauguccugcgacuucaacggcggcaagaucuccguccaguacaaccucucccacaccuacgccgucgacgccgccaaccacugcggcaccaucgccaacggcguccuccagaccuucaugcgcauggccuggggcggcuccuacaucgcccucgacuccggcaagggcuccugggacugcaucaugaccuccuaccaguaccucaucauccagaacaccaccugggaggaccacugccaguucucccgccccucccccaucggcuaccucggccuccucucccagcgcacccgcgacaucuacaucucccgccgccuccucggcaccuucaccuggacccucuccgacuccgagggcaacgagacccccggcggcuacugccucacccgcuggaugcucaucgaggccgagcucaagugcuucggcaacaccgccgucgccaagugcaacgagaagcacgacgaggaguucugcgacaugcuccgccucuucgacuucaacaagcaggccauccgccgccucaagaccgaggcccagauguccauccagcucaucaacaaggccgucaacgcccucaucaacgaccagcucaucaugaagaaccaccuccgcgacaucaugggcauccccuacugcaacuacuccaaguacugguaccucaaccacaccgucaccggcaagaccucccucccccgcugcuggcucgucuccaacggcuccuaccucaacgagacccacuucuccgacgacaucgagcagcaggccgacaacaugaucaccgagcuccuccagaaggaguacaucgaccgccagggcaagaccccccucggccucgucgaccucuucgucuucuccaccuccuucuaccucaucuccaucuuccuccaccucgucaagauccccacccaccgccacaucaucggcaagcccugccccaagccccaccgccucaaccacaugggcaucugcuccugcggccucuacaagcaccccggcauccccgucaaguggaagcgcuga

SEQ ID NO: 902 - RNA, 1473 nt, Artificial Sequence
  derived and/or modified protein sequence (opt2) from LASV(LASV267-NIG-2010;Clade II)__AIT17686__GPC
augggccagaucaucaccuucuuccaggaggucccccacgucaucgaggaggucaugaacaucguccucaucgcccucucccuccucgccauccucaagggcaucuacaacgucgccaccugcggccucuucggccucgucuccuuccuccuccucugcggccgcuccugcuccaccaccuacaagggcgucuacgagcuccagacccucgagcucgacauggccucccucaacaugaccaugccccucuccugcaccaagaacaacucccaccacuacaucauggucggcaacgagaccggccucgagcucacccucaccaacaccuccaucaucaaccacaaguucugcaaccucuccgacgcccacaagaagaaccucuacgaccacgcccucauguccaucaucuccaccuuccaccucuccauccccaacuucaaccaguacgaggccauguccugcgacuucaacggcggcaagaucuccguccaguacaaccucucccacaccuacgccgucgacgccgccaaccacugcggcaccaucgccaacggcguccuccagaccuucaugcgcauggccuggggcggcuccuacaucgcccucgacucccgcaagggcuccugggacugcaucaugaccuccuaccaguaccucaucauccagaacaccaccugggaggaccacugccaguucucccgccccucccccaucggcuaccucggccuccucucccagcgcacccgcgacaucuacaucucccgccgccuccucggcaccuucaccuggacccucuccgacuccgagggcaacgagacccccggcggcuacugccucacccgcuggaugcucaucgaggccgagcucaagugcuucggcaacaccgccgucgccaagugcaacgagaagcacgacgaggaguucugcgacaugcuccgccucuucgacuucaacaagcaggccauccgccgccucaagaccgaggcccagauguccauccagcucaucaacaaggccgucaacgcccucaucaacgaccagcucaucaugaagaaccaccuccgcgacaucaugggcauccccuacugcaacuacuccaaguacugguaccucaaccacaccgucaccggcaagaccucccucccccgcugcuggcucgucuccaacggcuccuaccucaacgagacccacuucuccgacgacaucgagcagcaggccgacaacaugaucaccgagcuccuccagaaggaguacauggaccgccagggcaagaccccccucggccucgucgaccucuucgucuucuccaccuccuucuaccucaucuccaucuuccuccaccucaucaagauccccacccaccgccacgucaucggcaagcccugccccaagccccaccgccucaaccacaugggcaucugcuccugcggccucuacaagcaccccggcguccccgucaaguggaagcgcuga

SEQ ID NO: 903 - RNA, 1473 nt, Artificial Sequence
  derived and/or modified protein sequence (opt2) from LASV(LASV271-NIG-2010;Clade II)__AIT17690__GPC
augggccagaucaucaccuucuuccaggaggucccccacgucaucgaggaggucaugaacaucguccucaucgcccucucccuccucgccauccucaagggcaucuacaacgucgccaccugcggccucuucggccucgucuccuuccuccuccucugcggccgcuccugcuccaccaccuacaagggcgucuacgagcuccagacccucgagcucgacauggccucccucaacaugaccaugccccucuccugcaccaagaacaacucccaccacuacaucauggucggcaacgagaccggccucgagcucacccucaccaacaccuccaucaucaaccacaaguucugcaaccucuccgacgcccacaagaagaaccucuacgaccacgcccucauguccaucaucuccaccuuccaccucuccauccccaacuucaaccaguacgaggccauguccugcgacuucaacggcggcaagaucuccguccaguacaaccucucccacgccuacgccgucgacgccgccucccacugcggcaccgucgccaacggcguccuccagaccuucaugcgcauggccuggggcggcuccuacaucgcccucgacuccggcaagggcuccugggacugcaucaugaccuccuaccaguaccucaucauccagaacaccaccugggaggaccacugccaguucucccgccccucccccaucggcuaccucggccuccucucccagcgcacccgcgacaucuacaucucccgccgccuccucggcaccuucaccuggacccucuccgacuccgagggcaacgagacccccggcggcuacugccucacccgcuggaugcucaucgaggccgagcucaagugcuucggcaacaccgccgucgccaagugcaacgagaagcacgacgaggaguucugcgacaugcuccgccucuucgacuucaacaagcaggccauccgccgccucaagaccgaggcccagauguccauccagcucaucaacaaggccgucaacgcccucaucaacgaccagcucaucaugaagaaccaccuccgcgacaucaugggcauccccuacugcaacuacuccaaguacugguaccucaaccacaccgucaccggccgcaccucccucccccgcugcuggcucgucuccaacggcuccuaccucaacgagacccacuucuccgacgacaucgagcagcaggccgacaacaugaucaccgagcuccuccagaaggaguacauggaccgccagggcaagaccccccucggccucgucgaccucuucgucuucuccaccuccuucuaccucaucuccaucuuccuccaccucgucaagauccccacccaccgccacgucaucggcaagcccugccccaagccccaccgccucaaccacaugggcaucugcuccugcggccucuacaagcaccccggcguccccgucaaguggaagcgcuga

SEQ ID NO: 904 - RNA, 1473 nt, Artificial Sequence
  derived and/or modified protein sequence (opt2) from LASV(LASV274-NIG-2010;Clade II)__AIT17694__GPC
augggccagaucaucaccuucuuccaggaggucccccacgucaucgaggaggucaugaacaucguccucaucgcccucucccuccucgccauccucaagggcaucuacaacgucgccaccugcggccucuucggccucgucuccuuccuccuccucugcggccgcuccugcuccaccaucuacaagggcgucuacgagcuccagacccucgagcucgacauggccucccucaacaugaccaugccccucuccugcaccaagaacaacucccaccacuacaucauggucggcaacgagaccggccucgagcucacccucaccaacaccuccaucaucaaccacaaguucugcaaccucuccgacgcccacaagaagaaccucuacgaccacgcccucauguccaucaucuccaccuuccaccucuccauccccaacuucaaccaguacgaggccauguccugcgacuucaacggcggcaagaucuccguccaguacaaccucucccacaccuacgccgucgacgccgccaaccacugcggcaccaucgccaacggcguccuccagaccuucaugcgcauggccuggggcggcuccuacaucgcccucgacuccggcaagggcuccugggacugcaucaugaccuccuaccaguaccucaucauccagaacaccaccugggaggaccacugccaguucucccgccccucccccaucggcuaccucggccuccucucccagcgcacccgcgacaucuacaucucccgccgccuccucggcaccuucaccuggacccucuccgacuccgagggcaacgagacccccggcggcuacugccucacccgcuggaugcucaucgaggccgagcucaagugcuucggcaacaccgccgucgccaagugcaacgagaagcacgacgaggaguucugcgacaugcuccgccucuucgacuucaacaagcaggccauccgccgccucaagaccgaggcccagauguccauccagcucaucaacaaggccgucaacgcccucaucaacgaccagcucaucaugaagaaccaccuccgcgacaucaugggcauccccuacugcaacuacuccaaguacugguaccucaaccacaccgucaccggcaagaccucccucccccgcugcuggcucgucuccaacggcuccuaccucaacgagacccacuucuccgacgacaucgagcagcaggccgacaacaugaucaccgagcuccuccagaaggaguacaucgaccgccagggcaagaccccccucggccucgucgaccucuucgucuucuccaccuccuucuaccucaucuccaucuuccuccaccucgucaagauccccacccaccgccacgucgucggcaagcccugccccaagccccaccgccucaaccacaugggcaucugcuccugcggccucuacaagcaccccggcguccccgucaaguggaagcgcuga

SEQ ID NO: 905 - RNA, 1473 nt, Artificial Sequence
  derived and/or modified protein sequence (opt2) from LASV(LASV719-NIG-2009;Clade II)__AIT17704__GPC
augggccagaucaucaccuucuuccaggaggucccccacgucaucgaggaggucaugaacaucguccucaucgcccucucccuccucgccauccucaagggcaucuacaacgucgccaccugcggccucuucggccucgucuccuuccuccuccucugcggccgcuccugcuccaccaccuacaagggcgucuacgagcuccagacccucgagcucgacauggccucccucaacaugaccaugccccucuccugcaccaagaacaacucccaccacuacaucauggucggcaacgagaccggccucgagcucacccucaccaacaccuccaucaucaaccacaaguucugcaaccucuccgacgcccacaagaagaaccucuacgaccacgcccucauguccaucaucuccaccuuccaccucuccauccccaacuucaaccaguacgaggccauguccugcgacuucaacggcggcaagaucuccguccaguacaaccucucccacaccuacgccgucgacgccgccaaccacugcggcaccaucgccaacggcguccuccagaccuucaugcgcauggccuggggcggcuccuacaucgcccucgacuccggcaagggcuccugggacugcaucaugaccuccuaccaguaccucaucauccagaacaccaccugggaggaccacugccaguucucccgccccucccccaucggcuaccucggccuccucucccagcgcacccgcgacaucuacaucucccgccgccuccucggcaccuucaccuggacccucuccgacuccgagggcaacgagacccccggcggcuacugccucacccgcuggaugcucaucgaggccgagcucaagugcuucggcaacaccgccgucgccaagugcaacgagaagcacgacgaggaguucugcgacaugcuccgccucuucgacuucaacaagcaggccauccgccgccucaagaccgaggcccagauguccauccagcucaucaacaaggccgucaacgcccucaucaacgaccagcucaucaugaagaaccaccuccgcgacaucaugggcauccccuacugcaacuacuccaaguacugguaccucaaccacaccgucaccggcaagaccucccucccccgcugcuggcucgucuccaacggcuccuaccucaacgagacccacuucuccgacgacaucgagcagcaggccgacaacaugaucaccgagcuccuccagaaggaguacaucgaccgccagggcaagaccccccucggccucgucgaccucuucgucuucuccaccuccuucuaccucaucuccaucuuccuccaccucgucaagauccccacccaccgccacgucaucggcaagcccugccccaagccccaccgccucaaccacaugggcaucugcuccugcggccucuacaagcaccccggcguccccgucaaguggaagcgcuga

SEQ ID NO: 906 - RNA, 1473 nt, Artificial Sequence
  derived and/or modified protein sequence (opt2) from LASV(LASV738-NIG-2009;Clade II)__AIT17712__GPC
augggccagaucaucaccuucuuccaggaggucccccacgucaucgaggaggucaugaacaucguccucaucgcccucucccuccucgccauccucaagggcaucuacaacgucgccaccugcggccucuucggccucgucuccuuccuccuccucugcggccgcuccugcuccaccaccuacaagggcgucuacgagcuccagacccucgagcucgacauggccucccucaacaugaccaugccccucuccugcaccaagaacaacucccaccacuacaucauggucggcaacgagaccggccucgagcucacccucaccaacaccuccaucaucaaccacaaguucugcaaccucuccgacgcccacaagaagaaccucuacgaccacgcccucauguccaucaucuccaccuuccaccucuccauccccaacuucaaccaguacgaggccauguccugcgacuucaacggcggcaagaucuccguccaguacaaccucucccacaccuacgccgucgacgccgccaaccacugcggcaccaucgccaacggcguccuccagaccuucaugcgcauggccuggggcggcuccuacaucgcccucgacuccggcaagggcgccugggacugcaucaugaccuccuaccaguaccucaucauccagaacaccaccugggaggaccacugccaguucucccgccccucccccaucggcuaccucggccuccucucccagcgcacccgcgacaucuacaucucccgccgccuccucggcaccuucaccuggacccucuccgacuccgagggcaacgagacccccggcggcuacugccucacccgcuggaugcucaucgaggccgagcucaagugcuucggcaacaccgccgucgccaagugcaacgagaagcacgacgaggaguucugcgacaugcuccgccucuucgacuucaacaagcaggccaucaugcgccucaagaccgaggcccagauguccauccagcucaucaacaaggccgucaacgcccucaucaacgaccagcucaucaugaagaaccaccuccgcgacaucaugggcauccccuacugcaacuacuccaaguacugguaccucaaccacaccgucaccggcaagaccucccucccccgcugcuggcucgucuccaacggcuccuaccucaacgagacccacuucuccgacgacaucgagcagcaggccgacaacaugaucaccgagaugcuccagaaggaguacaucgaccgccagggcaagaccccccucggccucgucgaccucuucgucuucuccaccuccuucuaccucaucuccaucuuccuccaccucgucaagauccccacccaccgccacgucaucggcaagcccugccccaagccccaccgccucaaccacaugggcaucugcuccugcggccucuacaagcaccccggcguccccguccgcuggaagcgcuga

SEQ ID NO: 907 - RNA, 1473 nt, Artificial Sequence
  derived and/or modified protein sequence (opt2) from LASV(LASV966-NIG-2009;Clade II)__AIT17718__GPC
augggccagaucaucaccuucuuccaggaggucccccacgucaucgaggaggucaugaacaucguccucaucgcccucucccuccucgccauccucaagggcaucuacaacgucgccaccugcggccucuucggccucgucuccuuccuccuccucugcggccgcuccugcuccaccaccuacaagggcgucuacgagcuccagacccucgagcucgacauggccucccucaacaugaccaugccccucuccugcaccaagaacaacucccaccacuacauccgcgucggcaacgagaccggccucgagcucacccucaccaacgccuccaucaucaaccacaaguucugcaaccucuccgacgcccacaagaagaaccucuacgaccacgcccucauguccaucaucuccaccuuccaccucuccauccccaacuucaaccaguacgaggccauguccugcgacuucaacggcggcaagaucuccguccaguacaaccucucccacgccuacgccaucgacgccgccaaccacugcggcaccgucgccaacggcguccuccagaccuucaugcgcauggccuggggcggcuccuacaucgcccucgacuccggccgcggcaacugggacugcaucaugaccuccuaccaguaccucaucauccagaacaccaccugggaggaccacugccaguucucccgccccucccccaucggcuaccucggccuccucucccagcgcacccgcgacaucuacaucucccgccgccuccucggcaccuucaccuggacccucuccgacuccgagggcaacgagacccccggcggcuacugccucacccgcuggaugcucaucgaggccgagcucaagugcuucggcaacaccgccgucgccaagugcaacgagaagcacgacgaggaguucugcgacaugcuccgccucuucgacuucaacaagcaggccauccgccgccucaagaccgaggcccagauguccauccagcucaucaacaaggccgucaacgcccucaucaacgaccagcucaucaugaagaaccaccuccgcgacaucaugggcauccccuacugcaacuacuccaaguacugguaccucaaccacaccgucaccggcaagaccucccucccccgcugcuggcucgucuccaacggcuccuaccucaacgagacccacuucuccgacgacaucgagcagcaggccgacaacaugaucaccgagcuccuccagaaggaguacauggaccgccagggcaagaccccccucggccucgucgaccucuucgucuucuccaccuccuucuaccucaucuccaucuuccuccaccucgucaagauccccacccaccgccacgucaucggcaagcccugccccaagccccaccgccucaaccacaugggcaucugcuccugcggcuucuacaagcaccccggcguccccgucaaguggaagcgcuga

SEQ ID NO: 908 - RNA, 1473 nt, Artificial Sequence
  derived and/or modified protein sequence (opt2) from LASV(LASV969-NIG-2009;Clade II)__AIT17724__GPC
augggccagaucaucaccuucuuccaggaggucccccacgucaucgaggaggucaugaacaucguccucaucgcccucucccuccucgccauccucaagggcaucuacaacgucgccaccugcggccucuucggccucgucuccuuccuccuccucugcggccgcuccugcuccaccaccuacaagggcgucuacgagcuccagacccucgagcucgacauggccaaccucaacaugaccaugccccucuccugcaccaagaacaacucccaccacuacaucauggucggcaacgagaccggccucgagcucacccucaccaacaccuccaucaucaaccacaaguucugcaaccucuccgacgcccacaagaagaaccucuacgaccacgcccucauguccaucaucuccaccuuccaccucuccauccccaacuucaaccaguacgaggccauguccugcgacuucaacggcggcaagaucuccguccaguacaaccucucccacaccuacgccgucgacgccgccaaccacugcggcaccgucgccaacggcguccuccagaccuucaugcgcauggccuggggcggcuccuacaucgcccucgacuccggcaagggcuccugggacugcaucaugaccuccuaccaguaccucaucauccagaacaccaccugggaggaccacugccaguucucccgccccucccccaucggcuaccucggccuccucucccagcgcacccgcgacaucuacaucucccgccgccuccucggcaccuucaccuggacccucuccgacuccgagggcaacgagacccccggcggcuacugccucacccgcuggaugcucaucgaggccgagcucaagugcuucggcaacaccgccgucgccaagugcaacgagaagcacgacgaggaguucugcgacaugcuccgccucuucgacuucaacaagcaggccauccgccgccucaagaccgaggcccagauguccauccagcucaucaacaaggccgucaacgcccucaucaacgaccagcucaucaugaagaaccaccuccgcgacaucaugggcauccccuacugcaacuacuccaaguacugguaccucaaccacaccgucaccggcaagaccucccucccccgcugcuggcucgucuccaacggcuccuaccucaacgagacccacuucuccgacgacaucgagcagcaggccgacaacaugaucaccgagcuccuccagaaggaguacauggaccgccagggcaagaccccccucggccucgucgaccucuucgucuucuccaccuccuucuaccucaucuccaucuuccuccaccucgucaagauccccacccaccgccacaucaugggcaagcccugccccaagccccaccgccucaaccacaugggcaucugcuccugcggccucuacaagcaccccggcguccccgucaaguggaagcgcuga

SEQ ID NO: 909 - RNA, 1473 nt, Artificial Sequence
  derived and/or modified protein sequence (opt2) from LASV(LASV971-NIG-2009;Clade II)__AIT17728__GPC
augggccagaucaucaccuucuuccaggaggucccccacgucaucgaggaggucaugaacaucguccucaucgcccucucccuccucgccauccucaagggcaucuacaacgucgccaccugcggccucuucggccucgucuccuuccuccuccucugcggccgcuccugcuccaccaccuacaagggcgucuacgagcuccagacccucgagcucgacaugggcucccucaacaugaccaugccccucuccugcaccaagaacaacucccaccacuacaucauggucggcaacgagaccggccucgagcucacccucaccaacaccuccaucaucaaccacaaguucugcaaccucuccgacgcccacaagaagaaccucuacgaccacgcccucauguccaucaucuccaccuuccaccucuccauccccaacuucaaccaguacgaggccauguccugcgacuucaacggcggcaagaucuccguccaguacaaccucucccacaccuacgccgucgacgccgccaaccacugcggcaccaucgccaacggcguccuccagaccuucaugcgcauggccuggggcggcuccuacaucgcccucgacuccggcaagggcuccugggacugcaucaugaccuccuaccaguaccucaucauccagaacaccaccugggaggaccacugccaguucucccgccccucccccaucggcuaccucggccuccucucccagcgcacccgcgacaucuacaucucccgccgccuccucggcaccuucaccuggacccucuccgacuccgagggcaacgagacccccggcggcuacugccucacccgcuggaugcucaucgaggccgagcucaagugcuucggcaacaccgccgucgccaagugcaacgagaagcacgacgaggaguucugcgacaugcuccgccucuucgacuucaacaagcaggccauccgccgccucaagaccgaggcccagauguccauccagcucaucaacaaggccgucaacgcccucaucaacgaccagcucaucaugaagaaccaccuccgcgacaucaugggcauccccuacugcaacuacuccaaguacugguaccucaaccacaccgucaccggcaagaccucccucccccgcugcuggcucgucuccaacggcuccuaccucaacgagacccacuucuccgacgacaucgagcagcaggccgacaacaugaucaccgagcuccuccagaaggaguacauggaccgccagggcaagaccccccucggccucgucgaccucuucgucuucuccaccuccuucuaccucaucuccaucuuccuccaccucgucaagauccccacccaccgccacgucaucggcaagcccugccccaagccccaccgccucaaccacaugggcaucugcuccugcggccucuacaagcaccccggcguccccgucaaguggaagcgcuga

SEQ ID NO: 910 - RNA, 1473 nt, Artificial Sequence
  derived and/or modified protein sequence (opt2) from LASV(LASV975-NIG-2009;Clade II)__AIT17732__GPC
augggccagaucaucaccuucuuccaggaggucccccacgucaucgaggaggucaugaacaucguccucaucgcccucucccuccucgccauccucaagggcaucuacaacgucgccaccugcggccucuucggccucgucuccuuccuccuccucugcggccgcuccugcuccaccaccuacaagggcgucuacgagcuccagacccucgagcucgacauggccucccucaacaugaccaugccccucuccugcaccaagaacaacucccaccacuacaucauggucggcaacgagaccggccucgagcucacccucaccaacaccuccaucaucaaccacaaguucugcaaccucuccgacgcccacaagaagaaccucuacgaccacgcccucauguccaucaucuccaccuuccaccucuccauccccaacuucaaccaguacgaggccauguccugcgacuucaacggcggcaagaucuccguccaguacaaccucucccacaccuacgccgucgacgccgccaaccacugcggcaccaucgccaacggcguccuccagaccuucaugcgcauggccuggggcggcuccuacaucgcccucgacuccggcaagggcuccugggacugcaucaugaccuccuaccaguaccucaucauccagaacaccaccugggaggaccacugccaguucucccgccccucccccaucggcuaccucggccuccucucccagcgcacccgcgacaucuacaucucccgccgccuccucggcaccuucaccuggacccucuccgacuccgagggcaacgagacccccggcggcuacugccucacccgcuggaugcucaucgaggccgagcucaagugcuucggcaacaccgccgucgccaagugcaacgagaagcacgacgaggaguucugcgacaugcuccgccucuucgacuucaacaagcaggccauccgccgccucaagaccgaggcccagauguccauccagcucaucaacaaggccgucaacgcccucaucaacgaccagcucaucaugaagaaccaccuccgcgacaucaugggcauccccuacugcaacuacuccaaguacugguaccucaaccacaccgucaccggcaagaccucccucccccgcugcuggcucgucuccaacggcuccuaccucaacgagacccacuucuccgacgacaucgagcagcaggccgacaacaugaucaccgagcuccuccagaaggaguacaucgaccgccagggcaagaccccccucggccucgucgaccucuucgucuucuccaccuccuucuaccucaucuccaucuuccuccaccucgucaagauccccacccaccgccacaucgucggcaagcccugccccaagccccaccgccucaaccacaugggcaucugcuccugcggccucuacaagcaccccggcguccccgucaaguggaagcgcuga

SEQ ID NO: 911 - RNA, 1473 nt, Artificial Sequence
  derived and/or modified protein sequence (opt2) from LASV(LASV976-NIG-2009;Clade II)__AIT17736__GPC
augggccagaucgucaccuucuuccaggaggucccccacgucaucgaggaggucaugaacaucguccucaucgcccucucccuccucgccauccucaagggcaucuacaacgucgccaccugcggccucuucggccucgucuccuuccuccuccucugcggccgcuccugcuccaccaccuacaagggcgucuacgagcuccagacccucgagcucgacauggccucccucaacaugaccaugccccucuccugcaccaagaacaacucccaccacuacaucauggucggcaacgagaccggccucgagcucacccucaccaacaccuccaucaucaaccacaaguucugcaaccucuccgacgcccacaagaaggaccucuacgaccacgcccucauguccaucaucuccaccuuccaccucuccauccccaacuucaaccaguacgaggccauguccugcgacuucaacggcggcaagaucuccguccaguacaaccucucccacaccuacgccgucgacgccgccaaccacugcggcaccaucgccaacggcguccuccagaccuucaugcgcauggccuggggcggcuccuacaucgcccucgacuccggcaagggcuccugggacugcaucaugaccuccuaccaguaccucaucauccagaacaccaccugggaggaccacugccaguucucccgccccucccccaucggcuaccucggccuccucucccagcgcacccgcgacaucuacaucucccgccgccuccucggcaccuucaccuggacccucuccgacuccgagggcaacgagacccccggcggcuacugccucacccgcuggaugcucaucgaggccgagcucaagugcuucggcaacaccgccgucgccaagugcaacgagaagcacgacgaggaguucugcgacaugcuccgccucuucgacuucaacaagcaggccaucaugcgccucaagaccgaggcccagauguccauccagcucaucaacaaggccgucaacgcccucaucaacgaccagcucaucaugaagaaccaccuccgcgacaucaugggcauccccuacugcaacuacuccaaguacugguaccucaaccacaccgucaccggcaagaccucccucccccgcugcuggcucgucuccaacggcuccuaccucaacgagacccgcuucuccgacgacaucgagcagcaggccgacaacaugaucaccgagaugcuccagaaggaguaccucgaccgccagggcaagaccccccucggccucgucgaccucuucgucuucuccaccuccuucuaccucaucuccaucuuccuccaccucgucaagauccccacccaccgccacaucaucggcaagcccugccccaagccccaccgccucaaccacaugggcaucugcuccugcggccucuacaagcaccccggcguccccgucaaguggaagcgcuga

SEQ ID NO: 912 - RNA, 1473 nt, Artificial Sequence
  derived and/or modified protein sequence (opt2) from LASV(LASV978-NIG-2009;Clade II)__AIT17744__GPC
augggccagaucaucaccuucuuccaggaggucccccacgucaucgaggaggucaugaacaucguccucaucgcccucucccuccucgccauccucaagggcaucuacaacgucgccaccugcggccucuucggccucauguccuuccuccuccucugcggccgcuccugcuccaccaccuacaagggcgucuacgagcuccagacccucgagcucgacauggccaaccucaacaugaccaugccccucuccugcaccaagaacaacucccaccacuacaucauggucggcaacgagaccggccucgagcucacccucaccaacaccuccaucaucaaccacaaguucugcaaccucuccgacgcccacaagaagaaccucuacgaccacgcccucauguccaucaucuccaccuuccaccucuccauccccaacuucaaccaguacgaggccauguccugcgacuucaacggcggcaagaucuccguccaguacaaccucucccacgccuacgccgucgacgccgccaaccacugcggcaccaucgccaacggcguccuccagaccuucaugcgcauggccuggggcggcuccuacaucgcccucgacuccggcaagggcuccugggacugcaucaugaccuccuaccaguaccucaucauccagaacaccuccugggaggaccacugccaguucucccgccccucccccaucggcuaccucggccuccucucccagcgcacccgcgacaucuacaucucccgccgccuccucggcaccuucaccuggacccucuccgacuccgagggcaacgagacccccggcggcuacugccucacccgcuggaugcucaucgaggccgagcucaagugcuucggcaacaccgccgucgccaagugcaacgagaagcacgacgaggaguucugcgacaugcuccgccucuucgacuucaacaagcaggccauccgccgccucaagaccgaggcccagauguccauccagcucaucaacaaggccgucaacgcccucaucaacgaccagcucaucaugaagaaccaccuccgcgacaucaugggcauccccuacugcaacuacuccaaguacugguaccucaaccacaccgucaccggcaagaccucccucccccgcugcuggcucgucuccaacggcuccuaccucaacgagacccacuucuccgacgacaucgagcagcaggccgacaacaugaucaccgagcuccuccagaaggaguacaucgaccgccagggcaagaccccccucggccucgucgaccucuucgucuucuccaccuccuucuaccucaucuccaucuuccuccaccucgucaagauccccacccaccgccacgucaucggcaagcccugccccaagccccaccgccucaaccacaugggcaucugcuccugcggccucuacaagcaccccggcguccccgucaaguggaagcgcuga

SEQ ID NO: 913 - RNA, 1473 nt, Artificial Sequence
  derived and/or modified protein sequence (opt2) from LASV(LASV981-NIG-2009;Clade II)__AIT17752__GPC
augggccagaucaucaccuucuuccacgaggucccccacgucaucgaggaggucaugaacaucguccucaucgcccucucccuccucgccauccucaagggcaucuacaacgucgccaccugcggccucuucggccucgucuccuuccuccuccucugcggccgcuccugcuccaccaccuacaagggcgucuacgagcuccagacccucgagcucgacauggccucccucaacaugaccaugccccucuccugcaccaagaacaacucccaccacuacaucauggucggcaacgagaccggccucgagcucacccucaccaacaccuccaucaucaaccacaaguucugcaaccucuccgacgcccacaagaagaaccucuacgaccacgcccucauguccaucaucuccaccuuccaccucuccauccccaacuucaaccaguacgaggccauguccugcgacuucaacggcggcaagaucuccguccaguacaaccucucccacaccuacgccaucgacgccgccaaccacugcggcaccaucgccaacggcguccuccagaccuucaugcgcauggccuggggcggcuccuacaucgcccucgacuccggccgcggcuccugggacugcaucaugaccuccuaccaguaccucaucauccagaacaccaccugggaggaccacugccaguucucccgccccucccccaucggcuaccucggccuccucucccagcgcacccgcgacaucuacaucucccgccgccuccucggcaccuucaccuggacccucuccgacuccgagggcaacgagacccccggcggcuacugccucacccgcuggaugcucaucgaggccgagcucaagugcuucggcaacaccgccgucgccaagugcaacgagaagcacgacgaggaguucugcgacaugcuccgccucuucgacuucaacaagcaggccauccgccgccucaagaccgaggcccagauguccauccagcucaucaacaaggccgucaacgcccucaucaacgaccagcucaucaugaagaaccaccuccgcgacaucaugggcauccccuacugcaacuacuccaaguacugguaccucaaccacaccgucaccggcaagaccucccucccccgcugcuggcucgucuccaacggcuccuaccucaacgagacccacuucuccgacgacaucgagcagcaggccgacaacaugaucaccgagcuccuccagaaggaguacaucgaccgccagggcaagaccccccucggccucgucgaccucuucgucuucuccaccuccuucuaccucaucuccaucuuccuccaccucgucaagauccccacccaccgccacgucaucggcaagcccugccccaagccccaccgccucaaccacaugggcaucugcuccugcggccucuacaagcaccccggcguccccgucaaguggaagcgcuga

SEQ ID NO: 914 - RNA, 1473 nt, Artificial Sequence
  derived and/or modified protein sequence (opt2) from LASV(LASV982-NIG-2009;Clade II)__AIT17756__GPC
augggccagaucaucaccuucuuccaggaggucccccacgucaucgaggaggucaugaacaucguccucaucgcccucucccuccucgccauccucaagggcaucuacaacgucgccaccugcggccucuucggccucgucuccuuccuccuccucugcggccgcuccugcuccaucaccuacaagggcgucuacgagcuccagacccucgagcucgacauggccucccucaacaugaccaugccccucuccugcaccaagaacaacucccaccacuacaucauggucggcaacgagaccggccucgagcucacccucaccaacaccuccaucaucaaccacaaguucugcaaccucuccgacgcccacaagaagaaccucuacgaccacgcccucauguccaucaucuccaccuuccaccucuccauccccaacuucaaccaguacgaggccauguccugcgacuucaacggcggcaagaucuccguccaguacaaccucucccacaccuacgccgucgacgccgccaaccacugcggcaccaucgccaacggcguccuccagaccuucaugcgcauggccuggggcggcuccuacaucgcccucgacuccggccgcggcuccugggacugcaucaugaccuccuaccaguaccucaucauccagaacaccaccugggaggaccacugccaguucucccgccccucccccaucggcuaccucggccuccucucccagcgcacccgcgacaucuacaucucccgccgccuccucggcaccuucaccuggacccucuccgacuccgagggcaacgagacccccggcggcuacugccucacccgcuggaugcucaucgaggccgagcucaagugcuucggcaacaccgccgucgccaagugcaacgagaagcacgacgaggaguucugcgacaugcuccgccucuucgacuucaacaagcaggccauccgccgccucaaggccgaggcccagauguccauccagcucaucaacaaggccgucaacgcccucaucaacgaccagcucaucaugaagaaccaccuccgcgacaucaugggcauccccuacugcaacuacuccaaguacugguaccucaaccacaccgucaccggccgcaccucccucccccgcugcuggcucgucuccaacggcuccuaccucaacgagacccacuucuccgacgacaucgagcagcaggccgacaacaugaucaccgagcuccuccagaaggaguacaucgaccgccagggcaagaccccccucggccucgucgaccucuucgucuucuccaccuccuucuaccucaucuccaucuuccuccaccucgucaagauccccacccaccgccacaucaucggcaagcccugccccaagccccaccgccucaaccacaugggcaucugcuccugcggccucuacaagcaccccggcguccccgucaaguggaagcgcuga

SEQ ID NO: 915 - RNA, 1473 nt, Artificial Sequence
  derived and/or modified protein sequence (opt2) from LASV(LASV988-NIG-2009;Clade II)__AIT17758__GPC
augggccagaucaucaccuucuuccaggaggucccccacgucaucgaggaggucaugaacaucguccucaucgcccucucccuccucgccauccucaagggcaucuacaacgucgccaccugcggccucuucggccucgucuccuuccuccuccucugcggccgcuccugcuccaccaccuacaagggcgucuacgagcuccagacccucgagcucaacauggccucccucaacaugaccaugccccucuccugcaccaagaacaacucccaccacuacaucauggucggcaacgagaccggccucgagcucacccucaccaacaccuccaucaucaaccacaaguucugcaaccucuccgacgcccacaagcgcaaccucuacgaccacgcccucauguccaucaucuccaccuuccaccucuccauccccaacuucaaccaguacgaggccauguccugcgacuucaacggcggcaagaucuccguccaguacaaccucucccacaccuacgccgucgacgccgccaagcacugcggcaccaucgccaacggcguccuccagaccuucaugcgcauggccuggggcggcuccuacaucgcccucgacuccggcaagggcuccugggacugcaucaugaccuccuaccaguaccucaucauccagaacaccaccugggaggaccacugcgaguucucccgccccucccccaucggcuaccucggccuccucucccagcgcacccgcgacaucuacaucucccgccgccuccucggcaccuucaccuggacccucuccgacuccgagggcaacgagacccccggcggcuacugccucacccgcuggaugcucaucgaggccgagcucaagugcuucggcaacaccgccgucgccaagugcaacgagaagcacgacgaggaguucugcgacaugcuccgccucuucgacuucaacaagcaggccauccgccgccucaaggccgaggcccagauguccauccagcucaucaacaaggccgucaacgcccucaucaacgaccagcucaucaugaagaaccaccuccgcgacaucaugggcauccccuacugcaacuacuccaaguacugguaccucaaccacaccgucaccggcaagaccucccucccccgcugcuggcucgucuccaacggcuccuaccucaacgagacccacuucuccgacgacaucgagcagcaggccgacaacaugaucaccgagcuccuccagaaggaguacaucgaccgccagggcaagaccccccucggccucgucgaccucuucgucuucuccaccuccuucuaccucaucuccaucuuccuccaccucgucaagauccccacccaccgccacgucaucggcaagcccugccccaagccccaccgccucaaccacaugggcaucugcuccugcggccucuacaagcaccccggcguccccgucaaguggaagcgcuga

SEQ ID NO: 916 - RNA, 1473 nt, Artificial Sequence
  derived and/or modified protein sequence (opt2) from LASV(LASV989-NIG-2009;Clade II)__AIT17762__GPC
augggccagaucaucaccuucuuccaggaggucccccacgucaucgaggaggucaugaacaucguccucaucgcccucucccuccucgccauccucaagggcaucuacaacgucgccaccugcggccucuucggccucgucuccuuccuccuccucugcggccgcuccugcuccaccaccuacaagggcgucuacgagcuccagacccucgagcucgacauggccucccucaacaugaccaugccccucuccugcaccaagaacaacucccaccacuacaucauggucggcaacgagaccggccucgagcucacccucaccaacaccuccaucaucucccacaaguucugcaaccucuccgacgcccacaagaagaaccucuacgaccacgcccucauguccaucaucuccaccuuccaccucuccauccccaacuucaaccaguacgaggccauguccugcgacuucaacggcggcaagaucuccguccaguacaaccucucccacaccuacgccgucgacgccgccaaccacugcggcaccaucgccaacggcguccuccagaccuucaugcgcauggccuggggcggcuccuacaucgcccucgacuccggcaagggcuccugggacugcaucaugaccuccuaccaguaccucaucauccagaacaccaccugggaggaccacugccaguucucccgccccucccccaucggcuaccucggccuccucucccagcgcacccgcgacaucuacaucucccgccgccuccucggcaccuucaccuggacccucuccgacuccgagggcaacgaggcccccggcggcuacugccucacccgcuggaugcucaucgaggccgagcucaagugcuucggcaacaccgccgucgccaagugcaacgagaagcacgacgaggaguucugcgacaugcuccgccucuucgacuucaacaagcaggccauccgccgccucaagaccgaggcccagauguccauccagcucaucaacaaggccgucaacgcccucaucaacgaccagcucaucaugaagaaccaccuccgcgacaucaugggcauccccuacugcaacuacucccgcuacugguaccucaaccacaccgucaccggcaagaccucccucccccgcugcuggcucgucuccaacggcuccuaccucaacgagacccacuucuccgacgacaucgagcagcaggccgacaacaugaucaccgagcuccuccagaaggaguacauggaccgccagggcaagaccccccucggccucgucgaccucuucgucuucuccaccuccuucuaccucaucuccaucuuccuccaccucgucaagauccccacccaccgccacgucaucggcaagcccugccccaagccccaccgccucaaccacaugggcaucugcuccugcggccucuacaagcaccccggcguccccgucaaguggaagcgcuga

SEQ ID NO: 917 - RNA, 1473 nt, Artificial Sequence
  derived and/or modified protein sequence (opt2) from LASV(LASV991-NIG-2009;Clade II)__AIT17770__GPC
augggccagaucgucaccuucuuccaggaggucccccacgucaucgaggaggucaugaacaucguccucaucgcccucucccuccucgccauccucaagggcaucuacaacgucgccaccugcggccucuucggccucgucuccuuccuccuccucugcggccgcuccugcuccaccaccuacaagggcgucuacgagcuccaggcccucgagcucgacauguccucccucaacaugaccaugccccucuccugcaccaagaacaacucccaccacuacaucauggucggcaacgagaccggccucgagcucacccucaccaacaccuccaucauccaccacaaguucugcaaccucuccgacgcccacaagaaggaccucuacgaccacgcccucauguccaucaucuccaccuuccaccucuccauccccaacuucaaccaguacgaggccauguccugcgacuucaacggcggcaagaucuccguccaguacaaccucucccacaccuacgccgucgacgccgccaaccacugcggcaccaucgccaacggcguccuccagaccuucaugcgcauggccuggggcggcuccuacaucgcccucgacuccggcaagggcggcugggacugcaucaugaccuccuaccaguuccucaucauccagaacaccaccugggaggaccacugccaguucucccgccccucccccaucggcuaccucggccuccucucccagcgcacccgcgacaucuacaucucccgccgccuccucggcaccuucaccuggacccucuccgacuccgagggcaacgagacccccggcggcuacugccucacccgcuggaugcucaucgaggccgagcucaagugcuucggcaacaccgccgucgccaagugcaacgagaagcacgacgaggaguucugcgacaugcuccgccucuucgacuucaacaagcaggccaucaagcgccucaagaccgaggcccagauguccauccaccucaucaacaaggccgucaacgcccucaucaacgaccagcucaucaugaagaaccaccuccgcgacaucaugggcauccccuacugcaacuacuccaaguacugguaccucaaccacaccgucaccggcaagaccucccucccccgcugcuggcucgucuccaacggcuccuaccucaacgagacccacuucuccgacgacaucgagcagcaggccgacaacaugaucaccgagcuccuccagaaggaguacaucgaccgccagggcaagaccccccucggccucgucgaccucuucgucuucuccaccuccuucuaccucaucuccaucuuccuccaccucgucaagauccccacccaccgccacgucaucggcaagcccugccccaagccccaccgccucaaccacaugggcaucugcuccugcggccucuacaagcaccccggcguccccguccgcuggaagcgcuga

SEQ ID NO: 918 - RNA, 1473 nt, Artificial Sequence
  derived and/or modified protein sequence (opt2) from LASV(LASV993-NIG-2009;Clade II)__AIT17778__GPC
augggccagaucaucaccuucuuccaggaggucccccacgucaucgaggaggucaugaacaucguccucaucgcccucucccuccucgccauccucaagggcaucuacaacgucgccaccugcggccucuucggccucgucuccuuccuccuccucugcggccgcuccugcuccaccaccuacaagggcgucuacgagcuccagacccucgagcucgacauggccaaccucaacaugaccaugccccucuccugcaccaagaacaacucccaccacuacaucauggucggcaacgagaccggccucgagcucacccucaccaacaccuccaucaucaaccacaaguucugcaaccucuccgacgcccacaagaagaaccucuacgaccacgcccucauguccaucaucuccaccuuccaccucuccauccccaacuucaaccaguacgaggccauguccugcgacuucaacggcggcaagaucuccguccaguacaaccucucccacaccuacgcccgcgacgccgccaaccacugcggcaccaucgccaacggcguccuccagaccuucaugcgcauggccuggggcggcuccuacaucgcccucgacuccggcaagggcuccugggacugcaucaugaccuccuaccaguaccucaucauccagaacaccaccugggaggaccacugccaguucucccgccccucccccaucggcuaccucggccuccucucccagcgcacccgcgacaucuacaucucccgccgccuccucggcaccuucaccuggacccucuccgacuccgagggcaacgagacccccggcggcuacugccucacccgcuggaugcucaucgaggccgagcucaagugcuucggcaacaccgccgucgccaagugcaacgagaagcacgacgaggaguucugcgacaugcuccgccucuucgacuucaacaagcaggccauccgccgccucaagaccgaggcccagaugaacauccagcucaucaacaaggccgucaacgcccucaucaacgaccagcucaucaugaagaaccaccuccgcgacaucaugggcauccccuacugcaacuacuccaaguacugguaccucaaccacaccgucaccggcaagaccucccucccccgcugcuggcucgucuccaacggcuccuaccucaacgagacccacuucuccgacgacaucgagcagcaggccgacaacaugaucaccgagcuccuccagaaggaguacauggaccgccagggcaagaccccccucggccucgucgaccucuucgucuucuccaccuccuucuaccucaucuccaucuuccuccaccucgucaagauccccacccaccgccacgucaucggcaagcccugccccaagccccaccgccucaaccacaugggcaucugcuccugcggccucuacaagcaccccggcguccccgucaaguggaagcgcuga

SEQ ID NO: 919 - RNA, 1473 nt, Artificial Sequence
  derived and/or modified protein sequence (opt2) from LASV(Nig08-04;Clade II)__ADU56610__GPC
augggccagaucgucaccuucuuccaggaggucccccacgucaucgaggaggucaugaacaucguccucaucgcccucucccuccucgccauccucaagggcaucuacaacgucgccaccugcggccucuucggccucaucuccuuccuccuccucugcggccgcuccugcuccaccaccuacaagggcgucuacgagcuccagacccucgagcucgacauggccaaccucaacaugaccaugccccucuccugcaccaagaacuccucccaccacuacaucauggucggcaacgagaccggccucgagcucacccucaccaacaccuccaucaucaaccacaaguucugcaaccucuccgacgcccacaagaagaaccucuacgaccacgcccucauguccaucaucuccaccuuccaccucuccauccccaacuucaaccaguacgaggccauguccugcgacuucaacggcggcaagaucuccguccaguacaaccucucccacgccuacgccgucgacgccgccaaccacugcggcaccaucgccaacggcguccuccagaccuucaugcgcauggccuggggcggcuccuacaucgcccucgacuccggcaagggcaacugggacugcaucaugaccuccuaccaguaccucaucauccagaacaccaccugggaggaccacugccaguucucccgccccucccccaucggcuaccucggccuccucucccagcgcacccgcgacaucuacaucucccgccgccuccucggcaccuucaccuggacccucuccgacuccgagggcaacgaggcccccggcggcuacugccucacccgcuggaugcucaucgaggccgagcucaagugcuucggcaacaccgccaucgccaagugcaacgagaagcacgacgaggaguucugcgacaugcuccgccucuucgacuucaacaagcaggccaucaagcgccucaaggccgaggcccagauguccauccagcucaucaacaaggccgucaacgcccucaucaacgaccagcucaucaugaagaaccaccuccgcgacaucaugggcauccccuacugcaacuacuccaaguacugguaccucaaccacaccgucaccggcaagaccucccucccccgcugcuggcucaucuccaacggcuccuaccucaacgagacccacuucuccgacgacaucgagcagcaggccgacaacaugaucaccgagcuccuccagaaggaguacauggaccgccagggcaagaccccccucggccucgucgaccucuucgucuucuccaccuccuucuaccucaucuccaucuuccuccaccucgucaagauccccacccaccgccacaucgucggccgccccugccccaagccccaccgccucaaccacaugggcaucugcuccugcggccucuacaagcaccccggcguccccgucaaguggaagcgcuga

SEQ ID NO: 920 - RNA, 1473 nt, Artificial Sequence
  derived and/or modified protein sequence (opt2) from LASV(Nig08-A41;Clade II)__ADU56626__GPC
augggccagaucaucaccuucuuccaggaggucccccacgucaucgaggaggucaugaacaucguccucaucgcccucucccuccucgccauccucaagggcaucuacaacgucgccaccugcggccucuucggccucgucuccuuccuccuccucugcggccgcuccugcuccaccaccuacaagggcgucuacgagcuccagacccucgagcucaacauggccucccucaacaugaccaugccccucuccugcaccaagaacaacucccaccacuacaucauggucggcaacgagaccggccucgagcucacccucaccaacaccuccaucaucaaccacaaguucugcaaccucuccgacgcccacaagcgcaaccucuacgaccacgcccucauguccaucaucuccaccuuccaccucuccauccccaacuucaaccaguacgaggccauguccugcgacuucaacggcggcaagaucuccguccaguacaaccucucccacaccuacgccgucgacgccgccaagcacugcggcaccaucgccaacggcguccuccagaccuucaugcgcauggccuggggcggcuccuacaucgcccucgacuccggcaagggcuccugggacugcaucaugaccuccuaccaguaccucaucauccagaacaccaccugggaggaccacugccaguucucccgccccucccccaucggcuaccucggccuccucucccagcgcacccgcgacaucuacaucucccgccgccuccucggcaccuucaccuggacccucuccgacuccgagggcaacgagacccccggcggcuacugccucacccgcuggaugcucaucgaggccgagcucaagugcuucggcaacaccgccgucgccaagugcaacgagaagcacgacgaggaguucugcgacaugcuccgccucuucgacuucaacaagcaggccauccgccgccucaaggccgaggcccagauguccauccagcucaucaacaaggccgucaacgcccucaucaacgaccagcucaucaugaagaaccaccuccgcgacaucaugggcauccccuacugcaacuacuccaaguacugguaccucaaccacaccgucaccggcaagaccucccucccccgcugcuggcucgucuccaacggcuccuaccucaacgagacccacuucuccgacgacaucgagcagcaggccgacaacaugaucaccgagcuccuccagaaggaguacaucgaccgccagggcaagaccccccucggccucgucgaccucuucgucuucuccaccuccuucuaccucaucuccaucuuccuccaccucgucaagauccccacccaccgccacgucaucggcaagcccugccccaagccccaccgccucaaccacaugggcaucugcuccugcggccucuacaagcaccccggcguccccgucaaguggaagcgcuga

SEQ ID NO: 921 - RNA, 1473 nt, Artificial Sequence
  derived and/or modified protein sequence (opt2) from LASV(Nig08-A47;Clade II)__ADU56630__GPC
augggccagaucaucaccuucuuccaggaggucccccacgucaucgaggaggucaugaacaucguccucaucgcccucucccuccucgccauccucaagggcaucuacaacgucgccaccugcggccucuucggccucgucuccuuccuccuccucugcggccgcuccugcuccaccaccuacaagggcgucuacgagcuccagacccucgagcucgacauggccucccucaacaugaccaugccccucuccugcaccaagaacaacucccaccacuacaucauggucggcaacgagaccggccucgagcucacccucaccaacaccuccaucaucaaccacaaguucugcaaccucuccgacgcccacaagaagaaccucuacgaccacgcccucauguccaucaucuccaccuuccaccucuccauccccaacuucaaccaguacgaggccauguccugcgacuucaacggcggcaagaucuccguccaguacaaccucucccacgccuacgccgucgacgccgccaaccacugcggcaccaucgccaacggcguccuccagaccuucaugcgcauggccuggggcggcuccuacaucgcccucgacuccggcaagggcuccugggacugcaucaugaccuccuaccaguaccucaucauccagaacaccaccugggaggaccacugccaguucucccgccccucccccaucggcuaccucggccuccucucccagcgcacccgcgacaucuacaucucccgccgccuccucggcaccuucaccuggacccucuccgacuccgagggcaacgagacccccggcggcuacugccucacccgcuggaugcucaucgaggccgagcucaagugcuucggcaacaccgccgucgccaagugcaacgagaagcacgacgaggaguucugcgacaugcuccgccucuucgacuucaacaagcaggccauccgccgccucaagaccgaggcccagauguccauccagcucaucaacaaggccgucaacgcccucaucaacgaccagcucaucaugaagaaccaccuccgcgacaucaugggcauccccuacugcaacuacuccaaguacugguaccucaaccacaccgucaccggcaagaccucccucccccgcugcuggcucgucuccaacggcuccuaccucaacgagacccacuucuccgacgacaucgagcagcaggccgacaacaugaucaccgagcuccuccagaaggaguacauggaccgccagggcaagaccccccucggccucgucgaccucuucgucuucuccaccuccuucuaccucaucuccaucuuccuccaccucguccgcauccccacccaccgccacgucaucggcaagcccugccccaagccccaccgccucaaccacaugggcaucugcuccugcggccucuacaagcaccccggcguccccgucaaguggaagcgcuga

SEQ ID NO: 922 - RNA, 1473 nt, Artificial Sequence
  derived and/or modified protein sequence (opt2) from LASV(CSF;Clade III)__AAL13212__GPC
augggccagaucgucaccuucuuccaggaggucccccacgucaucgaggagaucaugaacaucguccucaucacccucucccuccucgccauccucaagggcgucuacaaccucgccaccugcggccucaucggccucaucaccuuccucuuccucugcggccgcuccugcuccaugaccuacaagggcuccuaccagcucgagacccucgagcucaacauggagacccucaacaugaccaugccccucuccugcaccaagaacaccucccaccacuacauccgcgucggcaacgagaccggccucgagcucacccucaccaacaccuccaucaucaaccacaaguucugcaaccucuccgacgcccacaagaagaaccucuacgaccacucccucauguccaucaucuccaccuuccaccucuccauccccaacuucaaccaguacgaggccauguccugcgacuucaacggcggcaagaucuccauccaguacaaccucucccacaccuacgccggcgacgccgccaagcacugcggcacccucgccaacggcauccuccagaccuucaugcgcauggccuggggcggcuccuacaucgcccucgacuccggccgcggcaacugggacugcaucaugaccuccuaccaguaccucaucauccagaacaccaccugggaggaccacugccaguucucccgccccucccccaucggcuaccucggccuccucucccagcgcacccgcgagaucuacaucucccgccgccuccucggcaccuucaccuggacccucuccgacuccgagggcaacgagaaccccggcggcuacugccucacccgcuggaugcucaucgaggccgagcucaagugcuucggcaacaccgccgucgccaagugcaacgagaagcacgacgaggaguucugcgacaugcuccgccucuucgacuucaacaagcaggccauccagcgccucaaggccgaggcccagauguccauccagcucaucaacaaggccgucaacgcccucaucaacgaccagcucaucaugaagaaccaccuccgcgacaucaugggcauccccuacugcaacuacuccaaguacugguaccucaaccacaccaccaccggccgcaccucccucccccgcugcuggcucgucuccaacggcuccuaccucaacgagacccgcuucuccgacgacaucgagcagcaggccgacaacaugaucaccgagaugcuccagaaggaguacaucgaccgccagggcaagaccccccucggccucgucgaccucuucgucuucuccaccuccuucuaccucaucuccaucuuccuccaccucaucaagauccccacccaccgccacaucgucggcggccccugccccaagccccaccgccucaaccacaagggcaucugcuccugcggccucuacaagcgccccggcgucuccguccgcuggaagcgcuga

SEQ ID NO: 923 - RNA, 1473 nt, Artificial Sequence
  derived and/or modified protein sequence (opt2) from LASV(ISTH2121-NIG-2012;Clade III)__AIT17540__GPC
augggccagaucgucaccuucuuccaggaggucccccacgucaucgaggagaucaugaacaucguccucaucacccucucccuccucgccauccucaagggcaucuacaacuucgccaccugcggccucaucggccucaucaccuuccucuuccucugcggccgcuccugcuccaccaucuacaagggcuccuaccagcuccagacccucgagcucaacauggagacccucaacaugaccaugccccucuccugcaccaagaacaacucccaccacuacauccgcgucggcaacgagaccggccucgagcucacccucaccaacaccuccaucaucaaccacaaguucugcaaccucuccgaggcccacaagaagaaccucuacgaccacgcccucauguccaucaucuccaccuuccaccucuccauccccaacuucaaccaguacgaggccauguccugcgacuucaacggcggcaagaucuccguccaguacaaccucucccacuccuacgccgucgacgccgccaaccacugcggcaccgucgccaacggcguccuccagaccuucaugcgcauggccuggggcggcuccuacaucgcccucgacuccggccgcggcaacugggacugcaucaugaccuccuaccaguaccucaucauccagaacaccaccugggaggaccacugccaguucucccgccccucccccaucggcuaccucggccuccucucccagcgcacccgcgacaucuacaucucccgccgccuccucggcaccuucaccuggacccucuccgacuccgagggcaaggagacccccggcggcuacugccucacccgcuggaugcucaucgaggccgagcucaagugcuucggcaacaccgccgucgccaagugcaacgagaagcacgacgaggaguucugcgacaugcuccgccucuucgacuucaacaagcaggccauccagcgccucaagaccgaggcccagauguccauccagcucaucaacaaggccgucaacgcccucaucaacgaccagcucaucaugaagaaccaccuccgcgacaucaugggcauccccuacugcaacuacuccaaguacugguaccucaaccacaccuccaccggccgcaccucccuccccaagugcuggcucgucuccaacggcuccuaccucaacgagacccacuucuccgacgacaucgagcagcaggccgacaacaugaucaccgagaugcuccagaaggaguacaucgaccgccagggcaagaccccccucggccucgucgaccucuucgucuucuccaccuccuucuaccucaucuccaucuuccuccaccucgucaagauccccacccaccgccacaucgucggcaaguccugccccaagccccaccgccucaaccacaugggcaucugcuccugcggccucuacaagcagcccggcguccccgucaaguggaagcgcuga

SEQ ID NO: 924 - RNA, 1473 nt, Artificial Sequence
  derived and/or modified protein sequence (opt2) from LASV(Nig08-A19;Clade III)__ADU56618__GPC
augggccagaucgucaccuucuuccaggaggucccccacgucaucgaggaggucaugaacaucguccucaucgcccucuccauccucgccauccucaagggccucuacaacaucgccaccugcggccucaucggccucgucaccuuccuccuccucuccggccgcuccugcuccaugaccuacaagggcgucuacgagcuccagacccucgagcucaacaugaacacccucaacaugaccaugccccucuccugcaccaagaacaacucccaccacuacaucauggucggcaacgagaccggccucgagcucacccucaccaacaccucccuccuccaccacaaguucugcaaccucuccgacgcccacaagaagaaccucuacgaccacacccucauguccaucaucuccaccuuccaccucuccauccccaacuucaaccaguacgaggccauguccugcgacuucaacggcggcaagaucaccguccaguacaaccucucccacuccuacgccaucgacgccgccaaccacugcggcaccgucgccaacggcguccuccagaccuucaugcgcauggccuggggcggcuccuacaucgcccucgacuccggccgcggcaagugggacugcaucaugaccuccuaccaguaccucaucauccagaacaccaccugggaggaccacugccaguucucccgccccucccccaucggcuaccucggccuccucucccagcgcacccgcgacaucuacaucucccgccgccuccucggcaccuucaccuggacccucuccgacuccgagggcaacgagacccccggcggcuacugccucacccgcuggaugcucaucgaggccgagcucaagugcuucggcaacaccgccgucgccaagugcaacgagaagcacgacgaggaguucugcgacaugcuccgccucuucgacuucaacaagcaggccauccgccgccucaaggccgaggcccagauguccauccagcucaucaacaaggccgucaacgcccucaucaacgaccagcucaucaugaagaaccaccuccgcgacaucaugggcauccccuacugcaacuacuccaaguacugguaccucaaccacaccuccaccggccgcaccucccucccccgcugcuggcucgucuccaacggcuccuaccucaacgagacccacuucuccgacgacaucgagcagcaggccgacaacaugaucaccgagaugcuccagaaggaguaccucgaccgccagggcaagaccccccucggccucgucgaccucuucgucuucuccaccuccuucuaccucaucuccaucuuccuccaccucgucaagauccccacccaccgccacaucgucggcaagcccugccccaagccccaccgccucaaccacaugggcaucugcuccugcggccucuacaagcagcccggcguccccguccgcuggaagcgcuga

SEQ ID NO: 925 - RNA, 1473 nt, Artificial Sequence
  derived and/or modified protein sequence (opt2) from LASV(ONM-299;Clade III)__ANH09734__GPC
augggccagaucgucaccuucuuccaggaggucccccacgucaucgaggagaucaugaacaucguccucaucacccucucccuccucgccauccucaagggccucuacaacuucgccaccugcggccucaucggccucaucaccuuccucuuccucugcggccgcuccugcuccaugaucuacaagggcuccuaccagcucgagacccucgagcucaacauggagacccucaacaugaccaugccccucuccugcaccaagaacaacucccaccacuacauccgcgucggcaacgagaccggccucgagcucacccucaccaacaccuccaucaucggccacaaguucugcaaccucuccgacgcccacaagaagaaccucuacgaccacucccucauguccaucaucuccaccuuccaccucuccauccccaacuucaaccaguacgaggccauguccugcgacuucaacggcggcaagaucuccauccaguacaaccucucccacaccuacgccggcgacgccgccaagcacugcggcaccgucgccaacggcguccuccagaccuucaugcgcauggccuggggcggcuccuacaucgcccucgacuccggccgcggcaacugggacugcaucaugaccuccuaccaguaccucaucauccagaacaccaccugggaggaccacugccaguucucccgccccucccccaucggcuaccucggccuccucucccagcgcacccgcgacaucuacaucucccgccgccuccucggcaccuucaccuggacccucuccgacuccgagggcaaggagacccccggcggcuacugccucacccgcuggaugcucaucgaggccgagcucaagugcuucggcaacaccgccgucgccaagugcaacgagaagcacgacgaggaguucugcgacaugcuccgccucuucgacuucaacaagcaggccauccagcgccucaagaccgaggcccagauguccauccagcucaucaacaaggccgucaacgcccucaucaacgaccagcucaucaugaagaaccaccuccgcgacaucaugggcauccccuacugcaacuacuccaaguacugguaccucaaccacaccuccaccggccgcaccucccuccccaagugcuggcucgucuccaacggcuccuaccucaacgagacccacuucuccgacgacaucgagcagcaggccgacaacaugaucaccgagaugcuccagaaggaguacaucgaccgccagggcaagaccccccucggccucgucgacgucuucgucuucuccaccuccuucuaccucaucuccaucuuccuccaccucgucaagauccccacccaccgccacaucgucggcaaguccugccccaagccccaccgccucaaccacaugggcaucugcuccugcggccucuacaagcagcccggcguccccguccgcuggaagcgcuga

SEQ ID NO: 926 - RNA, 1473 nt, Artificial Sequence
  derived and/or modified protein sequence (opt2) from LASV(ONM-700;Clade III)__ANH09738__GPC
augggccagaucgucaccuucuuccaggaggucccccacgucaucgaggagaucaugaacaucguccucaucacccucucccuccucgccauccucaagggccucuacaacuucgccaccugcggccucaucggccucaucaccuuccucuuccucugcggccgcuccugcuccaugaucuacaagggcuccuaccagcucgagacccucgagcucaacauggagacccucaacaugaccaugccccucuccugcaccaagaacaacucccaccacuacauccgcgucggcaacgagaccggccucgagcucacccucaccaacaccuccaucaucaaccacaaguucugcaaccucuccgacgcccacaagcgcaaccucuacgaccacucccucauguccaucaucuccaccuuccaccucuccauccccaacuucaaccaguacgaggccauguccugcgacuucaacggcggcaagaucuccauccaguacaaccucucccacaccuacgccggcgacgccgccaagcacugcggcaccgucgccaacggcguccuccagaccuucaugcgcauggccuggggcggcuccuacaucgcccucgacuccggccgcggcaacugggacugcaucaugaccuccuaccaguaccucaucauccagaacaccaccugggaggaccacugccaguucucccgccccucccccaucggcuaccucggccuccucucccagcgcacccgcgacaucuacaucucccgccgccuccucggcaccuucaccuggacccucuccgacuccgagggcaaggagacccccggcggcuacugccucacccgcuggaugcucaucgaggccgagcucaagugcuucggcaacaccgccgucgccaagugcaacgagaagcacgacgaggaguucugcgacaugcuccgccucuucgacuucaacaagcaggccauccagcgccucaagaccgaggcccagauguccauccagcucaucaacaaggccgucaacgcccucaucaacgaccagcucaucaugaagaaccaccuccgcgacaucaugggcauccccuacugcaacuacuccaaguacugguaccucaaccacaccuccaccggccgcaccucccuccccaagugcuggcucgucuccaacggcuccuaccucaacgagacccacuucuccgacgacaucgagcagcaggccgacaacaugaucaccgagaugcuccagaaggaguacaucgaccgccagggcaagaccccccucggccucgucgacgucuucauguucuccaccuccuucuaccucaucuccaucuuccuccaccucgucaagauccccacccaccgccacaucgucggcaaguccugccccaagccccaccgccucaaccacaugggcaucugcuccugcggccucuacaagcagcccggcguccccguccgcuggaagcgcuga

SEQ ID NO: 927 - RNA, 1473 nt, Artificial Sequence
  derived and/or modified protein sequence (opt2) from LASV(Weller;Clade III)__AAT49010__GPC
augggccagaucgucaccuucuuccaggaggucccccacgucaucgaggaggucaugaacaucguccucaucgcccucuccguccucgccauccucaagggccucuacaacuucgccaccugcggccucaucggccucgucaccuuccuccuccucuccggccgcuccugcuccaugaucuacaagggcgucuacgagcuccagacccucgagcucaacauggagacccucaacaugaccaugccccucuccugcaccaagaacaccucccaccacuacauccgcgucggcaacgacaccggccucgagcucacccucaccaacgagacccuccuccaccacaaguucugcaaccucuccgacgcccacaagcgcaaccucuacgaccacgcccucauguccaucaucuccaccuuccaccucuccauccccaacuucaaccaguacgaggccauguccugcgacuucaacggcggcaagaucaccguccaguacaaccucucccacuccuacgccgucgacgccgccaagcacugcggcaccgucgccaacggcguccuccagaccuucaugcgcauggccuggggcggcuccuacaucgcccucgacucccgccacggcaacugggacugcaucaugaccuccuaccaguaccucaucauccagaacaccaccugggaggaccacugccaguucucccgccccucccccaucggcuaccucggccuccucucccagcgcacccgcgacaucuacaucucccgccgccuccucggcaccuucaccuggacccucuccgacuccgagggcaacgagacccccggcggcuacugccucacccgcuggaugcucaucgaggccgagcucaagugcuucggcaacaccgccgucgccaagugcaacgagaagcacgacgaggaguucugcgacaugcuccgccucuucgacuucaacaagcaggccauccgccgccucaagaccgaggcccagauguccauccagcucaucaacaaggccgucaacgcccucaucaacgaccagcucaucaugaagaaccaccuccgcgacaucaugggcauccccuacugcaacuacuccaaguacugguaccucaaccacaccuccaccggcaagaccucccucccccgcugcuggcucgucuccaacggcuccuaccucaacgagacccacuucuccgacgacaucgagcagcaggccgacaacaugaucaccgagaugcuccagaaggaguaccucgaccgccagggcaagaccccccucggccucgucgaccucuucgucuucuccaccuccuucuaccucaucuccaucuuccuccaccucaucaagauccccacccaccgccacaucgucggcaagcccugccccaagccccaccgccucaaccacaugggcaucugcuccugcggccucuacaagcagcccggcguccccguccgcuggaagcgcuga

SEQ ID NO: 928 - RNA, 1476 nt, Artificial Sequence
  derived and/or modified protein sequence (opt2) from LASV(BA366;Clade IV)__ADI39451__GPC
augggccagaucgucaccuucuuccaggaggucccccacgucaucgaggaggucaugaacaucguccucaucgcccucuccguccucgccguccucaagggccucuacaacgucgccaccugcggccucaucggccucaucgccuuccuccuccucugcggccgcuccugcaccaccacccucuacaagggcgucuacgagcuccaggcccucgagcucaacauggagacccucaacaugaccaugccccucuccugcaccaagaacaacucccaccacuacaucauggucggcaacgagaccggccucgagcucacccucaccaacaccuccaucaucaaccacaaguucugcaaccucuccgacgcccacaagaagaaccucuacgaccacgcccucauguccaucaucuccaccuuccaccucuccauccccaacuucaaccaguacgaggccauguccugcgacuucaacggcggcaagaucuccguccaguacaaccucucccacaccuacgccgucgacgccgccaaccacugcggcaccgucgccaacggcguccuccagaccuucaugcgcauggccuggggcggcuccuacaucgcccucgacuccggccgcggcuccugggacugcaucaugaccuccuaccaguaccucaucauccagaacaccaccugggaggaccacugccaguucucccgccccucccccaucggcuaccucggccuccucucccagcgcacccgcgacaucuacaucucccgccgccuccucggcaccuucaccuggacccucuccgacuccgagggcaaggacacccccggcggcuacugccucacccgcuggaugcucaucgaggccgagcucaagugcuucggcaacaccgccgucgccaagugcaacgagaagcacgacgaggaguucugcgacaugcuccgccucuucgacuucaacaagcaggccauccagcgccucaaggccgaggcccagauguccauccagcucaucaacaaggccgucaacgcccucaucaacgaccagcucaucaugaagaaccaccuccgcgacaucaugggcauccccuacugcaacuacuccaaguacugguaccucaaccacaccaucaccggccgcaccucccuccccaagugcuggcucgucuccaacggcuccuaccucaacgagacccacuucuccgacgacaucgagcagcaggccgacaacaugaucaccgagaugcuccagaaggaguacaucgagcgccagggcaagaccccccucggccucgucgaccucuucgucuucuccaccuccuucuaccucaucuccaucuuccuccaccucaucaagauccccacccaccgccacaucgucaacaagcccugccccaagccccaccgccucaaccacaugggcgucugcuccugcggccucuacaagcagcccggcguccccguccgcuggaagcgcuga

SEQ ID NO: 929 - RNA, 1476 nt, Artificial Sequence
  derived and/or modified protein sequence (opt2) from LASV(G1180-SLE-2010;Clade IV)__AIT17168__GPC
augggccagaucgucaccuucuuccaggaggucccccacgucaucgaggaggucaugaacaucguccucaucgcccucuccauccucgccguccucaagggccucuacaacuucgccaccugcggccucgucggccuccucaccuuccuccuccucugcggccgcuccugcaccgccucccgcuacaagggcgucuacgagcuccagacccucgagcucaacauggagacccucaacaugaccaugccccucuccugcaccaagaacaacucccaccacuacaucauggucggcaacgagaccggccucgagcucacccucaccaacaccuccaucaucaaccacaaguucugcaaccucuccgacgcccacaagaagaaccucuacgaccacgcccucauguccaucaucuccaccuuccaccucuccauccccaacuucaaccaguacgaggccauguccugcgacuucaacggcggcaagaucuccguccaguacaaccucucccacuccuacgccggcgacgccgccaaccacugcggcaccgucgccaacggcguccuccagaccuucaugcgcauggccuggggcggcuccuacaucgcccucgacuccggccacggcuccugggacugcaucaugaccuccuaccaguaccucaucauccagaacaccaccugggaggaccacugccaguucucccgccccucccccaucggcuaccucggccuccucucccagcgcacccgcgacaucuacaucucccgccgccuccucggcaccuucaccuggacccucuccgacuccgagggcaaggacacccccggcggcuacugccucacccgcuggaugcucaucgaggccgagcucaagugcuucggcaacaccgccgucgccaagugcaacgagaagcacgacgaggaguucugcgacaugcuccgccucuucgacuucaacaagcaggccauccagcgccucaaggccgaggcccagauguccauccagcucaucaacaaggccgucaacgcccucaucaacgaccagcucaucaugaagaaccaccuccgcgacaucaugggcauccccuacugcaacuacuccaaguacugguaccucaaccacaccaccaccggcaagaccucccuccccaagugcuggcucgucuccaacggcuccuaccucaacgagacccacuucuccgacgacaucgagcagcaggccgacaacaugaucaccgagaugcuccagaaggaguacauggagcgccagggcaagaccccccucggccucgucgaccucuucgucuucuccaccuccuucuaccucaucuccaucuuccuccaccucgucaagauccccacccaccgccacaucgucggcaaguccugccccaagccccaccgccucaaccacaugggcaucugcuccugcggccucuacaagcagcccggcguccccgucaaguggaagcgcuga

SEQ ID NO: 930 - RNA, 1476 nt, Artificial Sequence
  derived and/or modified protein sequence (opt2) from LASV(G1190-SLE-2010;Clade IV)__AIT17172__GPC
augggccagaucgucaccuucuuccaggaggucccccacgucaucgaggaggucaugaacaucguccucaucgcccucuccauccucgccguccucaagggccucuacaacuucgccaccugcggccucgucggccucgucaccuuccuccuccucugcggccgcuccugcaccaccucccucuacaagggcgucuacgagcuccagacccucgagcucaacauggagacccucaacaugaccaugccccucuccugcaccaagaacaacucccaccacuacaucauggucggcaacgagaccggccucgagcucacccucaccaacaccuccaucaucaaccacaaguucugcaaccucuccgacgcccacaagaagaaccucuacgaccacgcccucauguccaucaucuccaccuuccaccucuccauccccaacuucaaccaguacgaggccauguccugcgacuucaacggcggcaagaucuccguccaguacaaccucucccacuccuacgccggcgacgccgccaaccacugcggcaccgucgccaacggcguccuccagaccuucaugcgcauggccuggggcggcuccuacaucgcccucgacuccggccgcggccgcugggacugcaucaugaccuccuaccaguaccucaucauccagaacaccaccugggaggaccacugccaguucucccgccccucccccaucggcuaccucggccuccucucccagcgcacccgcgacaucuacaucucccgccgccuccucggcaccuucaccuggacccucuccgacuccgagggcaaggacacccccggcggcuacugccucacccgcuggaugcucaucgaggccgagcucaagugcuucggcaacaccgccgucgccaagugcaacgagaagcacgacgaggaguucugcgacaugcuccgccucuucgacuucaacaagcaggccauccagcgccucaaggccgaggcccagauguccauccagcucaucaacaaggccgucaacgcccucaucaacgaccagcucaucaugaagaaccaccuccgcgacaucaugggcauccccuacugcaacuacuccaaguacugguaccucaaccacaccaccaccggcaagaccucccuccccaagugcuggcucgucuccaacggcuccuaccucaacgagacccacuucuccgacgacaucgagcagcaggccgacaacaugaucaccgagaugcuccagaaggaguacauggagcgccagggcaagaccccccucggccucgucgaccucuucgucuucuccaccuccuucuaccucaucuccaucuuccuccaccucgucaagauccccacccaccgccacaucgucggcaagcccugcccccgcccccaccgccucaaccacaugggcaucugcuccugcggccucuacaagcagcccggcguccccgucaaguggaagcgcuga

SEQ ID NO: 931 - RNA, 1476 nt, Artificial Sequence
  derived and/or modified protein sequence (opt2) from LASV(G1200-LIB-2010;Clade IV)__AIT17176__GPC
augggccagaucgucaccuucuuccaggaggucccccacgucaucgaggaggucaugaacaucguccucaucgcccucucccuccucgccguccucaagggccucuacaacgucgccaccugcggccucaucggccucaucaccuuccuccuccucugcggccgcuccugcaccaccaaccucuacaagggcgucuacgagcuccaggcccucgagcucaacauggagacccucaacaugaccaugccccucuccugcaccaagaacaacucccaccacuacaucauggucggcaacgagaccggccucgagcucacccucaccaacaccuccaucaucaaccacaaguucugcaaccucuccgacgcccacaagaagaaccucuacgaccacgcccucauguccaucaucuccaccuuccaccucuccauccccaacuucaaccaguacgaggccauguccugcgacuucaacggcggccgcaucuccguccaguacaaccucucccacuccuacgccggcgacgccgccucccacugcggcaccaucgccaacggcguccuccagaccuucaugcgcauggccuggggcggcuccuacaucgcccucgacuccggccacggcggcugggacugcaucaugaccuccuaccaguaccucaucauccagaacaccaccugggaggaccacugccaguucucccgccccucccccaucggcuaccucggccuccucucccagcgcacccgcgacaucuacaucucccgccgccuccucggcaccuucaccuggacccucuccgacuccgagggcaaggacacccccggcggcuacugccucacccgcuggaugcucaucgaggccgagcucaagugcuucggcaacaccgccgucgccaagugcaacgagaagcacgacgaggaguucugcgacaugcuccgccucuucgacuucaacaagcaggccauccagcgccucaaggccgaggcccagauguccauccagcucaucaacaaggccgucaacgcccucaucaacgaccagcucaucaugaagaaccaccuccgcgacaucaugggcauccccuacugcaacuacuccaaguacugguaccucaaccacaccgucaccggcaagaccucccuccccaagugcuggcucgucuccaacggcuccuaccucaacgagacccacuucuccgacgacaucgagcagcaggccgacaacaugaucaccgagaugcuccagaaggaguacauggagcgccagggcaagaccccccucggccucgucgaccucuucgucuucuccaccuccuucuaccucaucuccaucuuccuccaccucgucaagauccccacccaccgccacgucgucggcaagcccugccccaagccccaccgccucaaccacaugggcaucugcuccugcggccucuacaagcagcccggcguccccguccgcuggaagcgcuga

SEQ ID NO: 932 - RNA, 1476 nt, Artificial Sequence
  derived and/or modified protein sequence (opt2) from LASV(G1442-SLE-2011;Clade IV)__AIT17180__GPC
augggccagaucgucaccuucuuccaggaggucccccacgucaucgaggaggucaugaacaucguccucaucgcccucuccauccucgccguccucaagggccucuacaacgucgccaccugcggccucaucggccucgucaccuuccuccuccucugcggccgcuccugcaccaccacccucuacaagggcgucuacgagcuccagacccucgagcucaacauggagacccucaacaugaccaugccccucuccugcaccaagaacaacucccaccacuacauccgcgucggcaacgagaccggccucgagcucacccucaccaacaccuccaucaucaaccacaaguucugcaaccucuccgacgcccacaagaagaaccucuacgaccacgcccucauguccaucaucuccaccuuccaccucuccauccccaacuucaaccaguacgaggccauguccugcgacuucaacggcggcaagaucuccguccaguacaaccucucccacuccuacgccggcgacgccgccaaccacugcggcaccgucgccaacggcguccuccagaccuucaugcgcauggccuggggcggcuccuacaucgcccucgacuccggccgcggcaacugggacugcaucaugaccuccuaccaguaccucaucauccagaacaccaccugggacgaccacugccaguucucccgccccucccccaucggcuaccucggccuccucucccagcgcacccgcgacgucuacaucucccgccgccuccucggcaccuucaccuggacccucuccgacuccgagggcaaggacacccccggcggcuacugccucacccgcuggaugcucaucgaggccgagcucaagugcuucggcaacaccgccgucgccaagugcaacgagaagcacgacgaggaguucugcgacaugcuccgccucuucgacuucaacaagcaggccauccagcgccucaaggccgaggcccagauguccauccagcucaucaacaaggccgucaacgcccucaucaacgaccagcucaucaugaagaaccaccuccgcgacaucaugggcauccccuacugcaacuacuccaaguacugguaccucaacaacaccgccaccggcaagaccucccuccccaagugcuggcucaucuccaacggcuccuaccucaacgagacccacuucuccgacgacaucgagcaggaggccgacaacaugaucaccgagaugcuccagaaggaguacauggagcgccagggcaagaccccccucggccucgucgaccucuucgucuucuccaccuccuucuaccucaucuccaucuuccuccaccucgucaagauccccacccaccgccacaucgucggcaaguccugccccaagccccaccgccucaaccacaugggcaucugcuccugcggccucuacaagcagcccggcguccccguccgcuggaagcgcuga

SEQ ID NO: 933 - RNA, 1476 nt, Artificial Sequence
  derived and/or modified protein sequence (opt2) from LASV(G1529-SLE-2011;Clade IV)__AIT17184__GPC
augggccagaucgucaccuucuuccaggaggucccccacgucaucgaggaggucaugaacaucguccucaucgcccucuccauccucgccguccucaagggccucuacaacgucgccaccugcggccucaucggccucgucaccuuccuccuccucugcggccgcuccugcaccaccacccucuacaagggcgucuacgagcuccaggcccucgagcucaacauggagacccucaacaugaccaugccccucuccugcaccaagaacaacucccaccacuacauccgcgucggcaacgagaccggccucgagcucacccucaccaacaccuccaucaucgaccacaaguucugcaaccucuccgacgcccacaagaagaaccucuacgaccacgcccucauguccaucaucuccaccuuccaccucuccauccccaacuucaaccaguacgaggccauguccugcgacuucaacggcggcaagaucuccguccaguacaaccucucccacuccuacgccggcgacgccgccaaccacugcggcaccgucgccaacggcguccuccagaccuucaugcgcauggccuggggcggcuccuacaucgcccucgacuccggccgcaacggcugggacugcaucaugaccuccuaccaguaccucaucauccagaacaccaccugggacgaccacugccaguucucccgccccucccccaucggcuaccucggccuccucucccagcgcacccgcgacaucuacaucucccgccgccuccucggcaccuucaccuggacccucuccgacuccgagggcaaggacacccccggcggcuacugccucacccgcuggaugcucaucgaggccgagcucaagugcuucggcaacaccgccgucgccaagugcaacgagaagcacgacgaggaguucugcgacaugcuccgccucuucgacuucaacaagcaggccauccgccgccucaaggccgaggcccagauguccauccagcucaucaacaaggccgucaacgcccucaucaacgaccagcucaucaugaagaaccaccuccgcgacaucaugggcauccccuacugcaacuacuccaaguacugguaccucaacaacaccgccaccggcaagaccucccucccccgcugcuggcucgucuccaacggcuccuaccucaacgagacccacuucuccgacgacaucgagcagcaggccgacaacaugaucaccgagaugcuccagcgcgaguacauggagcgccagggcaagaccccccucggccucgucgaccucuucgucuucuccaccuccuucuaccucaucuccaucuuccuccaccucgucaagauccccacccaccgccacaucgucggcaagcccugccccaagccccaccgccucaaccacaugggcaucugcuccugcggccucuacaagcagcccggcguccccgucaaguggaagcgcuga

SEQ ID NO: 934 - RNA, 1476 nt, Artificial Sequence
  derived and/or modified protein sequence (opt2) from LASV(G1618-SLE-2011;Clade IV)__AIT17188__GPC
augggccagaucgucaccuucuuccaggaggucccccacgucaucgaggaggucaugaacaucguccucaucgcccucuccauccucgccguccucaagggccucuacaacuucgccaccugcggcuucgucggccucgucuccuuccuccuccucugcggccgcuccugcaccaccucccucuacaagggcgucuacgagcuccagacccucgagcucaacauggagacccucaacaugaccaugccccucuccugcaccaagaacaacucccaccacuacaucauggucggcaacgagaccggccucgagcucacccucaccaacaccuccaucaucaaccacaaguucugcaaccucuccgacgcccacaagaagaaccucuacgaccacgcccucauguccaucaucuccaccuuccaccucuccauccccaacuucaaccaguacgaggccauguccugcgacuucaacggcggcaagaucuccguccaguacaaccucucccacuccuacgccgucgacgccgccaaccacugcggcaccgucgccaacggcguccuccagaccuucaugcgcauggccuggggcggcuccuacaucgcccucgacuccggccacggcuccugggacugcaucaugaccuccuaccaguaccucaucauccagaacaccaccugggaggaccacugccaguucucccgccccucccccaucggcuaccucggccuccucucccagcgcacccgcgacaucuacaucucccgccgccuccucggcaccuucaccuggacccucuccgacuccgagggcaaggacacccccggcggcuacugccucacccgcuggaugcucaucgaggccgagcucaagugcuucggcaacaccgccgucgccaagugcaacgagaagcacgacgaggaguucugcgacaugcuccgccucuucgacuucaacaagcaggccauccagcgccuccgcgccgaggcccagauguccauccagcucaucaacaaggccgucaacgcccucaucaacgaccagcucaucaugaagaaccaccuccgcgacaucaugggcauccccuacugcaacuacuccaaguacugguaccucaaccacaccaccaccggccgcaccucccuccccaagugcuggcucgucuccaacggcuccuaccucaacgagacccacuucuccgacgacaucgagcagcaggccgacaacaugaucaccgagaugcuccagaaggaguacauggagcgccagggcaagaccccccucggccucgucgaccucuucgucuucuccaccuccuucuaccucaucuccaucuuccuccaccucgucaagauccccacccaccgccacaucgucggcaaguccugccccaagccccaccgccucaaccacaugggcaucugcuccugcggccucuacggccagcccggcguccccgucaaguggaagcgcuga

SEQ ID NO: 935 - RNA, 1476 nt, Artificial Sequence
  derived and/or modified protein sequence (opt2) from LASV(G1646-SLE-2011;Clade IV)__AIT17192__GPC
augggccagaucgucaccuucuuccaggaggucccccacgucaucgaggaggucaugaacaucguccucaucgcccucuccauccucgccguccucaagggccucuacaacuucgccaccugcggcuucaucggccucgucuccuuccuccuccucugcggccgcuccugcaccaccucccucuacaagggcgucuacgagcuccagacccucgagcucaacauggagacccucaacaugaccaugccccucuccugcaccaagaacaacucccaccacuacaucauggucggcaacgagaccggccucgagcucacccucaccaacaccuccaucaucaaccacaaguucugcaaccucuccgacgcccacaagaagaaccucuacgaccacgcccucauguccaucaucuccaccuuccaccucuccauccccaacuucaaccaguucgaggccauguccugcgacuucaacggcggcaagaucuccguccaguacaaccucucccacuccuacgccgucgacgccgccaaccacugcggcaccgucgccaacggcguccuccagaccuucaugcgcauggccuggggcggcuccuacaucgcccucgacuccggccacggcuccugggacugcaucaugaccuccuaccaguaccucaucauccagaacaccaccugggaggaccacugccaguucucccgccccucccccaucggcuaccucggccuccucucccagcgcacccgcgacaucuacaucucccgccgccuccucggcaccuucaccuggacccucuccgacuccgagggcaaggacacccccggcggcuacugccucacccgcuggaugcucaucgaggccgagcucaagugcuucggcaacaccgccgucgccaagugcaacgagaagcacgacgaggaguucugcgacaugcuccgccucuucgacuucaacaagcaggccauccagcgccucaaggccgaggcccagauguccauccagcucaucaacaaggccgucaacgcccucaucaacgaccagcucaucaugaagaaccaccuccgcgacaucaugggcauccccuacugcaacuacuccaaguacugguaccucaaccacaccaccaccggccgcaccucccuccccaagugcuggcucgucuccaacggcuccuaccucaacgagacccacuucuccgacgacaucgagcagcaggccgacaacaugaucaccgagaugcuccagaaggaguacauggagcgccagggcaagaccccccucggccucgucgaccucuucgucuucuccaccuccuucuaccucaucuccaucuuccuccaccucgucaagauccccacccaccgccacaucgucggcaaguccugccccaagccccaccgccucaaccacaugggcaucugcuccugcggccucuacggccagcccggcguccccgucaaguggaagcgcuga

SEQ ID NO: 936 - RNA, 1476 nt, Artificial Sequence
  derived and/or modified protein sequence (opt2) from LASV(G1647-SLE-2011;Clade IV)__AIT17196__GPC
augggccagaucgucaccuucuuccaggaggucccccacgucaucgaggaggucaugaacaucguccucaucgcccucuccauccucgccguccucaagggccucuacaaccucgccaccugcggccucgucggccucgucaccuuccuccuccucugcggccgcuccugcaccaccucccucuacaagggcgucuacgagcuccagacccucgagcucaacauggagacccucaacaugaccaugccccucuccugcaccaagaacaacucccaccacuacaucauggucggcaacgagaccggccucgagcucacccucaccaacaccuccaucaucaaccacaaguucugcaaccucuccgacgcccacaagaagaaccucuacgaccacgcccucauguccaucaucuccaccuuccaccucuccauccccaacuucaaccaguacgaggccauguccugcgacuucaacggcggcaagaucuccguccaguacaaccucucccacuccuacgccggcgacgccgccaaccacugcggcaccgucgccaacggcguccuccagaccuucaugcgcauggccuggggcggcuccuacaucgcccucgacuccggccgcggccgcugggacugcaucaugaccuccuaccaguaccucaucauccagaacaccaccugggaggaccacugccaguucucccgccccucccccaucggcuaccucggccuccucucccagcgcacccgcgacaucuacaucucccgccgccuccucggcaccuucaccuggacccucuccgacuccgagggcaaggacacccccggcggcuacugccucacccgcuggaugcucaucgaggccgagcucaagugcuucggcaacaccgccgucgccaagugcaacgagaagcacgacgaggaguucugcgacaugcuccgccucuucgacuucaacaagcaggccauccagcgccucaaggccgaggcccagaugaacauccagcucaucaacaaggccgucaacgcccucaucaacgaccagcucaucaugaagaaccaccuccgcgacaucaugggcauccccuacugcaacuacuccaaguacugguaccucaaccacaccaccaccggcaagaccucccucccccgcugcuggcucgucuccaacggcuccuaccucaacgagacccacuucuccgacgacaucgagcagcaggccgacaacaugaucaccgagaugcuccagaaggaguacauggagcgccagggcaagaccccccucggccucgucgaccucuucgucuucuccaccuccuucuaccucaucuccaucuuccuccaccucgucaagauccccacccaccgccacaucgucggcaagcccugccccaagccccaccgccucaaccacaugggcaucugcuccugcggcuucuacaagcagcccggcguccccgucaaguggaagcgcuga

SEQ ID NO: 937 - RNA, 1476 nt, Artificial Sequence
  derived and/or modified protein sequence (opt2) from LASV(G1774-SLE-2011;Clade IV)__AIT17204__GPC
augggccagaucgucaccuucuuccaggaggucccccacgucaucgaggaggucaugaacaucguccucaucgcccucuccauccucgccguccucaagggccucuacaaccucgccaccugcggccucgucggccucgucaccuuccuccuccucugcggccgcuccugcaccuccucccucuacaagggcgucuacgagcuccagacccucgagcucaacauggagacccucaacaugaccaugccccucuccugcaccaagaacuccucccaccacuacauccgcgucggcaacgagaccggccucgagcucacccucaccaacaccuccaucaucaaccacaaguucugcaaccucuccgacgcccacaagaagaaccucuacgaccacgcccucauguccaucaucuccaccuuccaccucuccauccccaacuucaaccaguacgaggccauguccugcgacuucaacggcggcaagaucuccguccaguacaaccucucccacuccuacgccggcgacgccgccaaccacugcggcaccgucgccaacggcguccuccagaccuucaugcgcauggccuggggcggcuccuacaucgcccucgacuccggccacgaccgcugggacugcaucaugaccuccuaccaguaccucaucauccagaacaccaccugggaggaccacugccaguucucccgccccucccccaucggcuaccucggccuccucucccagcgcacccgcgacaucuacaucucccgccgccuccucggcaccuucaccuggacccucuccgacuccgagggcaaggacacccccggcggcuacugccucacccgcuggaugcucaucgaggccgagcucaagugcuucggcaacaccgccgucgccaagugcaacgagaagcacgacgaggaguucugcgacaugcuccgccucuucgacuucaacaagcaggccauccagcgccucaaggccgaggcccagauguccauccagcucaucaacaaggccgucaacgcccucaucaacgaccagcucaucaugaagaaccaccuccgcgacaucaugggcauccccuacugcaacuacuccaaguacugguaccucaaccacaccaucaccggcaagaccucccuccccaagugcuggcucgucuccaacggcuccuaccucaacaagacccacuucuccgacgacaucgagcagcaggccgacaacaugaucaccgagaugcuccagaaggaguacauggagcgccagggcaagaccccccucggccucgucgaccucuucgucuucuccaccuccuucuaccucaucuccaucuuccuccaccucaucaagauccccacccaccgccacaucgucggcaagcccugccccaagccccaccgccucaaccacaugggcaucugcuccugcggccucuacaagcagcccggcguccccgucaaguggaagcgcuga

SEQ ID NO: 938 - RNA, 1476 nt, Artificial Sequence
  derived and/or modified protein sequence (opt2) from LASV(G1792-SLE-2011;Clade IV)__AIT17208__GPC
augggccagaucgucaccuucuuccaggaggucccccacgucaucgaggaggucaugaacaucguccucaucgcccucuccauccucgccguccucaagggccucuacaacuucgccaccugcggccucaucggccucgucaccuuccuccuccucugcggccgcuccugcaccaccucccucuacaagggcgucuacgagcuccagacccucgagcucaacauggagacccucaacaugaccaugccccucuccugcaccaagaacaacucccaccacuacaucauggucggcaacgagaccggccucgagcucacccucaccaacaccuccaucaucaaccacaaguucugcaaccucuccgacgcccacaagaagaaccucuacgaccacgcccucauguccaucaucuccaccuuccaccucuccauccccaacuucaaccaguacgaggccauguccugcgacuucaacggcggcaagaucuccguccaguacaaccucucccacuccuacgccggcgacgccgccaaccacugcggcaccgucgccaacggcguccuccagaccuucaugcgcauggccuggggcggcuccuacaucgcccucgacuccggccgcggccagugggacugcaucaugaccuccuaccaguaccucaucauccagaacaccaccugggaggaccacugccaguucucccgccccucccccaucggcuaccucggccuccucucccagcgcacccgcgacaucuacaucucccgccgccuccucggcaccuucaccuggacccucuccgacuccgagggcaaggacacccccggcggcuacugccucacccgcuggaugcucaucgaggccgagcucaagugcuucggcaacaccgccgucgccaagugcaacgagaagcacgacgaggaguucugcgacaugcuccgccucuucgacuucaacaagcaggccauccagcgccucaaggccgaggcccagauguccauccagcucaucaacaaggccgucaacgcccucaucaacgaccagcucaucaugaagaaccaccuccgcgacaucaugggcauccccuacugcaacuacuccaaguacugguaccucaaccacaccaccaccggcaagaccucccuccccaagugcuggcucgucuccaacggcuccuaccucaacgagacccacuucuccgacgacaucgagcagcaggccgacaacaugaucaccgagaugcuccagaaggaguacauggagcgccagggcaagaccccccucggccucgucgaccucuucgucuucuccaccuccuucuaccucaucuccaucuuccuccaccucgucaagauccccacccaccgccacaucgucggcaaguccugccccaagccccaccgccucaaccacaugggcaucugcuccugcggccucuacaagcagcccggcguccccgucaaguggaagcgcuga

SEQ ID NO: 939 - RNA, 1476 nt, Artificial Sequence
  derived and/or modified protein sequence (opt2) from LASV(G1897-SLE-2011;Clade IV)__AIT17210__GPC
augggccagaucgucaccuucuuccaggaggucccccacgucaucgaggaggucaugaacaucguccucaucgcccucuccauccucgccguccucaagggccucuacaaccucgccaccugcggccucgucggccucgucaccuuccuccuccucugcggccgcuccugcaccaccucccucuacaagggcgucuacgagcuccagacccucgagcucaacauggagacccucaacaugaccaugccccucuccugcaccaagaacaacucccaccacuacaucauggucggcaacgagaccggccucgagcucacccucaccaacaccuccaucaucaaccacaaguucugcaaccucuccgacgcccacaagaagaaccucuacgaccacgcccucauguccaucaucuccaccuuccaccucuccauccccaacuucaaccaguacgaggccauguccugcgacuucaacggcggcaagaucuccguccaguacaaccucucccacuccuacgccggcgacgccgccaaccacugcggcaccgucgccaacggcguccuccagaccuucaugcgcauggccuggggcggcuccuacaucgcccucgacuccggccgcgaccgcugggacugcaucaugaccuccuaccaguaccucaucauccagaacaccaccugggaggaccacugccaguucucccgccccucccccaucggcuaccucggccuccucucccagcgcacccgcgacaucuacaucucccgccgccuccucggcaccuucaccuggacccucuccgacuccgagggcaaggacacccccggcggcuacugccucacccgcuggaugcucaucgaggccgagcucaagugcuucggcaacaccgccgucgccaagugcaacgagaagcacgacgaggaguucugcgacaugcuccgccucuucgacuucaacaagcaggccauccagcgccucaaggccgaggcccagauguccauccagcucaucaacaaggccgucaacgcccucaucaacgaccagcucaucaugaagaaccaccuccgcgacaucaugggcauccccuacugcaacuacuccaaguacugguaccucaaccacaccaccaccggcaagaccucccuccccaagugcuggcucgucuccaacggcuccuaccucaacgagacccacuucuccgacgacaucgagcagcaggccgacaacaugaucaccgagaugcuccagaaggaguacauggagcgccagggcaagaccccccucggccucgucgaccucuucgucuucuccaccuccuucuaccucaucuccaucuuccuccgccucgucaagauccccacccaccgccacaucgucggcaagcccugccccaagccccaccgccucaaccacaugggcaucugcuccugcggccucuacaagcagcccggcguccccgucaaguggaagcgcuga

SEQ ID NO: 940 - RNA, 1476 nt, Artificial Sequence
  derived and/or modified protein sequence (opt2) from LASV(G1932-SLE-2011;Clade IV)__AIT17212__GPC
augggccagaucgucaccuucuuccaggaggucccccacgucaucgaggaggucaugaacaucguccucaucgcccucuccauccucgccguccucaagggccucuacaaccucgccaccugcggccucgucggccucgucaccuuccuccuccucugcggccgcuccugcaccaccucccucuacaagggcgucuacgagcuccagacccucgagcucaacauggagacccucaacaugaccaugccccucuccugcaccaagaacaacucccaccacuacaucauggucggcaacgagaccggccucgagcucacccucaccaacaccuccaucaucaaccacaaguucugcaaccucuccgacgcccaccgcaagaaccucuacgaccacgcccucauguccaucaucuccaccuuccaccucuccauccccaacuucaaccaguacgaggccauguccugcgacuucaacggcggcaagaucuccguccaguacaaccucucccacuccuacgccggcgacgccgccaaccacugcggcaccgucgccaacggcguccuccagaccuucaugcgcauggccuggggcggcuccuacaucgcccucgacuccggccgcggcaagugggacugcaucaugaccuccuaccaguaccucaucauccagaacaccaccugggaggaccacugccaguucucccgccccucccccaucggcuaccucggccuccucucccagcgcacccgcgacaucuacaucucccgccgccuccucggcaccuucaccuggacccucuccgacuccgagggcaaggacacccccggcggcuacugccucacccgcuggaugcucaucgaggccgagcucaagugcuucggcaacaccgccgucgccaagugcaacgagaagcacgacgaggaguucugcgacaugcuccgccucuucgacuucaacaagcaggccauccagcgccucaaggccgaggcccagauguccauccagcucaucaacaaggccgucaacgcccucaucaacgaccagcucaucaugaagaaccaccuccgcgacaucaugggcauccccuacugcaacuacuccaaguacugguaccucaaccacaccaccaccggcaagaccucccucccccgcugcuggcucgucuccaacggcuccuaccucaacgagacccacuucuccgacgacaucgagcagcaggccgacaacaugaucaccgagaugcuccagaaggaguacauggagcgccagggcaagaccccccucggccucgucgaccucuucgucuucuccaccuccuucuaccucaucuccaucuuccuccaccucgucaagauccccacccaccgccacaucgucggcaagcccugccccaagccccaccgccucaaccacaugggcaucugcuccugcggccucuacaagcagcccggcguccccgucaaguggaagcgcuga

SEQ ID NO: 941 - RNA, 1476 nt, Artificial Sequence
  derived and/or modified protein sequence (opt2) from LASV(G1959-SLE-2011;Clade IV)__AIT17216__GPC
augggccagaucgucaccuucuuccaggaggucccccacgucaucgaggaggucaugaacaucguccucaucgcccucuccauccucgccguccucaagggccucuacaacuucgccaccugcggccucgucggccucgucaccuuccuccuccucugcggccgcuccugcaccaccucccucuacaagggcgucuacgagcuccagacccucgagcucaacauggagacccucaacaugaccaugccccucuccugcaccaagaacaacucccaccacuacaucauggucggcaacgagaccggccucgagcucacccucaccaacaccuccaucaucaaccacaaguucugcaaccucuccgacgcccacaagaagaaccucuacgaccacgcccucauguccaucaucuccaccuuccaccucuccauccccaacuucaaccaguacgaggccauguccugcgacuucaacggcggcaagaucuccguccaguacaaccucucccacuccuacgccggcgacgccgccaaccacugcggcaccgucgccaacggcguccuccagaccuucaugcgcauggccuggggcggcuccuacaucgcccucgacuccggccacggccgcugggacugcaucaugaccuccuaccaguaccucaucauccagaacaccaccugggaggaccacugccaguucucccgccccucccccaucggcuaccucggccuccucucccagcgcacccgcgacaucuacaucucccgccgccuccucggcaccuucaccuggacccucuccgacuccgagggcaaggacacccccggcggcuacugccucacccgcuggaugcucaucgaggccgagcucaagugcuucggcaacaccgccgucgccaagugcaacgagaagcacgacgaggaguucugcgacaugcuccgccucuucgacuucaacaagcaggccauccagcgccucaaggccgaggcccagauguccauccagcucaucaacaaggccgucaacgcccucaucaacgaccagcucaucaugaagaaccaccuccgcgacaucaugggcauccccuacugcaacuacuccaaguacugguaccucaaccacaccaccaccggcaagaccucccuccccaagugcuggcucgucuccaacggcuccuaccucaacgagacccacuucuccgacgacaucgagcagcaggccgacaacaugaucaccgagaugcuccagaaggaguacauggagcgccagggcaagaccccccucggccucgucgaccucuucgucuucuccaccuccuucuaccucaucuccaucuuccuccaccucgucaagauccccacccaccgccacaucgucggcaagcccugccccaagccccaccgccucaacuacaugggcaucugcuccugcggccucuacaagcagcccggcguccccguccgcuggaagcgcuga

SEQ ID NO: 942 - RNA, 1476 nt, Artificial Sequence
  derived and/or modified protein sequence (opt2) from LASV(G2141-SLE-2011;Clade IV)__AIT17224__GPC
augggccagaucgucaccuucuuccaggaggucccccacgucaucgaggaggucaugaacaucguccucaucgcccucuccauccucgccguccucaagggccucuacaacgucgccaccugcggccucaucggccucgucaccuuccuccuccucugcggccgcuccugcaccaccacccucuacaagggcgucuacgagcuccaggcccucgagcucaacauggagacccucaacaugaccaugccccucuccugcaccaagaacaacucccaccacuacauccgcgucggcaacgacaccggccucgagcucacccucaccaacaccuccaucauccagcacaaguucugcaaccucuccgacgcccacaagaagaaccucuacgaccacacccucauguccaucaucuccaccuuccaccucuccauccccaacuucaaccaguacgaggccauguccugcgacuucaacggcggcaagaucuccguccaguacaaccucucccacuccuacgccggcgacgccgccucccacugcggcaccgucgccaacggcguccuccagaccuucaugcgcauggccuggggcggcuccuacaucgcccucgacuccggccgcggcaacugggacugcaucaugaccuccuaccaguaccucaucauccagaacaccaccugggaggaccacugccaguucucccgccccucccccaucggcuaccucggccuccucucccagcgcacccgcgacaucuacaucucccgccgccuccucggcaccuucaccuggacccucuccgacuccgagggccgcgacacccccggcggcuacugccucacccgcuggaugcucaucgaggccgagcucaagugcuucggcaacaccgccgucgccaagugcaacgagaagcacgacgaggaguucugcgacaugcuccgccucuucgacuucaacaagcaggccauccagcgccucaagaccgaggcccagauguccauccagcucaucaacaaggccgucaacgcccucaucaacgaccagcucaucaugaagaaccaccuccgcgacaucaugggcauccccuacugcaacuacuccaaguacugguaccucaacaacaccaucaccggcaaguccucccuccccaagugcuggcucgucuccaacggcuccuaccucaacgagacccacuucuccgacgacaucgagcaggaggccgacaacaugaucaccgagaugcuccagaaggaguacauggagcgccagggcaagaccccccucggccucgucgaccucuucgucuucuccaccuccuucuaccucaucuccaucuuccuccaccucgucaagauccccacccaccgccacaucgucggcaagcccugccccaagccccaccgccucaaccacaugggcgucugcuccugcggccucuacaagcagcccggcguccccguccgcuggaagcgcuga

SEQ ID NO: 943 - RNA, 1476 nt, Artificial Sequence
  derived and/or modified protein sequence (opt2) from LASV(G2147-SLE-2011;Clade IV)__AIT17228__GPC
augggccagaucgucaccuucuuccaggaggucccccacgucaucgaggaggucaugaacaucguccucaucgcccucuccauccucgccguccucaagggccucuacaacuucgccaccugcggccucgucggccuccucaccuuccuccuccucugcggccgcuccugcaccaccucccucuacaagggcgucuacgagcuccagacccucgagcucaacauggagacccucaacaugaccaugccccucuccugcaccaagaacaacucccaccacuacaucauggucggcaacgagaccggccucgagcucacccucaccaacaccuccaucaucgaccacaaguucugcaaccucuccgacgcccacaagaagaaccucuacgaccacgcccucauguccaucaucuccaccuuccaccucuccauccccaacuucaaccaguacgaggccauguccugcgacuucaacggcggcaagaucuccguccaguacaaccucucccacuccuacgccggcgacgccgccaaccacugcggcaccgucgccaacggcguccuccagaccuucaugcgcauggccuggggcggcuccuacaucgcccucgacuccggccgcggcggcugggacugcaucaugaccuccuaccaguaccucaucauccagaacaccaccugggaggaccacugccaguucucccgccccucccccaucggcuaccucggccuccucucccagcgcacccgcgacaucuacaucucccgccgccuccucggcaccuucaccuggacccucuccgacuccgagggcaaggacacccccggcggcuacugccucacccgcuggaugcucaucgaggccgagcucaagugcuucggcaacaccgccgucgccaagugcaacgagaagcacgacgaggaguucugcgacaugcuccgccucuucgacuucaacaagcaggccauccagcgccucaaggccgaggcccagauguccauccagcucaucaacaaggccgucaacgcccucaucaacgaccagcucaucaugaagaaccaccuccgcgacaucaugggcauccccuacugcaacuacuccaaguacugguaccucaaccacaccaccaccggcaagaccucccuccccaagugcuggcucgucuccaacggcuccuaccucaacgagacccacuucuccgacgacaucgagcagcaggccgacaacaugaucaccgagaugcuccagaaggaguacauggagcgccagggcaagaccccccucggccucgucgaccucuucgucuucuccaccuccuucuaccucaucuccaucuuccuccaccucgucaagauccccacccaccgccacaucgucggcaaguccugccccaagccccaccgccucaaccacaugggcaucugcuccugcggccucuacaagcagcccggcguccccgucaaguggaagcgcuga

SEQ ID NO: 944 - RNA, 1476 nt, Artificial Sequence
  derived and/or modified protein sequence (opt2) from LASV(G2165-SLE-2011;Clade IV)__AIT17232__GPC
augggccagaucgucaccuucuuccaggaggucccccacgucaucgaggaggucaugaacaucguccucaucgcccucuccauccucgccguccucaagggccucuacaacuucgccaccugcggccucgucggccucgucaccuuccuccuccucugcggccgcuccugcaccaccucccucuacaagggcgucuacgagcuccagacccucgagcucaacauggagacccucaacaugaccaugccccucuccugcaccaagaacaacucccaccacuacauccgcgucggcaacgagaccggccucgagcucacccucaccaacaccuccaucaucaaccacaaguucugcaaccucuccgacgcccacaagaagaaccucuacgaccacgcccucauguccaucaucuccaccuuccaccucuccauccccaacuucaaccaguacgaggccauguccugcgacuucaacgagggcaagaucuccguccaguacaaccucucccacuccuacgccggcgacgccgccaaccacugcggcaccgucgccaacggcguccuccagaccuucaugcgcauggccuggggcggcuccuacaucgcccucgacuccggccgcggcaagugggacugcaucaugaccuccuaccaguaccucaucauccagaacaccaccugggaggaccacugccaguucucccgccccucccccaucggcuaccucggccuccucucccagcgcacccgcgacaucuacaucucccgccgccuccucggcaccuucaccuggacccucuccgacuccgagggcaaggacacccccggcggcuacugccucacccgcuggaugcucaucgaggccgagcucaagugcuucggcaacaccgccgucgccaagugcaacgagaagcacgacgaggaguucugcgacaugcuccgccucuucgacuucaacaagcaggccaucgagcgccucaaggccgaggcccagauguccauccagcucaucaacaaggccgucaacgcccucaucaacgaccagcucaucaugaagaaccaccuccgcgacaucaugggcauccccuacugcaacuacuccaaguacugguaccucaaccacaccaccaccggcaagaccucccuccccaagugcuggcucgucuccaacggcuccuaccucaacgagacccacuucuccgacgacaucgagcagcaggccgacaacaugaucaccgagaugcuccagaaggaguacauggagcgccagggcaagaccccccucggccucgucgaccucuucgucuucuccaccuccuucuaccucaucuccaucuuccuccaccucgucaagauccccacccaccgccacaucgucggcaaguccugccccaagccccaccgccucaaccacaugggcaucugcuccugcggccucuacaagcagcccggcguccccgucaaguggaagcgcuga

SEQ ID NO: 945 - RNA, 1476 nt, Artificial Sequence
  derived and/or modified protein sequence (opt2) from LASV(G2184-SLE-2011;Clade IV)__AIT17236__GPC
augggccagaucgucaccuucuuccaggaggucccccacgucaucgaggaggucaugaacaucguccucaucgcccucuccauccucgccguccucaagggccucuacaacuucgccaccugcggccucgucggccucgucaccuuccuccuccucugcggccgcuccugcaccaccucccucuacaagggcgucuacgagcuccagacccucgagcucaacauggagacccucaacaugaccaugccccucuccugcaccaagaacaacucccaccacuacaucauggucggcaacgagaccggccucgagcucacccucaccaacaccuccaucaucaaccacaaguucugcaaccucuccgacgcccacaagaagaaccucuacgaccacgcccucauguccaucaucuccaccuuccaccucuccauccccaacuucaaccaguacgaggccauguccugcgacuucaacggcggccgcaucuccguccaguacaaccucucccacuccuacgccggcgaggccgccaaccacugcggcaccgucgccaacggcguccuccagaccuucaugcgcauggccuggggcggcuccuacaucgcccucgacuccggccgcggcaagugggacugcaucaugaccuccuaccaguaccucaucauccagaacaccaccugggaggaccacugccaguucucccgccccucccccaucggcuaccucggccuccucucccagcgcacccgcgacaucuacaucucccgccgccuccucggcaccuucaccuggacccucuccgacuccgagggcaaggacacccccggcggcuacugccucacccgcuggaugcucaucgaggccgagcucaagugcuucggcaacaccgccgucgccaagugcaacgagaagcacgacgaggaguucugcgacaugcuccgccucuucgacuucaacaagcaggccauccagcgccucaaggccgaggcccagauguccauccagcucaucaacaaggccgucaacgcccucaucaacgaccagcucaucaugaagaaccaccuccgcgacaucaugggcauccccuacugcaacuacucccgcuacugguaccucaaccacaccaccaccggcaagaccucccuccccaagugcuggcucgucuccaacggcuccuaccucaacgagacccacuucuccgacgacaucgagcagcaggccgacaacaugaucaccgagaugcuccagaaggaguacauggagcgccagggcaagaccccccucggccucgucgaccucuucgucuucuccaccuccuucuaccucaucuccaucuuccuccaccucgucaagauccccacccaccgccacaucgucggcaaguccugccccaagccccaccgccucaaccacaugggcaucugcuccugcggccucuacaagcagcccggcguccccgucaaguggaagcgcuga

SEQ ID NO: 946 - RNA, 1476 nt, Artificial Sequence
  derived and/or modified protein sequence (opt2) from LASV(G2197-SLE-2011;Clade IV)__AIT17240__GPC
augggccagaucgucaccuucuuccaggaggucccccacgucaucgaggaggucaugaacaucguccucaucgcccucuccauccucgccguccucaagggccucuacaaccucgccaccugcggccucgucggccucgucaccuuccuccuccucugcggccgcuccugcaccaccucccucuacaagggcuucuacgagcuccagacccucgagcucaacauggagacccucaacaugaccaugccccucuccugcaccaagaacaacucccaccacuacauccgcgucggcaacgagaccggccucgagcucacccucaccaacaccuccaucaucgaccacaaguucugcaaccucuccgacgcccacaagaagaaccucuacgaccacgcccucauguccaucaucuccaccuuccaccucuccauccccaacuucaaccaguacgaggccauguccugcgacuucaacggcggcaagaucuccguccaguacaaccucucccacuccuacgccggcgacgccgccaaccacugcggcaccgucgccaacggcguccuccagaccuucaugcgcauggccuggggcggcuccuacaucgcccucgacuccggccgcggccgcugggacugcaucaugaccuccuaccaguaccucaucauccagaacaccaccugggaggaccacugccaguucucccgccccucccccaucggcuaccucggccuccucucccagaagacccgcgacaucuacaucucccgccgccuccucggcaccuucaccuggacccucuccgacuccgagggcaaggacacccccggcggcuacugccucacccgcuggaugcucaucgaggccgagcucaagugcuucggcaacaccgccgucgccaagugcaacgagaagcacgacgaggaguucugcgacaugcuccgccucuucgacuucaacaagcaggccauccagcgccucaaggccgaggcccagauguccauccagcucaucaacaaggccgucaacgcccucaucaacgaccagcucaucaugaagaaccaccuccgcgacaucaugggcauccccuacugcaacuacuccaaguacugguaccucaaccacaccaccaccggcaagaccucccuccccaagugcuggcucgucuccaacggcuccuaccucaacgagacccacuucuccgacgacaucgagcagcaggccgacaacaugaucaccgagaugcuccagaaggaguacauggagcgccagggcaagaccccccucggccucgucgaccucuucgucuucuccaccuccuucuaccucaucuccaucuuccuccaccucgucaagauccccacccaccgccacaucgucggcaaguccugccccaagccccaccgccucaaccacaugggcaucugcuccugcggccucuacaagcagcccggcguccccgucaaguggaagcgcuga

SEQ ID NO: 947 - RNA, 1476 nt, Artificial Sequence
  derived and/or modified protein sequence (opt2) from LASV(G2222-SLE-2011;Clade IV)__AIT17244__GPC
augggccagaucgucaccuucuuccaggaggucccccacgucaucgaggaggucaugaacaucguccucaucgcccucuccauccucgccguccucaagggccucuacaaccucgccaccugcggccucgucggccucgucaccuuccuccuccucugcggccgcuccugcaccaccaaccucuacaagggcgucuacgagcuccagacccucgagcucaacauggagacccucaacaugaccaugccccucuccugcaccaagaacuccucccaccacuacauccgcgucggcaacgagaccggccucgagcucacccucaccaacaccuccaucaucgaccacaaguucugcaaccucuccgacgcccacaagaagaaccucuacgaccacgcccucauguccaucaucuccaccuuccaccucuccauccccaacuucaaccaguacgaggccauguccugcgacuucaacggcggcaagaucuccguccaguacaaccucucccacuccuacgucggcgacgccgccgaccacugcggcaccgucgccaacggcguccuccagaccuucaugcgcauggccuggggcggcuccuacaucgcccucgacuccggccgcggcaagugggacugcaucaucaccuccuaccaguaccucaucauccagaacaccaccugggaggaccacugccaguucucccgccccucccccaucggcuaccucggccuccucucccagcgcacccgcgacaucuacaucucccgccgccuccucggcaccuucaccuggacccucuccgacuccgagggcaaggacacccccggcggcuacugccucacccgcuggaugcucaucgaggccgagcucaagugcuucggcaacaccgccgucgccaagugcaacgagaagcacgacgaggaguucugcgacaugcuccgccucuucgacuucaacaagcaggccauccagcgccucaaggccgaggcccagauguccauccagcucaucaacaaggccgucaacgcccucaucaacgaccagcucaucaugaagaaccaccuccgcgacaucaugggcauccccuacugcaacuacuccaaguacugguaccucaaccacaccaucaccggcaagaccucccucccccgcugcuggcucgucuccaacggcuccuaccucaacgagacccgcuucuccgacgacaucgagcagcaggccgacaacaugaucaccgagaugcuccagaaggaguacauggagcgccagggcaagaccccccucggccucgucgaccucuucgucuucuccaccuccuucuaccucaucuccaucuuccuccaccucgucaagauccccacccaccgccacaucgucggcaagcccugccccaagccccaccgccucaaccacaugggcaucugcuccugcggccucuacaagcagcccggcguccccgucaaguggaagcgcuga

SEQ ID NO: 948 - RNA, 1476 nt, Artificial Sequence
  derived and/or modified protein sequence (opt2) from LASV(G2230-SLE-2012;Clade IV)__AIT17246__GPC
augggccagaucgucaccuucuuccaggaggucccccacgucaucgaggaggucaugaacaucguccucaucgcccucucccuccucgccguccucaagggccucuacaacgucgccaccugcggccucaucggccucaucaccuuccuccuccucugcggccgcuccugcaccaccaaccucuacaagggcgucuacgagcuccagacccucgagcucaacauggagacccucaacaugaccaugccccucuccugcaccaagaacuccucccaccacuacaucauggucggcaacgagaccggccucgagcucacccucaccaacaccuccaucaucaaccacaaguucugcaaccucuccgacgcccacaagaagaaccucuacgaccacacccucauguccaucaucuccaccuuccaccucuccauccccaacuucaaccaguacgaggccauguccugcgacuucaacggcggcaagaucuccguccaguacaaccucucccacuccuacgccgucgacgccgccaaccacugcggcaccgucgccaacggcauccuccagaccuucaugcgcauggccuggggcggcuccuacaucgcccucgacuccggccgcggcaacugggacugcaucaugaccuccuaccaguaccucaucauccagaacaccaccugggaggaccacugccaguucucccgccccucccccaucggcuaccucggccuccucucccagcgcacccgcgacaucuacaucucccgccgccuccucggcaccuucaccuggacccucuccgacuccgagggcaacgacacccccggcggcuacugccucacccgcuggaugcucaucgaggccgagcucaagugcuucggcaacaccgccgucgccaagugcaacgagaagcacgacgaggaguucugcgacaugcuccgccucuucgacuucaacaagcaggccauccagcgccucaaggccgaggcccagauguccauccagcucaucaacaaggccgucaacgcccucaucaacgaccagcucaucaugaagaaccaccuccgcgacaucaugggcauccccuacugcaacuacuccaaguacugguaccucaaccacaccaccaccggcaagaccucccuccccaagugcuggcucgucuccaacggcuccuaccucaacgagacccacuucuccgacgacaucgagcagcaggccgacaacaugaucaccgagaugcuccagaaggaguacauggagcgccagggcaagaccccccucggccucgucgaccucuucgucuucuccaccuccuucuaccucaucuccaucuuccuccaccucgucaagauccccacccaccgccacaucgucggcaagcccugccccaagccccaccgccucaaccacaugggcaucugcuccugcggccucuacaagcagcccggcguccccguccgcuggaagcgcuga

SEQ ID NO: 949 - RNA, 1476 nt, Artificial Sequence
  derived and/or modified protein sequence (opt2) from LASV(G2259-SLE-2012;Clade IV)__AIT17250__GPC
augggccagaucgucaccuucuuccaggaggucccccacgucaucgaggaggucaugaacaucguccucaucgcccucucccuccucgccguccucaagggccucuacaacgucgccaccugcggccucaucggccucgucaccuuccuccuccucugcggccgcuccugcaccaccaaccucuacaagggcgucuacgagcuccagacccucgagcucaacauggagacccucaacaugaccaugccccucuccugcaccaagaacaacucccaccacuacaucauggucggcaacgagaccggccucgagcucacccucaccaacaccuccaucaucaaccacaaguucugcaaccucuccgacgcccacaagaagaaccucuacgaccacacccucauguccaucaucuccaccuuccaccucuccauccccaacuucaaccaguacgaggccauguccugcgacuucaacggcggcaagaucuccguccaguacaaccucucccacuccuacgccgucgacgccgccaaccacugcggcaccgucgccaacggcguccuccagaccuucaugcgcauggccuggggcggcuccuacaucgcccucgacuccggccgcggcaacugggacugcaucaugaccuccuaccaguaccucaucauccagaacaccaccugggaggaccacugccaguucucccgccccucccccaucggcuaccucggccuccucucccagcgcacccgcgacaucuacaucucccgccgccuccucggcaccuucaccuggacccucuccgacuccgagggcaacgacacccccggcggcuacugccucacccgcuggaugcucaucgaggccgagcucaagugcuucggcaacaccgccgucgccaagugcaacgagaagcacgacgaggaguucugcgacaugcuccgccucuucgacuucaacaagcaggccauccagcgccucaaggccgaggcccagauguccauccagcucaucaacaaggccgucaacgcccucaucaacgaccagcucaucaugaagaaccaccuccgcgacaucaugggcauccccuacugcaacuacuccaaguacugguaccucaaccacaccaccaccggcaagaccucccuccccaagugcuggcucgucuccaacggcuccuaccucaacgagacccacuucuccgacgacaucgagcagcaggccgacaacaugaucaccgagaugcuccagaaggaguacauggagcgccagggcaagaccccccucggccucgucgaccucuucgucuucuccaccuccuucuaccucaucuccaucuuccuccaccucgucaagauccccacccaccgccacaucgucggcaagcccugccccaagccccaccgccucaaccacaugggcaucugcuccugcggccucuacaagcagcccggcguccccguccgcuggaagcgcuga

SEQ ID NO: 950 - RNA, 1476 nt, Artificial Sequence
  derived and/or modified protein sequence (opt2) from LASV(G2263-SLE-2012;Clade IV)__AIT17254__GPC
augggccagaucgucaccuucuuccaggaggucccccacgucaucgaggaggucaugaacaucguccucaucgcccucuccauccucgccguccucaagggccucuacaacuucgccaccugcggcaucgucggccucgucaccuuccuccuccucugcggccgcuccugcaccaccucccucuacaagggcgucuacgagcuccagacccucgagcucaacauggagacccucaacaugaccaugccccucuccugcaccaagaacaacucccaccacuacaucauggucggcaacgagaccggccucgagcucacccucaccaacaccuccaucaucaaccacaaguucugcaaccucuccgacgcccacaagaagaaccucuacgaccacgcccucauguccaucaucuccaccuuccaccucuccauccccaacuucaaccaguacgaggccauguccugcgacuucaacggcggcaagaucuccguccaguacaaccucucccacuccuacgccggcgacgccgccaaccacugcggcaccgucgccaacggcguccuccagaccuucaugcgcauggccuggggcggcuccuacaucgcccucgacuccggccgcgaccgcugggacugcaucaugaccuccuaccaguaccucaucauccagaacaccaccugggaggaccacugccaguucucccgccccucccccaucggcuaccucggccuccucucccagcgcacccgcgacaucuacaucucccgccgccuccucggcaccuucaccuggacccucuccgacuccgagggcaagaacacccccggcggcuacugccucacccgcuggaugcucaucgaggccgagcucaagugcuucggcaacaccgccgucgccaagugcaacgagaagcacgacgaggaguucugcgacaugcuccgccucuucgacuucaacaagcaggccauccagcgccucaaggccgaggcccagauguccaucucccucaucaacaaggccgucaacgcccucaucaacgaccagcucaucaugaagaaccaccuccgcgacaucaugggcauccccuacugcaacuacuccaaguacugguaccucaaccacaccaccaccggcaagaccucccucccccgcugcuggcucgucuccaacggcuccuaccucaacgagacccacuucuccgacgacaucgagcagcaggccgacaacaugaucaccgagaugcuccagaaggaguacauggaccgccagggcaagaccccccucggccucgucgaccucuucgucuucuccaccuccuucuaccucaucuccaucuuccuccaccucgucaagauccccacccaccgccacaucgucggcaagaccugccccaagccccaccgccucaaccacaugggcaucugcuccugcggccucuacaagcagcccggcguccccgucaaguggaagcgcuga

SEQ ID NO: 951 - RNA, 1476 nt, Artificial Sequence
  derived and/or modified protein sequence (opt2) from LASV(G2280-SLE-2012;Clade IV)__AIT17258__GPC
augggccagaucgucaccuucuuccaggaggucccccacgucaucgaggaggucaugaacaucguccucaucgcccucuccauccucgccguccucaagggccucuacaacaucgccaccugcggccucgucggccucgucaccuuccuccuccucugcggccgcuccugcaccaccucccucuacaagggcgucuacgagcuccagacccucgagcucaacauggagacccucaacaugaccaugccccucuccugcaccaagaacaacucccaccacuacaucauggucggcaacgagaccggccucgagcucacccucaccaacaccuccaucaucaaccacaaguucugcaaccucuccgacgcccacaagaagaaccucuacgaccacgcccucauguccaucgucuccaccuuccaccucuccauccccaacuucaaccaguacgaggccauguccugcgacuucaacggcggcaagaucuccguccaguacaaccucucccacuccuacgccgucgacgccgccaaccacugcggcaccgucgccaacggcguccuccagaccuucaugcgcauggccuggggcggcuccuacaucgcccucgacuccggccgcggcggcugggacugcaucaugaccuccuaccaguaccucaucauccagaacgucaccugggaggaccacugccaguucucccgccccucccccaucggcuaccucggccuccucucccagcgcacccgcgacgucuacaucucccgccgccuccucggcaccuucaccuggacccucuccgacuccgagggcaacgacacccccggcggcuacugccucacccgcuggaugcucaucgaggccgagcucaagugcuucggcaacaccgccgucgccaagugcaacgagaagcacgacgaggaguucugcgacaugcuccgccucuucgacuucaacaagcaggccauccagcgccucaaggccgaggcccagauguccauccagcucaucaacaaggccgucaacgcccucaucaacgaccagcucaucaugaagaaccaccuccgcgacaucaugggcauccccuacugcaacuacuccaaguacugguaccucaaccacaccaccaccggcaagaccucccuccccaagugcuggcucgucuccaacggcuccuaccucaacgagacccacuucuccgacgacaucgagcagcaggccgacaacaugaucaccgagaugcuccagaaggaguacauggagcgccagggcaagaccccccucggccucgucgaccucuucgucuucuccaccuccuucuaccucaucuccaucuuccuccaccucgucaagauccccacccaccgccacaucgucggcaagcccugccccaagccccaccgccucaaccacaugggcaucugcuccugcggccucuacaagcagcccggcguccccgucaaguggaagcgcuga

SEQ ID NO: 952 - RNA, 1476 nt, Artificial Sequence
  derived and/or modified protein sequence (opt2) from LASV(G2295-SLE-2012;Clade IV)__AIT17262__GPC
augggccagaucgucaccuucuuccaggaggucccccacgucaucgaggaggucaugaacaucguccucaucgcccucuccauccucgccguccucaagggccucuacaaccucgccaccugcggccucgucggccucgucaccuuccuccuccucugcggccgcuccugcaccaccucccucuacaagggcgucuacgagcuccagacccucgagcucaacauggagacccucaacaugaccaugccccucuccugcaccaagaacaacucccaccacuacaucauggucggcaacgagaccggccucgagcucacccucaccaacaccuccaucaucaaccacaaguucugcaaccucuccgacgcccacaagaagaaccucuacgaccacgcccucauguccaucaucuccaccuuccaccucuccauccccaacuucaaccaguacgaggccauguccugcgacuucaacggcggcaagaucuccguccaguacaaccucucccacuccuacgccggcgacgccgccacccacugcggcaccgucgccaacggcguccuccagaccuucaugcgcauggccuggggcggcuccuacaucgcccucgacuccggccgcggcaagugggacugcaucaugaccuccuaccaguaccucaucauccagaacaccaccugggaggaccacugccaguucucccgccccucccccaucggcuaccucggccuccucucccagcgcacccgcgacaucuacaucucccgccgccuccucggcaccuucaccuggacccucuccgacuccgagggcaaggacacccccggcggcuacugccucacccgcuggaugcucaucgaggccgagcucaagugcuucggcaacaccgccgucgccaagugcaacgagaagcacgacgaggaguucugcgacaugcuccgccucuucgacuucaacaagcaggccauccagcgccucaagaccgaggcccagauguccauccagcucaucaacaaggccgucaacgcccucaucaacgaccagcucaucaugaagaaccaccuccgcgacaucaugggcauccccuacugcaacuacuccaaguacugguaccucaaccacaccaccaccggcaagaccucccucccccgcugcuggcucgucuccaacggcuccuaccucaacgagacccacuucuccgacgacaucgagcagcaggccgacaacaugaucaccgagaugcuccagaaggaguacauggagcgccagggcaagaccccccucggccucgucgaccucuucgucuucuccaccuccuucuaccucaucuccaucuuccuccaccucgucaagauccccacccaccgccacaucgucggcaagcccugccccaagccccaccgccucaaccacaugggcaucugcuccugcggccucuacaagcagcccggcguccccgucaaguggaagcgcuga

SEQ ID NO: 953 - RNA, 1476 nt, Artificial Sequence
  derived and/or modified protein sequence (opt2) from LASV(G2315-SLE-2012;Clade IV)__AIT17266__GPC
augggccagaucgucaccuucuuccaggaggucccccacgucaucgaggaggucaugaacaucguccucaucgcccucuccauccucgccguccucaagggccucuacaaccucgccaccugcggccucgucggccucgucaccuuccuccuccucugcggccgcuccugcaccaccucccucuacaagggcgucuacgagcuccagacccucgagcucaacauggagacccucaacaugaccaugccccucuccugcaccaagaacaacucccaccacuacaucauggucggcaacgagaccggccucgagcucacccucaccaacaccucccucaucaaccacaaguucugcaaccucuccgacgcccacaagaagaaccucuacgaccacgcccucauguccaucaucuccaccuuccaccucuccauccccaacuucaaccaguacgaggccauguccugcgacuucaacggcggcaagaucuccguccaguacaaccucucccacuccuacgccgucgacgccgccaaccacugcggcaccgucgccaacggcguccuccagaccuucaugcgcauggccuggggcggcuccuacaucgcccucgacuccggccgcggcggcugggacugcaucaugaccuccuaccaguaccucaucauccagaacaccaccugggaggaccacugccaguucucccgccccucccccaucggcuaccucggccuccucucccagcgcacccgcgacaucuacaucucccgccgccuccucggcaccuucaccuggacccucuccgacuccgagggcaaggacacccccggcggcuacugccucacccgcuggaugcucaucgaggccgagcucaagugcuucggcaacaccgccgucgccaagugcaacgagaagcacgacgaggaguucugcgacaugcuccgccucuucgacuucaacaagcaggccauccagcgccucaaggccgaggcccagauguccauccagcucaucaacaaggccgucaacgcccucaucaacgaccagcucaucaugaagaaccaccuccgcgacaucaugggcauccccuacugcaacuacuccaaguacugguaccucaaccacaccaccaccggccgcaccucccucccccgcugcuggcucgucuccaacggcuccuaccucaacgagacccacuucuccgacgacaucgagcagcaggccgacaacaugaucaccgagaugcuccagaaggaguacauggagcgccagggcaagaccccccucggccucgucgaccucuucgucuucuccaccuccuucuaccucaucuccaucuuccuccaccucgucaagauccccacccaccgccacaucgucggcaaguccugccccaagccccaccgccucaaccacaugggcaucugcuccugcggccucuacaagcagcccggcguccccgucaaguggaagcgcuga

SEQ ID NO: 954 - RNA, 1476 nt, Artificial Sequence
  derived and/or modified protein sequence (opt2) from LASV(G2318-SLE-2012;Clade IV)__AIT17270__GPC
augggccagaucgucaccuucuuccaggaggucccccacgucaucgaggaggucaugaacaucguccucaucgcccucuccguccucgccguccucaagggccucuacaacuucgccaccugcggccucgucggccucgucaccuuccuccuccucugcggccgcuccugcuccaccuccgucuacaagggcgucuacgagcuccagacccucgagcucaacauggagacccucaacaugaccaugccccucuccugcaccaagaacaacucccaccacuacaucauggucggcaacgagaccggccucgagcucacccucaccaacaccuccaucaucaaccacaaguucugcaaccucuccgacgcccacaagaagaaccucuacgaccacgcccucauguccaucaucuccaccuuccaccucuccauccccaacuucaaccaguacgaggccauguccugcgacuucaacggcggcaagaucuccguccaguacaaccucucccacuccuacgccgucgacgccgccaaccacugcggcaccgucgccaacggcguccuccagaccuucaugcgcauggccuggggcggcuccuacaucgcccucgacuccggccacggcggcugggacugcaucaugaccaacuaccaguaccucaucauccagaacaccaccugggaggaccacugccaguucucccgccccucccccaucggcuaccucggccuccucucccagcgcacccgcgacaucuacaucucccgccgccuccucggcaccuucaccuggacccucuccgacuccgagggcaaggacacccccggcggcuacugccucacccgcuggaugcucaucgaggccgagcucaagugcuucggcaacaccgccgucgccaagugcaacgagaagcacgacgaggaguucugcgacaugcuccgccucuucgacuucaacaagcaggccauccagcgccucaaggccgaggcccagauguccauccagcucaucaacaaggccgucaacgcccucaucaacgaccagcucaucaugaagaaccaccuccgcgacaucaugggcauccccuacugcaacuacuccaaguacugguaccucaaccacaccaccaccggccgcaccucccuccccaagugcuggcucgucuccaacggcuccuaccucaacgagacccacuucuccgacgacaucgagcagcaggccgacaacaugaucaccgagaugcuccagcgcgaguacauggagcgccagggcaagaccccccucggccucgucgaccucuucgucuucuccaccuccuucuaccucaucuccaucuuccuccaccucgucaagauccccacccaccgccacaucgucggcaaguccugccccaagccccaccgccucaaccacaugggcaucugcuccugcggccucuacaagcagcccggcguccccgucaaguggaagcgcuga

SEQ ID NO: 955 - RNA, 1476 nt, Artificial Sequence
  derived and/or modified protein sequence (opt2) from LASV(G2363-SLE-2012;Clade IV)__AIT17274__GPC
augggccagaucgucaccuucuuccaggaggucccccacgucaucgaggaggucaugaacaucguccucaucgcccucuccauccucgccguccucaagggccucuacaacgucgccaccugcggccucaccggccucgucgccuuccuccuccucugcggccgcuccugcaccaccacccucuacaagggcgucuacgagcuccaggcccucgagcucaacauggagacccucaacaugaccaugccccucuccugcaccaagaacaacucccaccacuacauccgcgucggcaacgagaccggccucgagcucacccucaccaacaccuccaucaucgagcaccgcuucugcaaccucuccgacgcccacaagaagaaccucuacgaccacgcccucauguccaucaucuccaccuuccaccucuccauccccaacuucaaccaguacgaggccauguccugcgacuucaacggcggcaagaucuccguccaguacaaccucucccacuccuacgccgucgacgccgccaaccacugcggcaccgucgccaacggcguccuccagaccuucaugcgcauggccuggggcggcuccuacaucgcccucgacuccggccgcaacggcugggacugcaucaugaccuccuaccaguaccucaucauccagaacaccaccugggaggaccacugccaguucucccgccccucccccaucggcuaccucggccuccucucccagcgcacccgcgacaucuacaucucccgccgccuccucggcaccuucaccuggacccucuccgacuccgagggcaaggacacccccggcggcuacugccucacccgcuggaugcucaucgaggccgagcucaagugcuucggcaacaccgccgucgccaagugcaacgagaagcacgacgaggaguucugcgacaugcuccgccucuucgacuucaacaagcaggccauccagcgccucaaggccgaggcccagauguccauccagcucaucaacaaggccgucaacgcccucaucaacgaccagcucaucaugaagaaccaccuccgcgacaucaugggcauccccuacugcaacuacuccaaguacugguaccucaacaacaccgccaccggcaagaccucccucccccgcugcuggcucgucuccaacggcuccuaccucaacgagacccacuucuccgacgacaucgagcagcaggccgacaacaugaucaccgagaugcuccagaaggaguacauggagcgccagggcaagaccccccucggccucgucgaccucuucgucuucuccaccuccuucuaccucaucuccaucuuccuccaccucgucaagauccccacccaccgccacaucgucggcaagcccugccccaagccccaccgccucaaccacaugggcaucugcuccugcggccucuacaagcagcccggcgcccccguccgcuggaagcgcuga

SEQ ID NO: 956 - RNA, 1476 nt, Artificial Sequence
  derived and/or modified protein sequence (opt2) from LASV(G2384-SLE-2012;Clade IV)__AIT17276__GPC
augggccagaucgucaccuucuuccaggaggucccccacgucaucgaggaggucaugaacaucguccucaucgcccucuccauccucgccguccucaagggccucuacaacuucgccaccugcggccucgucggccucgucaccuuccuccuccucugcggccgcuccugcaccaccucccucuacaagggcgucuacgagcuccagacccucgagcucaacauggagacccucaacaugaccaugccccucuccugcaccaagaacaacucccaccacuacaucauggucggcaacgagaccggccucgagcucacccucaccaacaccuccaucaucaaccacaaguucugcaaccucuccgacgcccacaagaagaaccucuacgaccacgcccucauguccaucaucuccaccuuccaccucuccauccccaacuucaaccaguacgaggccauguccugcgacuucaacggcggcaagaucuccguccaguacaaccucucccacuccuacgccggcgacgccgccaaccacugcggcaccgucgccaacggcguccuccagaccuucaugcgcauggccuggggcggcuccuacaucgcccucgacuccggccacggcaagugggacugcaucaugaccuccuaccaguaccucaucauccagaacaccaccugggaggaccacugccaguucucccgccccucccccaucggcuaccucggccuccucucccagcgcacccgcgacaucuacaucucccgccgccuccucggcaccuucaccuggacccucuccgacuccgagggcaaggacacccccggcggcuacugccucacccgcuggaugcucaucgaggccgagcucaagugcuucggcaacaccgccgucgccaagugcaacgagaagcacgacgaggaguucugcgacaugcuccgccucuucgacuucaacaagcaggccauccagcgccucaaggccgaggcccagauguccauccagcucaucaacaaggccgucaacgcccucaucaacgaccagcucaucaugaagaaccaccuccgcgacaucaugggcauccccuacugcaacuacuccaaguacugguaccucaaccacaccaccaccggcaagaccucccuccccaagugcuggcucgucuccaacggcuccuaccucaacgagacccacuucuccgacgacaucgagcagcaggccgacaacaugaucaccgagaugcuccagaaggaguacauggagcgccagggcaagaccccccucggccucgucgaccucuucgucuucuccaccuccuucuaccucaucuccaucuuccuccaccucgucaagauccccacccaccgccacaucgucggcaaguccugccccaagccccaccgccucaaccacaugggcaucugcuccugcggccucuacaagcagcccggcguccccguccgcuggaagcgcuga

SEQ ID NO: 957 - RNA, 1473 nt, Artificial Sequence
  derived and/or modified protein sequence (opt2) from LASV(G2392-SLE-2012;Clade IV)__AIT17280__GPC
augggccagaucgucaccuucuuccaggaggucccccacgucaucgaggaggucaugaacaucguccucaucgcccucuccauccucgccguccucaagggccucuacaacuucgccaccugcggccucgucggccucgucaccuuccuccuccucugcggccgcuccugcaccaccucccucuacaagggcgucuacgagcuccagacccucgagcucaacauggagacccucaacaugaccaugccccucuccugcaccaagaacaacucccaccacuacauccgcgucggcaacgagaccggccucgagcucacccucaccaacaccuccaucaucgaccacaaguucugcaaccucuccgacgcccacaagaagaaccucuacgaccacgcccucauguccaucaucuccaccuuccaccucuccauccccaacuucaaccaguacgaggccauguccugcgacuucaacggcggcaagaucuccguccaguacaaccucucccacuccuacgccggcgacgccgccaaccacugcggcaccgucgccaacggcguccuccagaccuucaugcgcauggccuggggcggcuccuacaucgcccucgacuccggccacgagugggacugcaucaugaccuccuaccaguaccucaucauccagaacaccaccugggacaaccacugccaguucucccgccccucccccaucggcuaccucggccuccucucccagcgcacccgcgacaucuacaucucccgccgccuccucggcaccuucaccuggacccucuccgacuccgagggcaaggacacccccggcggcuacugccucacccgcuggaugcucaucgaggccgagcucaagugcuucggcaacaccgccgucgccaagugcaacgagaagcacgacgaggaguucugcgacaugcuccgccucuucgacuucaacaagcaggccauccagcgccucaaggucgaggcccagauguccauccagcucaucaacaaggccgucaacgcccucaucaacgaccagcucaucaugaagaaccaccuccgcgacaucaugggcauccccuacugcaacuacuccaaguacugguaccucaaccacaccaccaccggcaagaccucccuccccaagugcuggcucgucuccaacggcuccuaccucaacgagacccacuucuccgacgacaucgagcagcaggccgacaacaugaucaccgagaugcuccagaaggaguacauggagcgccagggcaagaccccccucggccucgucgaccucuucgucuucuccaccuccuucuaccucaucuccaucuuccuccaccucgucaagauccccacccaccgccacaucgucggcaaguccugccccaagccccaccgccucaaccacaugggcaucugcuccugcggcuucuacaagcagcccggcguccccgucaaguggaagcgcuga

SEQ ID NO: 958 - RNA, 1476 nt, Artificial Sequence
  derived and/or modified protein sequence (opt2) from LASV(G2405-SLE-2012;Clade IV)__AIT17284__GPC
augggccagaucgucaccuucuuccaggaggucccccacgucaucgaggaggucaugaacaucguccucaucgcccucuccguccucgccguccucaagggccucuacaacuucgccaccugcggcaucgucggccucgucaccuuccuccuccucugcggccgcuccugcaccaccucccucuacaagggcgucuacgagcuccagacccucgagcucaacauggagacccucaacaugaccaugccccucuccugcaccaagaacaacucccaccacuacaucauggucggcaacgacaccggccucgagcucacccucaccaacaccuccaucaucaaccacaaguucugcaaccucuccgacgcccacaagaagaaccucuacgaccacgcccucauguccaucaucuccaccuuccaccucuccauccccaacuucaaccaguacgaggccauguccugcgacuucaacggcggcaagaucuccguccaguacaaccucucccacuccuacgccggcgacgccgccgaccacugcggcaccgucgccaacggcguccuccagaccuucaugcgcauggccuggggcggcuccuacaucgcccucgacuccggccgcggccgcugggacugcaucaugaccuccuaccaguaccucaucauccagaacaccaccugggaggaccacugccaguucucccgccccucccccaucggcuaccucggccuccucucccagcgcacccgcgacaucuacaucucccgccgccuccucggcaccuucaccuggacccucuccgacuccgagggcaaggacacccccggcggcuacugccucacccgcuggaugcucaucgaggccgagcucaagugcuucggcaacaccgccgucgccaagugcaacgagaagcacgacgaggaguucugcgacaugcuccgccucuucgacuucaacaagcaggccauccagcgccucaaggccgaggcccagauguccauccagcucaucaacaaggccgucaacgcccucaucaacgaccagcucaucaugaagaaccaccuccgcgacaucaugggcauccccuacugcaacuacuccaaguacugguaccucaaccacaccaccaccggcaagaccucccuccccaagugcuggcucgucuccaacggcuccuaccucaacgagacccacuucuccgacgacaucgagcagcaggccgacaacaugaucaccgagaugcuccagaaggaguacauggagcgccagggcaagaccccccucggccucgucgaccucuucgucuucuccaccuccuucuaccucaucuccaucuuccuccaccucgucaagauccccacccaccgccacaucgucggcaagcccugccccaagccccaccgccucaaccacaugggcaucugcuccugcggccucuacaagcagcccggcguccccgucaaguggaagcgcuga

SEQ ID NO: 959 - RNA, 1476 nt, Artificial Sequence
  derived and/or modified protein sequence (opt2) from LASV(G2427-SLE-2012;Clade IV)__AIT17288__GPC
augggccagaucgucaccuucuuccaggaggucccccacgucaucgaggaggucaugaacaucguccucaucgcccucuccauccucgccguccucaagggccucuacaacuucgccaccugcggccucgucggccucgucaccuuccuccuccucugcggccgcuccugcaccaccucccucuacaagggcgucuacgagcuccagacccucgagcucaacauggagacccucaacaugaccaugccccucuccugcaccaagaacaacucccaccacuacaucauggucggcaacgagaccggccucgagcucacccucaccaacaccuccaucaucaaccacaaguucugcaaccucuccgacgcccacaagaagaaccucuacgaccacgcccucauguccaucaucuccaccuuccaccucuccauccccaacuucaaccaguacgaggccauguccugcgacuucaacggcggcaagaucuccguccaguacaaccucucccacuccuacgccgucgacgccgccaaccacugcggcaccgucgccaacggcguccuccagaccuucaugcgcauggccuggggcggcggcuacaucgcccucgacuccggccgcggcaacugggacugcaucaugaccuccuaccaguaccucaucauccagaacaccaccugggaggaccacugccaguucucccgccccucccccaucggcuaccucggccuccucucccagcgcacccgcgacaucuacaucucccgccgccuccucggcaccuucaccuggacccucuccgacuccgagggcaaggacacccccggcggcuacugccucacccgcuggaugcucaucgaggccgagcucaagugcuucggcaacaccgccgucgccaagugcaacgagaagcacgacgaggaguucugcgacaugcuccgccucuucgacuucaacaagcaggccauccagcgccucaaggccgaggcccagauguccauccagcucaucaacaaggccgucaacgcccucaucaacgaccagcucaucaugaagaaccaccuccgcgacaucaugggcauccccuacugcaacuacuccaaguacugguaccucaaccacaccgucaccggcaagaccucccuccccaagugcuggcucgucuccaacggcuccuaccucaacgagacccacuucuccgacgacaucgagcagcaggccgacaacaugaucaccgagaugcuccagaaggaguacauggagcgccagggcaagaccccccucggccucgucgaccucuucgucuucuccaccuccuucuaccucaucuccaucuuccuccaccucgucaagauccccacccaccgccacaucgucggcaaguccugccccaagccccaccgccucaaccacaugggcaucugcuccugcggccucuacaagcagcccggcguccccguccgcuggaagcgcuga

SEQ ID NO: 960 - RNA, 1476 nt, Artificial Sequence
  derived and/or modified protein sequence (opt2) from LASV(G2431-SLE-2012;Clade IV)__AIT17292__GPC
augggccagaucgucaccuucuuccaggaggucccccacgucaucgaggaggucaugaacaucguccucaucgcccucuccaucauggccguccucaagggccucuacaacaucgccaccugcggccucgucggccucgucaccuuccuccuccucugcggccgcuccugcaccaccacccucuacaagggcgucuacgagcuccagacccucgagcucaacauggagacccucaacaugaccaugccccucuccugcaccaagaacaacucccaccacuacaucauggucggcaacgagaccggccucgagcucacccucaccaacaccuccaucaucaaccacaaguucugcaaccucuccgacgcccacaagaagaaccucuacgaccacgcccucauguccaucaucuccaccuuccaccucuccauccccaacuucaaccaguacgaggccauguccugcgacuucaacggcggcaagaucuccguccaguacaaccucucccacuccuacgccggcgacgccgccaaccacugcggcaccgucgccaacggcguccuccagaccuucaugcgcauggccuggggcggcuccuacaucgcccucgacuccggccacggcggcugggacugcaucaugaccuccuaccaguaccucaucauccagaacaccaccugggaggaccacugccaguucacccgccccucccccaucggcuaccucggccuccucucccagcgcacccgcgacaucuacaucucccgccgccuccucggcaccuucaccuggacccucuccgacuccgagggcaacgacacccccggcggcuacugccucacccgcuggaugcucaucgaggccgagcucaagugcuucggcaacaccgccgucgccaagugcaacgagaagcacgacgaggaguucugcgacaugcuccgccucuucgacuucaacaagcaggccauccagcgccuccgcgccgaggcccagauguccauccagcucaucaacaaggccgucaacgcccucaucaacgaccagcucaucaugaagaaccaccuccgcgacaucaugggcauccccuacugcaacuacuccaaguacugguaccucaaccacaccaccaccggccgcaccucccucccccgcugcuggcucgucuccaacggcuccuaccucaacgagacccacuucuccgacgacaucgagcagcaggccgacaacaugaucaccgagaugcuccagaaggaguacauggagcgccagggcaagaccccccucggccucgucgaccucuucgucuucuccaccuccuucuaccucaucuccaucuuccuccaccucaucaagauccccacccaccgccacaucgucggcaagcccugccccaagccccaccgccucaaccacaugggcgucugcuccugcggccucuacaagcagcccggcguccccguccgcuggaagcgcuga

SEQ ID NO: 961 - RNA, 1476 nt, Artificial Sequence
  derived and/or modified protein sequence (opt2) from LASV(G2511-SLE-2012;Clade IV)__AIT17294__GPC
augggccagaucgucaccuucuuccaggaggucccccacgucaucgaggaggucaugaacaucguccucaucgcccucuccauccucgccguccucaagggccucuacaaccucgccaccugcggccucgucggccucgucaccuuccuccuccucugcggccgcuccugcaccaccucccucuacaagggcgucuacgagcuccagacccucgagcucaacauggagacccucaacaugaccaugccccucuccugcaccaagaacaacucccaccacuacaucauggucggcaacgagaccggccucgagcucacccucaccaacaccuccaucaucgaccacaaguucugcaaccucuccgacgcccacaagaagaaccucuacgaccacgcccucauguccaucaucuccaccuuccaccucuccauccccaacuucaaccaguacgaggccauguccugcgacuucaacggcggcaagaucuccguccaguacaaccucucccacuccuacgccggcgacgccgccaaccacugcggcaccgucgccaacggcguccuccagaccuucaugcgcauggccuggggcggcuccuacaucgcccucgacuccggccgcggcggcugggacugcaucaugaccuccuaccaguaccucaucauccagaacaccaccugggaggaccacugccaguucucccgccccucccccgucggcuaccucggccuccucucccagcgcacccgcgacaucuacaucucccgccgccuccucggcaccuucaccuggacccucuccgacuccgagggcaaggacacccccggcggcuacugccucacccgcuggaugcucaucgaggccgagcucaagugcuucggcaacaccgccgucgccaagugcaacgagaagcacgacgaggaguucugcgacaugcuccgccucuucgacuucaacaagcaggccauccagcgccucaagaccgaggcccagauguccauccagcucaucaacaaggccgucaacgcccucaucaacgaccagcucaucaugaagaaccaccuccgcgacaucaugggcauccccuacugcaacuacuccaaguacugguaccucaaccacaccaccaccggcaagaccucccucccccgcugcuggcucgucuccaacggcuccuaccucaacgagacccacuucuccgacgacaucgagcagcaggccgacaacaugaucaccgagaugcuccagaaggaguacauggagcgccagggcaagaccccccucggccucgucgaccucuucgucuucuccaccuccuucuaccucaucuccaucuuccuccaccucgucaagauccccacccaccgccacaucgucggcaagcccugccccaagccccaccgccucaaccacaugggcaucugcuccugcggccucuacaagcagcccggcguccccgucaaguggaagcgcuga

SEQ ID NO: 962 - RNA, 1476 nt, Artificial Sequence
  derived and/or modified protein sequence (opt2) from LASV(G2554-SLE-2012;Clade IV)__AIT17298__GPC
augggccagaucgucaccuucuuccaggaggucccccacgucaucgaggaggucaugaacaucguccucaucgcccucuccauccucgccguccucaagggccucuacaacaucgccaccugcggccuccucggccucgucugcuuccuccuccucugcggccgcuccugcaccaccucccucuacaagggcgucuacgagcuccagacccucgagcucaacauggagacccucaacaugaccaugccccucuccugcaccaagaacaacucccaccacuacaucauggucggcaacgagaccggccucgagcucacccucaccaacaccuccaucaucaaccacaaguucugcaaccucuccgacgcccacaagaagaaccucuacgaccacgcccucauguccaucaucuccaccuuccaccucuccauccccaacuucaaccaguacgaggccauguccugcgacuucaacggcggcaagaucuccguccaguacaaccucucccacuccuacgccgucgacgccgccucccacugcggcaccaucgccaacggcguccuccagaccuucaugcgcauggccuggggcggcuccuacaucgcccucgacuccggccacggcggcugggacugcaucaugaccuccuaccaguaccucaucauccagaacaccaccugggaggaccacugccaguucucccgccccucccccaucggcuaccucggccuccucucccagcgcacccgcgacaucuacaucucccgccgccuccucggcaccuucaccuggacccucuccgacuccgagggcaaggacacccccggcggcuacugccucacccgcuggaugcucaucgaggccgagcucaagugcuucggcaacaccgccgucgccaagugcaacgagaagcacgacgaggaguucugcgacaugcuccgccucuucgacuucaacaagcaggccauccagcgccucaaggccgaggcccagauguccauccagcucaucaacaaggccgucaacgcccucaucaacgaccagcucaucaugaagaaccaccuccgcgacaucaugggcauccccuacugcaacuacuccaaguacugguaccucaaccacaccaccaccggcaagaccucccuccccaagugcuggcucgucuccaacggcuccuaccucaacgagacccacuucuccgacgacaucgagcagcaggccgacaacaugaucaccgagaugcuccagaaggaguacauggagcgccagggcaagaccccccucggccucgucgaccucuucgucuucuccaccuccuucuaccucaucuccaucuuccuccaccucgucaagauccccacccaccgccacgucgucggcaagcccugccccaagccccaccgccucaaccacaugggcaucugcuccugcggccucuacggccagcccggcguccccgucaaguggaagcgcuga

SEQ ID NO: 963 - RNA, 1476 nt, Artificial Sequence
  derived and/or modified protein sequence (opt2) from LASV(G2557-SLE-2012;Clade IV)__AIT17302__GPC
augggccagaucgucaccuucuuccaggaggucccccacgucaucgaggaggucaugaacaucguccucaucgcccucucccuccucgccguccucaagggccucuacaacgucgccaccugcggccucaucggccucgucaccuuccuccuccucugcggccgcuccugcaccaccaaccucuacaagggcgucuacgagcuccagacccucgagcucaacauggagacccucaacaugaccaugccccucuccugcaccaagaacaacucccaccacuacaucauggucggcaacgagaccggccucgagcucacccucaccaacaccuccaucaucucccacaaguucugcaaccucuccgacgcccacaagaagaaccucuacgaccacacccucauguccaucaucuccaccuuccaccucuccauccccaacuucaaccaguacgaggccauguccugcgacuucaacggcggcaagaucuccguccaguacaaccucucccacuccuacgccgucgacgccgccaaccacugcggcaccgucgccaacggcguccuccagaccuucaugcgcauggccuggggcggcuccuacaucgcccucgacuccggccgcggcaacugggacugcaucaugaccuccuaccaguaccucaucauccagaacaccaccugggaggaccacugccaguucucccgccccucccccaucggcuaccucggccuccucucccagcgcacccgcgacaucuacaucucccgccgccuccucggcaccuucaccuggacccucuccgacuccgagggcaacgacacccccggcggcuacugccucacccgcuggaugcucaucgaggccgagcucaagugcuucggcaacaccgccgucgccaagugcaacgagaagcacgacgaggaguucugcgacaugcuccgccucuucgacuucaacaagcaggccauccagcgccucaaggccgaggcccagauguccauccagcucaucaacaaggccgucaacgcccucaucaacgaccagcucaucaugaagaaccaccuccgcgacaucaugggcauccccuacugcaacuacuccaaguacugguaccucaaccacaccaccaccggcaagaccucccuccccaagugcuggcucgucuccaacggcuccuaccucaacgagacccacuucuccgacgacaucgagcagcaggccgacaacaugaucaccgagaugcuccagaaggaguacauggagcgccagggcaagaccccccucggccucgucgaccucuucgucuucuccaccuccuucuaccucaucuccaucuuccuccaccucgucaagauccccacccaccgccacaucgucggcaagcccugccccaagccccaccgccucaaccacaugggcaucugcuccugcggccucuacaagcagcccggcguccccguccgcuggaagcgcuga

SEQ ID NO: 964 - RNA, 1476 nt, Artificial Sequence
  derived and/or modified protein sequence (opt2) from LASV(G2587-SLE-2012;Clade IV)__AIT17310__GPC
augggccagaucgucaccuucuuccaggaggucccccacgucaucgaggaggucaugaacaucguccucaucgcccucuccauccucgccguccucaagggccucuacaaccucgccaccugcggccucgucggccucgucaccuuccuccuccucugcggccgcuccugcaccaccucccucuacaagggcgucuacgagcuccagacccucgagcucaacauggagacccucaacaugaccaugccccucuccugcaccaagaacaacucccaccacuacaucauggucggcaacgagaccggccucgagcucacccucaccaacaccuccaucaucaaccacaaguucugcaaccucuccgacgcccacaagaagaaccucuacgaccacgcccucauguccaucaucuccaccuuccaccucuccauccccaacuucaaccaguacgaggccauguccugcgacuucaacggcggcaagaucuccguccaguacaaccucucccacuccuacgccggcgacgccgccacccacugcggcaccgucgccaacggcguccuccagaccuucaugcgcauggccuggggcggcuccuacaucgcccucgacuccggccgcggcaagugggacugcaucaugaccuccuaccaguaccucaucauccagaacaccaccugggaggaccacugccaguucucccgccccucccccaucggcuaccucggccuccucucccagcgcacccgcgacaucuacaucucccgccgccuccucggcaccuucaccuggacccucuccgacuccgagggcaaggacacccccggcggcuacugccucacccgcuggaugcucaucgaggccgagcucaagugcuucggcaacaccgccgucgccaagugcaacgagaagcacgacgaggaguucugcgacaugcuccgccucuucgacuucaacaagcaggccauccagcgccucaagaccgaggcccagauguccauccagcucaucaacaaggccgucaacgcccucaucaacgaccagcucaucaugaagaaccaccuccgcgacaucaugggcauccccuacugcaacuacuccaaguacugguaccucaaccacaccaccaccggcaagaccucccucccccgcugcuggcucgucuccaacggcuccuaccucaacgagacccacuucuccgacgacaucgagcagcaggccgacaacaugaucaccgagaugcuccagaaggaguacauggagcgccagggcaagaccccccucggccucgucgaccucuucgucuucuccaccuccuucuaccucaucuccaucuuccuccaccucgucaagauccccacccaccgccacaucgucggcaagcccugccccaagccccaccgccucaacuacaugggcaucugcuccugcggccucuacaagcagcccggcguccccgucaaguggaagcgcuga

SEQ ID NO: 965 - RNA, 1476 nt, Artificial Sequence
  derived and/or modified protein sequence (opt2) from LASV(G2612-SLE-2012;Clade IV)__AIT17314__GPC
augggccagaucgucaccuucuuccaggaggucccccacgucaucgaggaggucaugaacaucguccucaucacccucuccauccucgccguccucaagggccucuacaacgucgccaccugcggccucgucggccucgucaccuuccuccuccucugcggccgcuccugcaccaccucccucuacaagggcgucuacgagcuccagacccucgagcucaacauggagacccucaacaugaccaugccccucuccugcaccaagaacaacucccaccacuacaucauggucggcaacgagaccggccucgagcucacccucaccaacaccuccaucaucaaccacaaguucugcaaccucuccgacgcccacaagaaggaccucuacgaccacgcccucauguccaucaucuccaccuuccaccucuccauccccaacuucaaccaguacgaggccauguccugcgacuucaacggcggcaagaucuccguccaguacaaccucucccacuccuacgccgucgacgccgccaaccacugcggcaccgucgccaacggcguccuccagaccuucaugcgcauggccuggggcggcuccuacaucgcccucgacuccggccgcggcggcugggacugcaucaugaccuccuaccaguaccucaucauccagaacaccaccugggaggaccacugccaguucucccgccccucccccaucggcuaccucggccuccucucccagcgcacccgcgacaucuacaucucccgccgccuccucggcaccuucaccuggacccucuccgacuccgagggcaacgacacccccggcggcuacugccucacccgcuggaugcucaucgaggccgagcucaagugcuucggcaacaccgccgucgccaagugcaacgagaagcacgacgaggaguucugcgacaugcuccgccucuucgacuucaacaagcaggccauccagcgccucaaggccgaggcccagauguccauccagcucaucaacaaggccgucaacgcccucaucaacgaccagcucaucaugaagaaccaccuccgcgacaucaugggcauccccuacugcaacuacuccaaguacugguaccucaaccacaccaccaccggcaagaccucccuccccaagugcuggcucgucuccaacggcuccuaccucaacgagacccacuucuccgacgacaucgagcagcaggccgacaacaugaucaccgagaugcuccagaaggaguacauggagcgccagggcaagaccccccucggccucgucgaccucuucgucuucuccaccuccuucuaccucaucuccaucuuccuccaccucgucaagauccccacccaccgccacaucgucggcaagcccugccccaagccccaccgccucaaccacaugggcaucugcuccugcggccucuacaagcagcccggcguccccgucaaguggaagcgcuga

SEQ ID NO: 966 - RNA, 1476 nt, Artificial Sequence
  derived and/or modified protein sequence (opt2) from LASV(G2615-SLE-2012;Clade IV)__AIT17318__GPC
augggccagaucgucaccuucuuccaggaggucccccacgucaucgaggaggucaugaacaucguccucaucgcccucucccuccucgccguccucaagggccucuacaacgucgccaccugcggccucaucggccucgucaccuuccuccuccucugcggccgcuccugcaccaccaaccucuacaagggcgucuacgagcuccagacccucgagcucaacauggagacccucaacaugaccaugccccucuccugcaccaagaacaacucccaccacuacaucauggucggcaacgagaccggccucgagcucacccucaccaacaccuccaucaucaaccacaaguucugcaaccucuccgacgcccacaagaagaaccucuacgaccacgcccucauguccaucaucuccaccuuccaccucuccauccccaacuucaaccaguacgaggccauguccugcgacuucaacggcggcaagaucuccguccaguacaaccucucccacuccuacgccgucgacgccgccaaccacugcggcaccgucgccaacggcguccuccagaccuucaugcgcauggccuggggcggcuccuacaucgcccucgacuccggccgcggcaacugggacugcaucaugaccuccuaccaguaccucaucauccagaacaucaccugggaggaccacugccaguucucccgccccucccccaucggcuaccucggccuccucucccagcgcacccgcgacaucuacaucucccgccgccuccucggcaccuucaccuggacccucuccgacuccgagggcaacgacacccccggcggcuacugccucacccgcuggaugcucaucgaggccgagcucaagugcuucggcaacaccgccgucgccaagugcaacgagaagcacgacgaggaguucugcgacaugcuccgccucuucgacuucaacaagcaggccauccagcgccucaaggccgaggcccagauguccauccagcucaucaacaaggccgucaacgcccucaucaacgaccagcucaucaugaagaaccaccuccgcgacaucaugggcauccccuacugcaacuacuccaaguacugguaccucaaccacaccaccaccggcaagaccucccuccccaagugcuggcucgucuccaacggcuccuaccucaacgagacccacuucuccgacgacaucgagcagcaggccgacaacaugaucaccgagaugcuccagaaggaguacauggagcgccagggcaagaccccccucggccucgucgaccucuucgucuucuccaccuccuucuaccucaucuccaucuuccuccaccucgucaagauccccacccaccgccacaucgucggcaagcccugccccaagccccaccgccucaaccacaugggcaucugcuccugcggccucuacaagcagcccggcguccccguccgcuggaagcgcuga

SEQ ID NO: 967 - RNA, 1476 nt, Artificial Sequence
  derived and/or modified protein sequence (opt2) from LASV(G2723-SLE-2012;Clade IV)__AIT17322__GPC
augggccagaucgucaccuucuuccaggaggucccccacgucaucgaggaggucaugaacaucguccucaucgcccucucccuccucgccguccucaagggccucuacaacgucgccaccugcggccucaucggccucgucaccuuccuccuccucugcggccgcuccugcaccaccaaccucuacaagggcgccuacgagcuccagacccucgagcucaacauggagacccucaacaugaccaugccccucuccugcaccaagaacaacucccaccacuacaucauggucggcaacgagaccggccucgagcucacccucaccaacaccuccaucaucaaccacaaguucugcaaccucuccgacgcccacaagaagaaccucuacgaccacacccucauguccaucaucuccaccuuccaccucuccauccccaacuucaaccaguacgaggccauguccugcgacuucaacggcggcaagaucuccguccaguacaaccucucccacuccuacgccgucgacgccgccaaccacugcggcaccgucgccaacggcguccuccagaccuucaugcgcauggccuggggcggcuccuacaucgcccucgacuccggccgcggcaacugggacugcaucaugaccuccuaccaguaccucaucauccagaacaccaccugggaggaccacugccaguucucccgccccucccccaucggcuaccucggccuccucucccagcgcacccgcgacaucuacaucucccgccgccuccucggcaccuucaccuggacccucuccgacuccgagggcaacgacacccccggcggcuacugccucacccgcuggaugcucaucgaggccgagcucaagugcuucggcaacaccgccgucgccaagugcaacgagaagcacgacgaggaguucugcgacaugcuccgccucuucgacuucaacaagcaggccauccagcgccucaaggccgaggcccagauguccauccagcucaucaacaaggccgucaacgcccucaucaacgaccagcucaucaugaagaaccaccuccgcgacaucaugggcauccccuacugcaacuacuccaaguacugguaccucaaccacaccaccaccggcaagaccucccuccccaagugcuggcucgucuccaacggcuccuaccucaacgagacccacuucuccgacgacaucgagcagcaggccgacaacaugaucaccgagaugcuccagaaggaguacauggagcgccagggcaagaccccccucggccucgucgaccucuucgucuucuccaccuccuucuaccucaucuccaucuuccuccaccucgucaagauccccacccaccgccacaucgucggcaagcccugccccaagccccaccgccucaaccacaugggcaucugcuccugcggccucuacaagcagcccggcguccccguccgcuggaagcgcuga

SEQ ID NO: 968 - RNA, 1476 nt, Artificial Sequence
  derived and/or modified protein sequence (opt2) from LASV(G2868-SLE-2012;Clade IV)__AIT17328__GPC
augggccagaucgucaccuucuuccaggaggucccccacgucaucgaggaggucaugaacaucguccucaucacccucuccauccucgccguccucaagggccucuacaacaucgccaccugcggccucgucggccucgucaccuuccuccuccucugcggcaaguccugcaccaccucccucuacaagggcgucuacgagcuccagacccucgagcucaacauggagacccucaacaugaccaugccccucuccugcaccaagaacaacucccaccacuacauccgcgucggcaacgagaccggccucgagcucacccucaccaacaccuccaucaucaaccacaaguucugcaaccucuccgacgcccacaagaagaaccucuacgaccacgcccucauguccaucaucuccaccuuccaccucuccauccccaacuucaaccaguacgaggccauguccugcgacuucaacggcggcaagaucuccguccaguacaaccucucccacuccuacgccgucgacgccgccaaccacugcggcaccgucgccaacggcguccuccagaccuucaugcgcauggccuggggcggcuccuacaucgcccucgacuccggccacggcaacugggacugcaucaugaccuccuaccaguaccucaucauccagaacaccaccugggaggaccacugccaguucucccgccccucccccaucggcuaccucggccuccucucccagcgcacccgcgacaucuacaucucccgccgccuccucggcaccuucaccuggacccucuccgacuccgagggcaacgacgcccccggcggcuacugccucacccgcuggaugcucaucgaggccgagcucaagugcuucggcaacaccgccgucgccaagugcaacgagaagcacgacgaggaguucugcgacaugcuccgccucuucgacuucaacaagcaggccauccagcgccucaaggccgaggcccagauguccauccagcucaucaacaaggccgucaacgcccucaucaacgaccagcucaucaugaagaaccaccuccgcgacaucaugggcauccccuacugcaacuacuccaaguacugguaccucaaccacaccaccaccggcaagaccucccuccccaagugcuggcucgucuccaacggcuccuaccucaacgagacccacuucuccgacgacaucgagcagcaggccgacaacaugaucaccgagaugcuccagaaggaguacauggagcgccagggcaagaccccccucggccucgucgaccucuucgucuucuccaccuccuucuaccucaucuccaucuuccuccaccucgucaagauccccacccaccgccacgucgucggcaaguccugccccaagccccaccgccucaaccacaugggcaucugcuccugcggccucuacaagcagcccggcguccccgucaaguggaagcgcuga

SEQ ID NO: 969 - RNA, 1476 nt, Artificial Sequence
  derived and/or modified protein sequence (opt2) from LASV(G2903-SLE-2012;Clade IV)__AIT17332__GPC
augggccagaucgucaccuucuuccaggaggucccccacgucaucgaggaggucaugaacaucguccucaucgcccucuccauccucgccguccucaagggccucuacaaccucgccaccugcggccucgucggccucgucaccuuccuccuccucugcggccgcuccugcaccaccucccucuacaagggcgucuacgagcuccagacccucgagcucaacauggagacccucaacaugaccaugccccucuccugcaccaagaacaacucccaccacuacauccgcgucggcaacgagaccggccucgagcucacccucaccaacaccuccaucaucaaccacaaguucugcaaccucuccgacgcccacaagaagaaccucuacgaccacgcccucauguccaucaucuccaccuuccaccucuccauccccaacuucaaccaguacgaggccauguccugcgacuucaacggcggcaagaucuccguccaguacaaccucucccacuccuacgccgucgacgccgccaaccacugcggcaccgucgccaacggcguccuccagaccuucaugcgcauggccuggggcggcuccuacaucgcccucgacuccggccacggccgcugggacugcaucaugaccuccuaccaguaccucaucauccagaacaccaccugggaggaccacugccucuucucccgccccucccccaucggcuaccucggccuccucucccagcgcacccgcgacaucuacaucucccgccgccuccucggcaccuucaccuggacccucuccgacuccgagggccgcgacacccccggcggcuacugccucacccgcuggaugcucaucgaggccgagcucaagugcuucggcaacaccgccgucgccaagugcaacgagaagcacgacgaggaguucugcgacaugcuccgccucuucgacuucaacaagcaggccauccagcgccucaaggccgaggcccagauguccauccagcucaucaacaaggccgucaacgcccucaucaacgaccagcucaucaugaagaaccaccuccgcgacaucaugggcauccccuacugcaacuacuccaaguacugguaccucaaccacaccaccaccggccgcaccucccucccccgcugcuggcucgucuccaacggcuccuaccucaacgagacccacuucuccgacgacaucgagcagcaggccgacaacaugaucaccgagaugcuccagaaggaguacauggagcgccagggcaagaccccccucggccucgucgaccucuucgucuucuccaccuccuucuaccucaucuccaucuuccuccaccucgucaagauccccacccaccgccacaucgucggcaaguccugccccaagccccaccgccucaaccacaugggcaucugcuccugcggccucuacaagcagcccggcguccccgucaaguggaagcgcuga

SEQ ID NO: 970 - RNA, 1476 nt, Artificial Sequence
  derived and/or modified protein sequence (opt2) from LASV(G2944-SLE-2012;Clade IV)__AIT17340__GPC
augggccagaucgucaccuucuuccaggaggucccccacgucaucgaggaggucaugaacaucguccucaucgcccucuccauccucgccguccucaagggccucuacaacuucgccaccugcggccucgucggccucgucaccuuccuccuccucugcggccgcuccugcaccaccucccucuacaagggcgucuacgagcuccagacccucgagcucaacauggagacccucaacaugaccaugccccucuccugcaccaagaacaacucccaccacuacaucauggucggcaacgagaccggccucgagcucacccucaccaacaucuccaucaucaaccacaaguucugcaaccucuccgacgcccacaagaagaaccucuacgaccacgcccucauguccaucaucuccaccuuccaccucuccauccccaacuucaaccaguacgaggccauguccugcgacuucaacggcggcaagaucuccguccaguacaaccucucccacuccuacgccggcgacgccgccaaccacugcggcaccgucgccaacggcguccuccagaccuucaugcgcauggccuggggcggcuccuacaucgcccucgacuccggccgcggcgagugggacugcaucaugaccuccuaccaguaccucaucauccagaacaccaccugggaggaccacugccaguucucccgccccucccccaucggcuaccucggccuccucucccagcgcacccgcgacaucuacaucucccgccgccuccucggcaccuucaccuggacccucuccgacuccgagggcaaggacacccccggcggcuacugccucacccgcuggaugcucaucgaggccgagcucaagugcuucggcaacaccgccgucgccaagugcaacgagaagcacgacgaggaguucugcgacaugcuccgccucuucgacuucaacaagcaggccauccagcgccucaaggccgaggcccagauguccauccagcucaucaacaaggccgucaacgcccucaucaacgaccagcucaucaugaagaaccaccuccgcgacaucaugggcauccccuacugcaacuacuccaaguacugguaccucaaccacaccaccaccggcaagaccucccuccccaagugcuggcucgucuccaacggcuccuaccucaacgagacccacuucuccgacgacaucgagcagcaggccgacaacaugaucaccgagaugcuccagaaggaguacauggagcgccagggcaagaccccccucggccucgucgaccucuucgucuucuccaccuccuucuaccucaucuccaucuuccuccaccucgucaagauccccacccaccgccacaucgucggcaagcccugcccccgcccccaccgccucaaccacaugggcaucugcuccugcggccucuacaagcagcccggcguccccgucaaguggaagcgcuga

SEQ ID NO: 971 - RNA, 1476 nt, Artificial Sequence
  derived and/or modified protein sequence (opt2) from LASV(G3010-SLE-2013;Clade IV)__AIT17344__GPC
augggccagaucgucaccuucuuccaggaggucccccacgucaucgaggaggucaugaacaucguccucaucgcccucuccauccucgccguccucaagggccucuacaacuucgccaccugcggccucgucggccucgucaccuuccuccuccucugcggccgcuccugcaccaccucccucuacaagggcgucuacgagcuccagacccucgagcucaacauggagacccucaacaugaccaugccccucuccugcaccaagaacaacucccaccacuacaucauggucggcaacgagaccggccucgagcucacccucaccaacaccuccaucaucaaccacaaguucugcaaccucuccgacgcccacaagaagaaccucuacaaccacgcccucauguccaucaucuccaccuuccaccucuccauccccaacuucaaccaguacgaggccauguccugcgacuucaacggcggcaagaucuccguccaguacaaccucucccacuccuacgccggcgacgccgccucccacugcggcaccgucgccaacggcguccuccagaccuucaugcgcauggccuggggcggcuccuacaucgcccucgacuccggcuacggcaagugggacugcaucaugaccuccuaccaguaccucaucauccagaacaccaccugggaggaccacugccaguucucccgccccucccccaucggcuaccucggccuccucucccagcgcacccgcgacaucuacaucucccgccgccuccucggcaccuucaccuggacccucuccgacuccgagggcaaggacacccccggcggcuacugccucacccgcuggaugcucaucgaggccgagcucaagugcuucggcaacaccgccgucgccaagugcaacgagaagcacgacgaggaguucugcgacaugcuccgccucuucgacuucaacaagcaggccauccagcgccucaagaccgaggcccagauguccauccagcucaucaacaaggccgucaacgcccucaucaacgaccagcucaucaugaagaaccaccuccgcgacaucaugggcauccccuacugcaacuacuccaaguacugguaccucaaccacaccaccaccggcaagaccucccuccccaagugcuggcucgucuccaacggcuccuaccucaacgagacccacuucuccgacgacaucgagcagcaggccgacaacaugaucaccgagaugcuccagaaggaguacauggagcgccagggcaagaccccccucggccucgucgaccucuucgucuucuccaccuccuucuaccucaucuccaucuuccuccaccucgucaagauccccacccaccgccacaucgucggcaaguccugccccaagccccaccgccucaaccacaugggcaucugcuccugcggccucuacaagcagcccggcguccccguccgcuggaagcgcuga

SEQ ID NO: 972 - RNA, 1476 nt, Artificial Sequence
  derived and/or modified protein sequence (opt2) from LASV(G3016-SLE-2013;Clade IV)__AIT17348__GPC
augggccagaucgucaccuucuuccaggaggucccccacgucaucgaggaggucaugaacaucguccucaucgcccucuccauccucgccguccucaagggccucuacaacaucgccaccugcggccucaucggccucgucaccuuccuccuccucugcggccgcuccugcaccaccucccucuacaagggcgucuacgagcuccagacccucgagcucaacauggagacccucaacaugaccaugccccucuccugcaccaagaacaacucccaccacuacaucauggucggcaacgagaccggccucgagcucacccucaccaacaccuccaucaucaaccacaaguucugcaaccucuccgacgcccacaagaagaaccucuacgaccacgcccucauguccaucaucuccaccuuccaccucuccauccccaacuucaaccaguacgaggccauguccugcgacuucaacggcggcaagaucuccguccaguacaaccucucccacuccuacgccggcgacgccgccaaccacugcggcaccgucgccaacggcguccuccagaccuucaugcgcauggccuggggcggcuccuacaucgcccucgacuccggccgcggccgcugggacugcaucaugaccuccuaccaguaccucaucauccagaacaccaccugggaggaccacugccaguucucccgccccucccccaucggcuaccucggccuccucucccagcgcacccgcgacaucuacaucucccgccgccuccucggcaccuucaccuggacccucuccgacuccgagggcaacgacacccccggcggcuacugccucacccgcuggaugcucaucgaggccgagcucaagugcuucggcaacaccgccgucgccaagugcaacgagaagcacgacgaggaguucugcgacaugcuccgccucuucgacuucaacaagcaggccauccagcgccucaaggccgaggcccagauguccauccagcucaucaacaaggccgucaacgcccucaucaacgaccagcucaucaugaagaaccaccuccgcgacaucaugggcauccccuacugcaacuacuccaaguacugguaccucaaccacaccaccaccggcaagaccucccuccccaagugcuggcucgucuccaacggcuccuaccucaacgagacccacuucuccgacgacaucgagcagcaggccgacaacaugaucaccgagaugcuccagaaggaguacauggagcgccagggcaagaccccccucggccucgucgaccucuucgucuucuccaccuccuucuaccucaucuccaucuuccuccaccucgucaagauccccacccaccgccacaucgucggcaagcccugccccaagccccaccgccucaaccacaugggcaucugcuccugcggccucuacaagcagcccggcguccccgucaaguggaagcgcuga

SEQ ID NO: 973 - RNA, 1476 nt, Artificial Sequence
  derived and/or modified protein sequence (opt2) from LASV(G3034-SLE-2013;Clade IV)__AIT17350__GPC
augggccagaucgucaccuucuuccaggaggucccccacgucaucgaggaggucaugaacaucguccucaucgcccucuccauccucgccguccucaagggccucuacaacgucgccaccugcggccucaucggccucgucaccuuccuccuccucugcggccgcuccugcaccaccacccucuacaagggcgucuacgagcuccaggcccucgagcucaacauggagacccucaacaugaccaugccccucuccugcaccaagaacaacucccaccacuacaucauggucggcaacgagaccggccucgagcucacccucaccaacaccuccaucaucgaccacaaguucugcaaccucuccgacgcccacaagaagaaccucuacgaccacgcccucauguccaucaucuccaccuuccaccucuccauccccaacuucaaccaguacgaggccauguccugcgacuucaacggcggcaagaucuccguccaguacaaccucucccacuccuacgccggcgacgccgccaagcacugcggcaccgucgccaacggcguccuccagaccuucaugcgcauggccuggggcggcuccuacaucgcccucgacuccggccgcaacggcugggacugcgucaugaccuccuaccaguaccucaucauccagaacaccaccugggaggaccacugccaguucucccgccccucccccaucggcuaccucggccuccucucccagcgcacccgcgacaucuacaucucccgccgccuccucggcaccuucaccuggacccucuccgacuccgagggcaaggacacccccggcggcuacugccucacccgcuggaugcucaucgaggccgagcucaagugcuucggcaacaccgccgucgccaagugcaacgagaagcacgacgaggaguucugcgacaugcuccgccucuucgacuucaacaagcaggccauccagcgccucaagaccgaggcccagauguccauccagcucaucaacaaggccgucaacgcccucaucaacgaccagcucaucaugaagaaccaccuccgcgacaucaugggcauccccuacugcaacuacuccaaguacugguaccucaaccacaccgucaccggcaagaccucccucccccgcugcuggcucgucuccaacggcuccuaccucaacgagacccacuucuccgacgacaucgagcagcaggccgacaacaugaucaccgagaugcuccagaaggaguacaucgagcgccagggcaagaccccccucggccucgucgaccucuucgucuucuccaccuccuucuaccucaucuccaucuuccuccaccucgucaagauccccacccaccgccacaucaucggcaagcccugccccaagccccaccgccucaaccacaugggcaucugcuccugcggccucuacaagcagcccggcguccccguccgcuggaagcgcuga

SEQ ID NO: 974 - RNA, 1476 nt, Artificial Sequence
  derived and/or modified protein sequence (opt2) from LASV(G3101-SLE-2013;Clade IV)__AIT17354__GPC
augggccagaucgucaccuucuuccaggaggucccccacgucaucgaggaggucaugaacaucguccucaucgcccucuccauccucgccguccucaagggccucuacaacuucgccaccugcggccucgucggccucgucaccuuccuccuccucugcggccgcuccugcaccaccucccucuacaagggcgucuacgagcuccagacccucgagcucaacauggagacccucaacaugaccaugccccucuccugcaccaagaacaacucccaccacuacaucauggucggcaacgagaccggccucgagcucacccucaccaacaucuccaucaucaaccacaaguucugcaaccucuccgacgcccacaagaagaaccucuacgaccacgcccucauguccaucaucuccaccuuccaccucuccauccccaacuucaaccaguacgaggccauguccugcgacuucaacggcggcaagaucuccguccaguacaaccucucccacuccuacgccggcgacgccgccaaccacugcggcaccgucgccaacggcguccuccagaccuucaugcgcauggccuggggcggcuccuacaucgcccucgacuccggccacggcggcugggacugcaucaugaccuccuaccaguaccucaucauccagaacaccaccugggaggaccacugccaguucucccgccccucccccaucggcuaccucggccuccucucccagcgcacccgcgacaucuacaucucccgccgccuccucggcaccuucaccuggacccucuccgacuccgagggcaaggacacccccggcggcuacugccucacccgcuggaugcucaucgaggccgagcucaagugcuucggcaacaccgccgucgccaagugcaacgagaagcacgacgaggaguucugcgacaugcuccgccucuucgacuucaacaagcaggccauccagcgccucaaggccgaggcccagauguccauccagcucaucaacaaggccgucaacgcccucaucaacgaccagcucaucaugaagaaccaccuccgcgacaucaugggcauccccuacugcaacuacuccaaguacugguaccucaaccacaccaccaccggcaagaccucccuccccaagugcuggcucgucuccaacggcuccuaccucaacgagacccacuucuccgacgacaucgagcagcaggccgacaacaugaucaccgagaugcuccagaaggaguacauggagcgccagggcaagaccccccucggccucgucgaccucuucgucuucuccaccuccuucuaccucaucuccaucuuccuccaccucgucaagauccccacccaccgccacaucgucggcaagcccugcccccgcccccaccgccucaaccacaugggcaucugcuccugcggccucuacaagcagcccggcguccccgucaaguggaagcgcuga

SEQ ID NO: 975 - RNA, 1476 nt, Artificial Sequence
  derived and/or modified protein sequence (opt2) from LASV(G3110-SLE-2013;Clade IV)__AIT17360__GPC
augggccagaucgucaccuucuuccaggaggucccccacgucaucgaggaggucaugaacaucguccucaucgcccucuccauccucgccguccucaagggccucuacaacuucgccaccugcggccucgucggccucgucaccuuccuccuccucugcggccgcuccugcaccaccucccucuacaagggcgucuacgagcuccagacccucgagcucaacauggagacccucaacaugaccaugccccucuccugcaccaagaacaacucccaccacuacauccgcgucggcaacgagaccggccucgagcucacccucaccaacaccuccaucaucaaccaccgcuucugcaaccucuccgacgcccacaagaagaaccucuacgaccacgcccucauguccaucaucuccaccuuccaccucuccauccccaacuucaaccaguacgaggccauguccugcgacuucaacggcggcaagaucuccguccaguacaaccucucccacuccuacgccggcgacgccgccaaccacugcggcaccgucgccaacggcguccuccagaccuucaugcgcauggccuggggcggcuccuacaucgcccucgacuccggccacggcaagugggacugcaucaugaccuccuaccaguaccucaucauccagaacaccaccugggacgaccacugccaguucucccgccccucccccaucggcuaccucggccuccucucccagcgcacccgcgacaucuacaucucccgccgccuccucggcaccuucaccuggacccucuccgacuccgagggcaaggacacccccggcggcuacugccucacccgcuggaugcucaucgaggccgagcucaagugcuucggcaacaccgccgucgccaagugcaacgagaagcacgacgaggaguucugcgacaugcuccgccucuucgacuucaacaagcaggccauccgccgccucaaggccgaggcccagauguccauccagcucaucaacaaggccgucaacgcccucaucaacgaccagcucaucaugaagaaccaccuccgcgacaucaugggcauccccuacugcaacuacuccaaguacugguaccucaaccacaccaccaccggcaagaccucccucccccgcugcuggcucgucuccaacggcuccuaccucaacgagacccacuucuccgacgacaucgagcagcaggccgacaacaugaucaccgagaugcuccagaaggaguacauggagcgccagggcaagaccccccucggccucgucgaccucuucgucuucuccaccuccuucuaccucaucuccaucuuccuccaccucgucaagauccccacccaccgccacaucgucggcaaguccugccccaagccccaccgccucaaccacaugggcaucugcuccugcggcuucuacaagcagcccggcguccccgucaaguggaagcgcuga

SEQ ID NO: 976 - RNA, 1476 nt, Artificial Sequence
  derived and/or modified protein sequence (opt2) from LASV(G3148-SLE-2013;Clade IV)__AIT17364__GPC
augggccagaucgucaccuucuuccaggaggucccccacgucaucgaggaggucaugaacaucguccucaucgcccucuccauccucgccguccucaagggccucuacaacuucgccaccugcggccucgucggccucgucaccuuccuccuccucugcggccgcuccugcaccaccucccucuacaagggcgucuacgagcuccagacccucgagcucaacauggagacccucaacaugaccaugccccucuccugcaccaagaacaacucccaccacuacaucauggucggcaacgagaccggccucgagcucacccucaccaacaccuccaucaucaaccacaaguucugcaaccucuccgacgcccacaagaagaaccucuacgaccacgcccucauguccaucaucuccaccuuccaccucuccauccccaacuucaaccaguacgaggccauguccugcgacuucaacggcggcaagaucuccguccaguacaaccucucccacuccuacgccggcgacgccgccaaccacugcggcaccgucgccaacggcguccuccagaccuucaugcgcauggccuggggcggcuccuacaucgcccucgacuccggccgcgaccgcugggacugcaucaugaccuccuaccaguaccucaucauccagaacaccaccugggaggaccacugccaguucucccgccccucccccaucggcuaccucggccuccucucccagcgcacccgcgacaucuacaucucccgccgccuccucggcaccuucaccuggacccucuccgacuccgagggcaaggacacccccggcggcuacugccucacccgcuggaugcucaucgaggccgagcucaagugcuucggcaacaccgccgucgccaagugcaacgagaagcacgacgaggaguucugcgacaugcuccgccucuucgacuucaacaagcaggccauccagcgccucaaggccgaggcccagauguccauccagcucaucaacaaggccgucaacgcccucaucaacgaccagcucaucaugaagaaccaccuccgcgacaucaugggcauccccuacugcaacuacuccaaguacugguaccucaaccacaccaccaccggcaagaccucccuccccaagugcuggcucgucuccaacggcuccuaccucaacgagacccacuucuccgacgacaucgagcagcaggccgacaacaugaucaccgagaugcuccagaaggaguacaucgagcgccagggcaagaccccccucggccucgucgaccucuucgucuucuccaccuccuucuaccucaucuccaucuuccuccaccucgucaagauccccacccaccgccacaucgucggcaagcccugccccaagccccaccgccucaaccacaugggcaucugcuccugcggccucuacaagcagcccggcgucuccgucaaguggaagcgcuga

SEQ ID NO: 977 - RNA, 1476 nt, Artificial Sequence
  derived and/or modified protein sequence (opt2) from LASV(G3151-SLE-2013;Clade IV)__AIT17368__GPC
augggccagaucgucaccuucuuccaggaggucccccacgucaucgaggaggucaugaacaucguccucaucgcccucuccauccucgccguccucaagggccucuacaacuucgccaccugcggccucgucggccucgucaccuuccuccuccucugcggccgcuccugcaccaccucccucuacaagggcgucuacgagcuccagacccucgagcucaacauggagacccucaacaugaccaugccccucuccugcaccaagaacaacucccaccacuacaucauggucggcaacgagaccggccucgagcucacccucaccaacaccuccaucaucaaccacaaguucugcaaccucuccgacgcccacaagaagaaccucuacgaccacgcccucauguccaucaucuccaccuuccaccucuccauccccaacuucaaccaguucgaggccauguccugcgacuucaacggcggcaagaucuccguccaguacaaccucucccacuccuacgccggcgacgccgccaaccacugcggcaccgucgccaacggcguccuccagaccuucaugcgcauggccuggggcggcuccuacaucgcccucgacuccggccacuccaagugggacugcaucaugaccuccuaccaguaccucaucauccagaacaccaccugggacgaccacugccaguucucccgccccucccccaucggcuaccucggccuccucucccagcgcacccgcgacaucuacaucucccgccgccuccucggcaccuucaccuggacccucuccgacuccgagggcaaggacacccccggcggcuacugccucacccgcuggaugcucaucgaggccgagcucaagugcuucggcaacaccgccgucgccaagugcaacgagaagcacgacgaggaguucugcgacaugcuccgccucuucgacuucaacaagcaggccauccagcgccucaaggccgaggcccagauguccauccagcucaucaacaaggccgucaacgcccucaucaacgaccagcucaucaugaagaaccaccuccgcgacaucaugggcauccccuacugcaacuacuccaaguacugguaccucaaccacaccaccaccggcaagaccucccuccccaagugcuggcucgucuccaacggcuccuaccucaacgagacccacuucuccgacgacaucgagcagcaggccgacaacaugaucaccgagaugcuccagaaggaguacauggagcgccagggcaagaccccccucggccucgucgaccucuucgucuucuccaccuccuucuaccucaucuccaucuuccuccaccucgucaagauccccacccaccgccacaucgucggcaaguccugccccaagccccaccgccucaacuacaugggcaucugcuccugcggcuucuacaagcagcccggcguccccgucaaguggaagcgcuga

SEQ ID NO: 978 - RNA, 1476 nt, Artificial Sequence
  derived and/or modified protein sequence (opt2) from LASV(G3157-SLE-2013;Clade IV)__AIT17370__GPC
augggccagaucgucaccuucuuccaggaggucccccacgucaucgaggaggucaugaacaucguccucaucgcccucuccauccucgccguccucaagggccucuacaacuucgccaccugcggccucgucggccucgucaccuuccuccuccucugcggccgcuccugcaccaccucccucuacaagggcgucuacgagcuccagacccucgagcucaacauggagacccucaacaugaccaugccccucuccugcaccaagaacaacucccaccacuacaucauggucggcaacgagaccggccucgagcucacccucaccaacaccuccaucaucaaccacaaguucugcaaccucuccgacgcccacaagaagaaccucuacgaccacgcccucauguccaucaucuccaccuuccaccucuccauccccaacuucaaccaguacgaggccauguccugcgacuucaacggcggcaagaucuccguccaguacaaccucucccacuccuacgccggcgacgccgccaaccacugcggcaccgucgccaacggcguccuccagaccuucaugcgcauggccuggggcggcuccuacaucgcccucgacuccggccgcgaccgcugggacugcaucaugaccuccuaccaguaccucaucauccagaacaccaccugggaggaccacugccaguucucccgccccucccccaucggcuaccucggccuccucucccagcgcacccgcgacaucuacaucucccgccgccuccucggcaccuucaccuggacccucuccgacuccgagggcaaggacacccccggcggcuacugccucacccgcuggaugcucaucgaggccgagcucaagugcuucggcaacaccgccgucgccaagugcaacgagaagcacgacgaggaguucugcgacaugcuccgccucuucgacuucaacaagcaggccauccagcgccucaaggccgaggcccagauguccauccagcucaucaacaaggccgucaacgcccucaucaacgaccagcucaucaugaagaaccaccuccgcgacaucaugggcauccccuacugcaacuacuccaaguacugguaccucaaccacaccaccaccggcaagaccucccuccccaagugcuggcucgucuccaacggcuccuaccucaacgagacccacuucuccgacgacaucgagcagcaggccgacaacaugaucaccgagaugcuccagaaggaguacauggagcgccagggcaagaccccccucggccucgucgaccucuucgucuucuccaccuccuucuaccucaucuccaucuuccuccaccucgucaagauccccacccaccgccacaucgucggcaagcccugccccaagccccaccgccucaaccacaugggcaucugcuccugcggccucuacaagcagcccggcgucuccgucaaguggaagcgcuga

SEQ ID NO: 979 - RNA, 1476 nt, Artificial Sequence
  derived and/or modified protein sequence (opt2) from LASV(G3206-SLE-2013;Clade IV)__AIT17378__GPC
augggccagaucgucaccuucuuccaggaggucccccacgucaucgaggaggucaugaacaucguccucaucgcccucuccauccucgccguccucaagggccucuacaaccucgccaccugcggccucgucggccucgucaccuuccuccuccucugcggccgcuccugcaccaccucccucuacaagggcgucuacgagcuccagacccucgagcucaacauggagacccucaacaugaccaugccccucuccugcaccaagaacaacucccaccacuacaucauggucggcaacgagaccggccucgagcucacccucaccaacaccuccaucaucaaccacaaguucugcaaccucuccgacgcccacaagaagaaccucuacgaccacacccucauguccaucaucuccaccuuccaccucuccauccccaacuucaaccaguacgaggccauguccugcgacuucaacggcggcaagaucuccguccaguacaaccucucccacuccuacgccgucgacgccgccaaccacugcggcaccgucgccaacggcguccuccagaccuucaugcgcauggccuggggcggcuccuacaucgcccucgacuccggccgcuccggcugggacugcaucaugaccuccuaccaguaccucgucauccagaacaccaccugggaggaccacugccaguucucccgccccucccccaucggcuaccucggccuccucucccagcgcacccgcgacaucuacaucucccgccgccuccucggcaccuucaccuggacccucuccgacuccgagggcaagaacacccccggcggcuacugccucacccgcuggaugcucaucgaggccgagcucaagugcuucggcaacaccgccgucgccaagugcaacgagaagcacgacgaggaguucugcgacaugcuccgccucuucgacuucaacaagcaggccauccagcgccucaaggccgaggcccagauguccauccagcucaucaacaaggccgucaacgcccucaucaacgaccagcucaucaugaagaaccaccuccgcgacaucaugggcauccccuacugcaacuacuccaaguacugguaccucaaccacaccaccaccggccgcaccucccucccccgcugcuggcucgucuccaacggcuccuaccucaacgagacccacuucuccgacgacaucgagcagcaggccgacaacaugaucaccgagaugcuccagaaggaguacauggagcgccagggcaagaccccccucggccucgucgaccucuucgucuucuccaccuccuucuaccucaucuccaucuuccuccaccucgucaagauccccacccaccgccacaucgucggcaaguccugccccaagccccaccgccucaaccacaugggcaucugcuccugcggcuucuacaagcagcccggcguccccgucaaguggaagcgcuga

SEQ ID NO: 980 - RNA, 1476 nt, Artificial Sequence
  derived and/or modified protein sequence (opt2) from LASV(G3234-SLE-2013;Clade IV)__AIT17388__GPC
augggccagaucgucaccuucuuccaggaggucccccacgucaucgaggaggucaugaacaucguccucaucgcccucuccauccucgccguccucaagggccucuacaacgucgccaccugcggccucaucggccucgucaccuuccuccuccucugcggccgcuccugcaccaccacccucuacaagggcgucuacgagcuccaggcccucgagcucaacauggagacccucaacaugaccaugccccucuccugcaccaagaacaacucccaccacuacauccgcgucggcaacgagaccggccucgagcucacccucaccaacaccuccaucaucaaccacaaguucugcaaccucuccgacgcccacaagaagaaccucuacgaccacgcccucauguccaucaucuccaccuuccaccucuccauccccaacuucaaccaguacgaggccauguccugcgacuucaacggcggcaucaucuccguccaguacaaccucucccacuccuacgccggcgacgccgccaaccacugcggcaccgucgccaacggcguccuccagaccuucaugcgcauggccuggggcggcuccuacaucgcccucgacuccggccgcaacggcugggacugcaucaugaccuccuaccaguaccucaucauccagaacaccaccugggacgaccacugccaguucucccgccccucccccaucggcuaccucggccuccucucccagcgcacccgcgacaucuacaucucccgccgccuccucggcaccuucaccuggacccucuccgacuccgagggcaaggacacccccggcggcuacugccucacccgcuggaugcucaucgaggccgagcucaagugcuucggcaacaccgccgucgccaagugcaacgagaagcacgacgaggaguucugcgacaugcuccgccucuucgacuucaacaagcaggccauccagcgccucaagaccgaggcccagaugaacauccagcucaucaacaaggccgucaacgcccucaucaacgaccagcucaucaugaagaaccaccuccgcgacaucaugggcauccccuacugcaacuacuccaaguacugguaccucaacaacaccgccaccggcaagaccucccucccccgcugcuggcucgucuccaacggcuccuaccucaacgagacccacuucuccgacgacaucgagcagcaggccgacaacaugaucaccgagaugcuccagaaggaguacauggagcgccagggcaagaccccccucggccucgucgaccucuucgucuucuccaccuccuucuaccucaucuccaucuuccuccaccucgucaagauccccacccaccgccacaucgucggcaagcccugccccaagccccaccgccucaaccacaucggcaucugcuccugcggccucuacaagcagcccggcguccccgucaaguggaagcgcuga

SEQ ID NO: 981 - RNA, 1476 nt, Artificial Sequence
  derived and/or modified protein sequence (opt2) from LASV(G502-SLE-2009;Clade IV)__AIT17126__GPC
augggccagaucgucaccuucuuccaggaggucccccacgucaucgaggaggucaugaacaucguccucaucgcccucuccauccucgccguccucaagggccucuacaacuucgccaccugcggccucgucggccuccucaccuuccuccuccucugcggccgcuccugcaccaccggccucuacaagggcgucuacgagcuccagacccucgagcucaacauggagacccucaacaugaccaugccccucuccugcaccaagaacaacucccaccacuacaucauggucggcaacgagaccggccucgagcucacccucaccaacaccuccaucaucaaccacaaguucugcaaccucuccgacgcccacaagaagaaccucuacgaccacgcccucauguccaucaucuccaccuuccaccucuccauccccaacuucaaccaguacgaggccauguccugcgacuucaacggcggcaagaucuccguccaguacaaccucucccacuccuacgccggcgacgccgccgaccacugcggcaccgucgccaacggcguccuccagaccuucaugcgcauggccuggggcggcuccuacaucgcccucgacuccggccgcggccgcugggacugcaucaugaccuccuaccaguaccucaucauccagaacaccaccugggaggaccacugccaguucucccgccccucccccaucggcuaccucggccuccucucccagcgcacccgcgacaucuacaucucccgccgccuccucggcaccuucaccuggacccucuccgacuccgagggcaaggacacccccggcggcuacugccucacccgcuggaugcucaucgaggccgagcucaagugcuucggcaacaccgccgucgccaagugcaacgagaagcacgacgaggaguucugcgacaugcuccgccucuucgacuucaacaagcaggccauccagcgccucaaggccgaggcccagauguccauccagcucaucaacaaggccgucaacgcccucaucaacgaccagcucgucaugaagaaccaccuccgcgacaucaugggcauccccuacugcaacuacucccgcuacugguaccucaaccacaccaccaccggccgcaccucccuccccaagugcuggcucgucuccaacggcuccuaccucaacgagacccacuucuccgacgacaucgagcagcaggccgacaacaugaucaccgagaugcuccagaaggaguacauggagcgccagggcaagaccccccucggccucgucgaccucuucgucuucuccaccuccuucuaccucaucuccaucuuccuccaccucgucaagauccccacccaccgccacaucgucggcaaguccugccccaagccccaccgccucaaccacaugggcaucugcuccugcggccucuacaagcagcccggcguccccgucaaguggaagcgcuga

SEQ ID NO: 982 - RNA, 1476 nt, Artificial Sequence
  derived and/or modified protein sequence (opt2) from LASV(G503-SLE-2009;Clade IV)__AIT17130__GPC
augggccagaucgucaccuucuuccaggaggucccccacgucaucgaggaggucaugaacaucguccucaucgcccucuccauccucgccguccucaagggccucuacaacuucgccaccugcggcuucgucggccucgucaccuuccuccuccucugcggccgcuccugcaccaccucccucuacaagggcgucuacgagcuccagacccucgagcucaacauggagacccucaacaugaccaugccccucuccugcaccaagaacaacucccaccacuacauccgcgucggcaacgacaccggccucgagcucacccucaccaacaccuccaucaucaaccacaaguucugcaaccucuccgacgcccacaagaagaaccucuacgaccacgcccucauguccaucaucuccaccuuccaccucuccauccccaacuucaaccaguacgaggccauguccugcgacuucaacggcggcaagaucuccguccaguacaaccucucccacuccuacgccgucgacgccgccucccacugcggcaccaucgccaacggcguccuccagaccuucaugcgcauggccuggggcggcuccuacaucgcccucgacuccggccgcgaccgcugggacugcaucaugaccuccuaccaguaccucaucauccagaacaccaccugggaggaccacugccaguucucccgccccucccccaucggcuaccucggccuccucucccagcgcacccgcgacaucuacaucucccgccgccuccucggcaccuucaccuggacccucuccgacuccgagggcaaggacacccccggcggcuacugccucacccgcuggaugcucaucgaggccgagcucaagugcuucggcaacaccgccgucgccaagugcaacgagaagcacgacgaggaguucugcgacaugcuccgccucuucgacuucaacaagcaggccauccagcgccucaaggccgaggcccagauguccauccagcucaucaacaaggccgucaacgcccucaucaacgaccagcucaucaugaagaaccaccuccgcgacaucaugggcauccccuacugcaacuacuccaaguacugguaccucaaccacaccaccaccggcaagaccucccuccccaagugcuggcucgucuccaacggcuccuaccucaacgagacccacuucuccgacgacaucgagcagcaggccgacaacaugaucaccgagaugcuccagaaggaguacauggagcgccagggcaagaccccccucggccucgucgaccucuucgucuucuccaccuccuucuaccucaucuccaucuuccuccaccucgucaagauccccacccaccgccacaucgucggcaaguccugccccaagccccaccgccucaaccacaugggcaucugcuccugcggccucuacaagcagcccggcguccccgucaaguggaagcgcuga

SEQ ID NO: 983 - RNA, 1476 nt, Artificial Sequence
  derived and/or modified protein sequence (opt2) from LASV(G610-SLE-2009;Clade IV)__AIT17134__GPC
augggccagaucgucaccuucuuccaggaggucccccacgucaucgaggaggucaugaacaucguccucaucgcccucuccauccucgccguccucaagggccucuacaacuucgccaccugcggccucgucggccucgucaccuuccuccuccucugcggccgcuccugcaccaccucccucuacaagggcgucuacgagcuccagacccucgagcucaacauggagacccucaacaugaccaugccccucuccugcaccaagaacaacucccaccacuacaucauggucggcaacgagaccggccucgagcucacccucaccaacaccuccaucaucaaccacaaguucugcaaccucuccgacgcccacaagaagaaccucuacgaccacgcccucauguccaucaucuccaccuuccaccucuccauccccaacuucaaccaguacgaggccauguccugcgacuucaacggcggcaagaucuccguccaguacaaccucucccacuccuacgccggcgacgccgccaaccacugcggcaccgucgccaacggcguccuccagaccuucaugcgcauggccuggggcggcuccuacaucgcccucgacuccggccgcggccgcugggacugcaucaugaccuccuaccaguaccucaucauccagaacaccaccugggaggaccacugccaguucucccgccccucccccaucggcuaccucggccuccucucccagcgcacccgcgacaucuacaucucccgccgccuccucggcaccuucaccuggacccucuccgacuccgagggcaaggacacccccggcggcuacugccucacccgcuggaugcucaucgaggccgagcucaagugcuucggcaacaccgccgucgccaagugcaacgagaagcacgacgaggaguucugcgacaugcuccgccucuucgacuucaacaagcaggccauccagcgccucaaggccgaggcccagauguccauccagcucaucaacaaggccgucaacgcccucaucaacgaccagcucaucaugaagaaccaccuccgcgacaucaugggcauccccuacugcaacuacuccaaguacugguaccucaaccacaccaccaccggcaagaccucccuccccaagugcuggcucgucuccaacggcuccuaccucaacgagacccacuucuccgacgacaucgagcagcaggccgacaacaugaucaccgagaugcuccagaaggaguacauggagcgccagggcaagaccccccucggccucgucgaccucuucgucuucuccaccuccuucuaccucaucuccaucuuccuccaccucgucaagauccccacccaccgccacaucgucggcaaguccugccccaagccccaccgccucaaccacaugggcaucugcuccugcggccucuacaagcagcccggcguccccgucaaguggaagcgcuga

SEQ ID NO: 984 - RNA, 1476 nt, Artificial Sequence
  derived and/or modified protein sequence (opt2) from LASV(G636-SLE-2009;Clade IV)__AIT17138__GPC
augggccagaucgucaccuucuuccaggaggucccccacgucaucgaggaggucaugaacaucguccucaucgcccucuccauccucgccguccucaagggccucuacaaccucgccaccugcggccucgucggccucgucaccuuccuccuccucugcggccgcuccugcaccaccucccucuacaagggcgucuacgagcuccagacccucgagcucaacauggagacccucaacaugaccaugccccucuccugcaccaagaacaacucccaccacuacaucauggucggcaacgagaccggccucgagcucacccucaccaacaccucccucaucaaccacaaguucugcaaccucuccgacgcccacaagaagaaccucuacgaccacgcccucauguccaucaucuccaccuuccaccucuccauccccaacuucaaccaguacgaggccauguccugcgacuucaacggcggcaagaucuccguccaguacaaccucucccacuccuacgccgucgacgccgccucccacugcggcaccgucgccaacggcguccuccagaccuucaugcgcauggccuggggcggcuccuacaucgcccucgacuccggccgcggcggcugggacugcaucaugaccuccuaccaguaccucaucauccagaacaccaccugggaggaccacugccaguucucccgccccucccccaucggcuaccucggccuccucucccagcgcacccgcgacaucuacaucucccgccgccuccucggcaccuucaccuggacccucuccgacuccgagggcaaggacacccccggcggcuacugccucacccgcuggaugcucaucgaggccgagcucaagugcuucggcaacaccgccgucgccaagugcaacgagaagcacgacgaggaguucugcgacaugcuccgccucuucgacuucaacaagcaggccauccagcgccucaaggccgaggcccagauguccauccagcucaucaacaaggccgucaacgcccucaucaacgaccagcucaucaugaagaaccaccuccgcgacaucaugggcauccccuacugcaacuacuccaaguacugguaccucaaccacaccaccaccggccgcaccucccucccccgcugcuggcucgucuccaacggcuccuaccucaacgagacccacuucuccgacgacaucgagcagcaggccgacaacaugaucaccgagaugcuccagaaggaguacauggagcgccagggcaagaccccccucggccucgucgaccucuucgucuucuccaccuccuucuaccucaucuccaucuuccuccaccucgucaagauccccacccaccgccacaucgucggcaaguccugccccaagccccaccgccucaaccacaugggcaucugcuccugcggccucuacaagcagcccggcguccccgucaaguggaagcgcuga

SEQ ID NO: 985 - RNA, 1476 nt, Artificial Sequence
  derived and/or modified protein sequence (opt2) from LASV(G692-SLE-2009;Clade IV)__AIT17146__GPC
augggccagaucgucaccuucuuccaggaggucccccacgucaucgaggaggucaugaacaucguccucaucgcccucuccauccucgccguccucaagggccucuacaaccucgccaccugcggccucgucggccucgucaccuuccuccuccucugcggccgcuccugcaccaccucccucuacaagggcgucuacgagcuccagacccucgagcucaacauggagacccucaacaugaccaugccccucuccugcaccaagaacaacucccaccacuacaucauggucggcaacgagaccggccucgagcucacccucaccaacaccuccaucaucaaccacaaguucugcaaccucuccgacgcccacaagaagaaccucuacgaccacgcccucauguccaucaucuccaccuuccaccucuccauccccaacuucaaccaguacgaggccauguccugcgacuucaacggcggcaagaucuccguccaguacaaccucucccacuccuacgccggcgacgccgccaaccacugcggcaccgucgccaacggcguccuccagaccuucaugcgcauggccuggggcggcuccuacaucgcccucgacuccggccgcggccgcugggacugcaucaugaccuccuaccaguaccucaucauccagaacaccaccugggaggaccacugcuccuucucccgccccucccccaucggcuaccucggccuccucucccagcgcacccgcgacaucuacaucucccgccgccuccucggcaccuucaccuggacccucuccgacuccgagggcaaggacacccccggcggcuacugccucacccgcuggaugcucaucgaggccgagcucaagugcuucggcaacaccgccgucgccaagugcaacgagaagcacgacgaggaguucugcgacaugcuccgccucuucgacuucaacaagcaggccauccagcgccucaaggccgaggcccagauguccauccagcucaucaacaaggccgucaacgcccucaucaacgaccagcucaucaugaagaaccaccuccgcgacaucaugggcauccccuacugcaacuacuccaaguacugguaccucaaccacaccaccaccggcaagaccucccuccccaagugcuggcucgucuccaacggcuccuaccucaacgagacccacuucuccgacgacaucgagcagcaggccgacaacaugaucaccgagaugcuccagaaggaguacauggagcgccagggcaagaccccccucggccucgucgaccucuucgucuucuccaccuccuucuaccucaucuccaucuuccuccaccucgucaagauccccacccaccgccacaucgucggcaaguccugccccaagccccaccgccucaaccacaugggcaucugcuccugcggcuucuacaagcagcccggcguccccgucaaguggaagcgcuga

SEQ ID NO: 986 - RNA, 1476 nt, Artificial Sequence
  derived and/or modified protein sequence (opt2) from LASV(G733-SLE-2010;Clade IV)__AIT17154__GPC
augggccagaucgucaccuucuuccaggaggucccccacgucaucgaggaggucaugaacaucguccucaucgcccucuccauccucgccguccucaagggccucuacaacuucgccaccugcggcaucgucggccucgucuccuuccuccuccucugcggccgcuccugcaccaccucccucuacaagggcgucuacgagcuccagacccucgagcucaacauggagacccucaacaugaccaugccccucuccugcaccaagaacaacucccaccacuacaucauggucggcaacgagaccggccucgagcucacccucaccaacaccuccaucaucaaccacaaguucugcaaccucuccgacgcccacaagaagaaccucuacgaccacgcccucauguccaucaucuccaccuuccaccucuccauccccaacuucaaccaguacgaggccauguccugcgacuucaacggcggcaagaucuccguccaguacaaccucucccacuccuacgccggcgacgccgccaaccacugcggcaccaucgccaacggcguccuccagaccuucaugcgcauggccuggggcggcuccuacaucgcccucgacuccggccgcgaccgcugggacugcaucaugaccuccuaccaguaccucaucauccagaacaccaccugggaggaccacugccaguucucccgccccucccccaucggcuaccucggccuccucucccagcgcacccgcgacaucuacaucucccgccgccuccucggcaccuucaccuggacccucuccgacuccgagggcaaggacacccccggcggcuacugccucacccgcuggaugcucaucgaggccgagcucaagugcuucggcaacaccgccgucgccaagugcaacgagaagcacgacgaggaguucugcgacaugcuccgccucuucgacuucaacaagcaggccauccagcgccucaaggccgaggcccagauguccauccagcucaucaacaaggccgucaacgcccucaucaacgaccagcucaucaugaagaaccaccuccgcgacaucaugggcauccccuacugcaacuacuccaaguacugguaccucaaccacaccaccaccggcaagaccucccuccccaagugcuggcucgucuccaacggcuccuaccucaacgagacccacuucuccgacgacaucgagcagcaggccgacaacaugaucaccgagaugcuccagaaggaguacauggagcgccagggcaagaccccccucggccucgucgaccucuucgucuucuccaccuccuucuaccucaucuccaucuuccuccaccucgucaagauccccacccaccgccacgucgucggcaaguccugccccaagccccaccgccucaaccacaugggcaucugcuccugcggccucuacggccagcccggcguccccgucaaguggaagcgcuga

SEQ ID NO: 987 - RNA, 1476 nt, Artificial Sequence
  derived and/or modified protein sequence (opt2) from LASV(G771-SLE-2010;Clade IV)__AIT17158__GPC
augggccagaucgucaccuucuuccaggaggucccccacgucaucgaggaggucaugaacaucguccucaucgcccucuccauccucgccguccucaagggccucuacaacuucgccaccugcggccucgucggccucgucaccuuccuccuccucugcggccgcuccugcaccaccucccucuacaagggcgucuacgagcuccagacccucgagcucaacauggagacccucaacaugaccaugccccucuccugcaccaagaacaacucccaccacuacaucauggucggcaacgagaccggccucgagcucacccucaccaacaccuccaucaucaaccacaaguucugcaaccucuccgacgcccacaagaagaaccucuacgaccacgcccucauguccaucaucuccaccuuccaccucuccauccccaacuucaaccaguacgaggccauguccugcgacuucaacggcggcaagaucuccguccaguacaaccucucccacuccuacgccggcgacgccgccaaccacugcggcaccgucgccaacggcguccuccagaccuucaugcgcauggccuggggcggcuccuacaucgcccucgacuccggccgcgaccgcugggacugcaucaugaccuccuaccaguaccucaucauccagaacaccaccugggaggaccacugccaguucucccgccccucccccaucggcuaccucggccuccucucccagcgcacccgcgacaucuacaucucccgccgccuccucggcaccuucaccuggacccucuccgacuccgagggcaaggacacccccggcggcuacugccucacccgcuggaugcucaucgaggccgagcucaagugcuucggcaacaccgccgucgccaagugcaacgagaagcacgacgaggaguucugcgacaugcuccgccucuucgacuucaacaagcaggccauccagcgccucaaggccgaggcccagauguccauccagcucaucaacaaggccgucaacgcccucaucaacgaccagcucaucaugaagaaccaccuccgcgacaucaugggcauccccuacugcaacuacuccaaguacugguaccucaaccacaccaccaccggcaagaccucccuccccaagugcuggcucgucuccaacggcuccuaccucaacgagacccacuucuccgacgacaucgagcagcaggccgacaacaugaucaccgagaugcuccagaaggaguacauggagcgccagggcaagaccccccucggccucgucgaccucuucgucuucuccaccuccuucuaccucaucuccaucuuccuccaccucgucaagauccccacccaccgccacaucgucggcaaguccugccccaagccccaccgccucaaccacaugggcaucugcuccugcggccucuacaagcagcccggcguccccgucaaguggaagcgcuga

SEQ ID NO: 988 - RNA, 1476 nt, Artificial Sequence
  derived and/or modified protein sequence (opt2) from LASV(G808-SLE-2010;Clade IV)__AIT17164__GPC
augggccagaucgucaccuucuuccaggaggucccccacgucaucgaggaggucaugaacaucguccucaucgcccucuccauccucgccguccucaagggccucuacaacuucgccaccugcggccucgucggccucgucaccuuccuccuccucugcggccgcuccugcaccuccucccucuacaagggcgucuacgagcuccagacccucgagcucaacauggagacccucaacaugaccaugccccucuccugcaccaagaacaacucccaccacuacauccgcgucggcaacgagaccggccucgagcucacccucaccaacaccuccaucaucgaccacaaguucugcaaccucuccgacgcccacaagaagaaccucuacgaccacgcccucauguccaucaucuccaccuuccaccucuccauccccaacuucaaccaguacgaggccauguccugcgacuucaacggcggcaagaucuccguccaguacaaccucucccacuccuacgccggcgacgccgccaagcacugcggcaccgucgccaacggcguccuccagaccuucaugcgcauggccuggggcggcuccuacaucgcccucgacuccggccacggcaacugggacugcaucaugaccuccuaccaguaccucaucauccagaacaccaccugggaggaccacugccaguucucccgccccucccccaucggcuaccucggccuccucucccagcgcacccgcgacaucuacaucucccgccgccuccucggcaccuucaccuggacccucuccgacuccgagggcaacgacgcccccggcggcuacugccucacccgcuggaugcucauccaggccgagcucaagugcuucggcaacaccgccgucgccaagugcaacgagaagcacgacgaggaguucugcgacaugcuccgccucuucgacuucaacaagcaggccauccagcgccucaaggccgaggcccagauguccauccagcucaucaacaaggccgucaacgcccucaucaacgaccagcucaucaugaagaaccaccuccgcgacaucaugggcauccccuacugcaacuacuccaaguacugguaccucaaccacaccaccaccggccgcaccucccucccccgcugcuggcucgucuccaacggcuccuaccucaacgagacccacuucuccgacgacaucgagcagcaggccgacaacaugaucaccgagaugcuccagaaggaguacauggagcgccagggcaagaccccccucggccucgucgaccucuucgucuucuccaccuccuucuaccucaucuccaucuuccuccaccucgucaagauccccacccaccgccacaucgucggcaaguccugccccaagccccaccgccucaaccacaugggcaucugcuccugcggccucuucaagcagcccggcguccccgucaaguggaagcgcuga

SEQ ID NO: 989 - RNA, 1476 nt, Artificial Sequence
  derived and/or modified protein sequence (opt2) from LASV(Guinea Faranah;Clade IV)__AMZ00381__GPC
augggccagaucgucaccuucuuccaggaggucccccacgucaucgaggaggucaugaacaucguccucaucgcccucuccauccucgccguccucaagggccucuacaacgucgccaccugcggccucaucggccucaucgccuuccuccuccucugcggccgcuccugcaccuccacccucuacaagggcgucuacgagcuccaggcccucgagcucaacauggagacccucaacaugaccaugccccucuccugcaccaagaacaacucccaccacuacaucauggucggcaacgagaccggccucgagcucacccucaccaacaccuccaucaucaaccacaaguucugcaaccucuccgacgcccacaagaagaaccucuacaaccacgcccucauguccaucaucuccaccuuccaccucuccauccccaacuucaaccaguacgaggccauguccugcgacuucaacggcggcaagaucuccguccaguacaaccucucccacuccuacgccgucgacgccgccaaccacugcggcaccgucgccaacggcauccuccagaccuucaugcgcauggccuggggcggcuccuacaucgcccucgacuccggccacggcggcugggacugcaucauguccuccuaccaguaccucgucauccagaacaccaccugggaggaccacugccaguucucccgccccucccccaucggcuaccucggccuccucucccagcgcacccgcgacaucuacaucucccgccgccuccucggcaccuucaccuggacccucuccgacuccgagggcaaggacacccccggcggcuacugccucacccgcuggaugcucaucgaggccgagcucaagugcuucggcaacaccgccgucgccaagugcaacgagaagcacgacgaggaguucugcgacaugcuccgccucuucgacuucaacaagcaggccauccagcgccucaaggccgaggcccagauguccauccagcucaucaacaaggccgucaacgcccucaucaacgaccagcucaucaugaagaaccaccuccgcgacaucaugggcauccccuacugcaacuacuccaaguacugguaccucaaccacaccaucaccggccgcaccucccuccccaagugcuggcucgucuccaacggcuccuaccucaacgagacccacuucuccgacgacaucgagcagcaggccgacaacaugaucaccgagaugcuccagaaggaguaccucgagcgccagggcaagaccccccucggccucgucgaccucuucgucuucuccaccuccuucuaccucaucuccaucuuccuccaccucaucaagauccccacccaccgccacaucgucggcaaguccugccccaagccccaccgccucaaccacaugggcgucugcuccugcggccucuacaagcagcccggcguccccguccgcuggaagcgcuga

SEQ ID NO: 990 - RNA, 1476 nt, Artificial Sequence
  derived and/or modified protein sequence (opt2) from LASV(GUINEA Z-185a;Clade IV)__AMZ00377__GPC
augggccagaucgucaccuucuuccaggaggucccccacgucaucgaggaggucaugaacaucguccucaucgcccucuccauccucgccguccucaagggccucuacaacgucgccaccugcggccucaucggccucgucaccuuccucuuccucugcggccgcuccugcuccaccucccucuacaagggcgucuacgagcuccagacccucgagcucaacauggagacccucaacaugaccaugccccucuccugcaccaagaacaacucccaccacuacaucauggucggcaacgagaccggccucgagcucacccucaccaacaccuccaucaucaaccacaaguucugcaaccucuccgacgcccacaagaagaaccucuacgaccacacccucauguccaucaucuccaccuuccaccucuccauccccaacuucaaccaguacgaggccauguccugcgacuucaacggcggcaagaucuccguccaguacaaccucucccacuccuacgccgucgacgccgccaaccacugcggcaccgucgccaacggcguccuccagaccuucaugcgcauggccuggggcggcuccuacaucgcccucgacuccggccgcggcaacugggacugcaucaugaccuccuaccaguaccucgucauccagaacaccaccugggaggaccacugccaguucucccgccccucccccaucggcuaccucggccuccucucccagcgcacccgcgacaucuacaucucccgccgccuccucggcaccuucaccuggacccucuccgacuccgagggcaaggacacccccggcggcuacugccucacccgcuggaugcucaucgaggccgagcucaagugcuucggcaacaccgccgucgccaagugcaacgagaagcacgacgaggaguucugcgacaugcuccgccucuucgacuucaacaagcaggccauccagcgccucaaggccgaggcccagauguccauccagcucaucaacaaggccgucaacgcccucaucaacgaccagcucaucaugaagaaccaccuccgcgacaucaugggcauccccuacugcaacuacuccaaguacugguaccucaaccacaccgucaccggcaagaccucccuccccaagugcuggcucgucuccaacggcuccuaccucaacgagacccacuucuccgacgacaucgagcagcaggccgacaaccucaucaccgagaugcuccagaaggaguacauggagcgccagggcaagaccccccucggccucgucgaccucuucgucuucuccaccuccuucuaccucaucuccaucuuccuccaccucgucaagauccccacccaccgccacaucgucggcaagcccugccccaagccccaccgccucaaccacaugggcaucugcuccugcggcgucuacaagcagcccggcguccccguccgcuggaagcgcuga

SEQ ID NO: 991 - RNA, 1476 nt, Artificial Sequence
  derived and/or modified protein sequence (opt2) from MOPV/LASV reassortant(IGS-1;Clade IV)__AFY05576__GPC
augggccagaucgucaccuucuuccaggaggucccccacgucaucgaggaggucaugaacaucguccucaucgcccucuccguccucgccguccucaagggccucuacaacuucgccaccugcggccucgucggccucgucaccuuccuccuccucugcggccgcuccugcaccaccucccucuacaagggcgucuacgagcuccagacccucgagcucaacauggagacccucaacaugaccaugccccucuccugcaccaagaacaacucccaccacuacaucauggucggcaacgagaccggccucgagcucacccucaccaacaccuccaucaucaaccacaaguucugcaaccucuccgacgcccacaagaagaaccucuacgaccacgcccucauguccaucaucuccaccuuccaccucuccauccccaacuucaaccaguacgaggccauguccugcgacuucaacggcggcaagaucuccguccaguacaaccucucccacuccuacgccggcgacgccgccaaccacugcggcaccgucgccaacggcguccuccagaccuucaugcgcauggccuggggcggcuccuacaucgcccucgacuccggccgcggcaacugggacugcaucaugaccuccuaccaguaccucaucauccagaacaccaccugggaggaccacugccaguucucccgccccucccccaucggcuaccucggccuccucucccagcgcacccgcgacaucuacaucucccgccgccuccucggcaccuucaccuggacccucuccgacuccgagggcgaggacacccccggcggcuacugccucacccgcuggaugcucaucgaggccgagcucaagugcuucggcaacaccgccgucgccaagugcaacgagaagcacgacgaggaguucugcgacaugcuccgccucuucgacuucaacaagcaggccauccagcgccucaaggccgaggcccagauguccauccagcucaucaacaaggccgucaacgcccucaucaacgaccagcucaucaugaagaaccaccuccgcgacaucaugggcauccccuacugcaacuacuccaaguacugguaccucaaccacaccaccaccggccgcaccucccuccccaagugcuggcucgucuccaacggcuccuaccucaacgagacccacuucuccgacgacaucgagcagcaggccgacaacaugaucaccgagaugcuccagaaggaguacauggagcgccagggcaagaccccccucggccucgucgaccucuucgucuucuccaccuccuucuaccucaucuccaucuuccuccaccucgucaagauccccacccaccgccacaucgucggcaaguccugccccaagccccaccgccucaaccacaugggcaucugcuccugcggccucuacaagcagcccggcguccccgucaaguggaagcgcuga

SEQ ID NO: 992 - RNA, 1476 nt, Artificial Sequence
  derived and/or modified protein sequence (opt2) from MOPV/LASV reassortant(IGS-11;Clade IV)__AFY05588__GPC
augggccagaucgucaccuucuuccaggaggucccccacgucaucgaggaggucaugaacaucguccucaucgcccucuccguccucgccguccucaagggccucuacaacuucgccaccugcggccucgucggccucgucaccuuccuccuccucugcggccgcuccugcaccaccucccucuacaagggcgucuacgagcuccagacccucgagcucaacauggagacccucaacaugaccaugccccucuccugcaccaagaacaacucccaccacuacaucauggucggcaacgagaccggccucgagcucacccucaccaacaccuccaucaucaaccacaaguucugcaaccucuccgacgcccacaagaagaaccucuacgaccacgcccucauguccaucaucuccaccuuccaccucuccauccccaacuucaaccaguacgaggccauguccugcgacuucaacggcggcaagaucuccguccaguacaaccucucccacuccuacgccggcgacgccgccaaccacugcggcaccgucgccaacggcguccuccagaccuucaugcgcauggccuggggcggcuccuacaucgcccucgacuccggccgcggcaacugggacugcaucaugaccuccuaccaguaccucaucauccagaacaccaccugggaggaccacugccaguucucccgccccucccccaucggcuaccucggccuccucucccagcgcacccgcgaccucuacaucucccgccgccuccucggcaccuucaccuggacccucuccgacuccgagggcgaggacacccccggcggcuacugccucacccgcuggaugcucaucgaggccgagcucaagugcuucggcaacaccgccgucgccaagugcaacgagaagcacgacgaggaguucugcgacaugcuccgccucuucgacuucaacaagcaggccauccagcgccucaaggccgaggcccagauguccauccagcucaucaacaaggccgucaacgcccucaucaacgaccagcucaucaugaagaaccaccuccgcgacaucaugggcauccccuacugcaacuacuccaaguacugguaccucaaccacaccaccaccggccgcaccucccuccccaagugcuggcucgucuccaacggcuccuaccucaacgagacccacuucuccgacgacaucgagcagcaggccgacaacaugaucaccgagaugcuccagaaggaguacauggagcgccagggcaagaccccccucggccucgucgaccucuucgucuucuccaccuccuucuaccucaucuccaucuuccuccaccucgucaagauccccacccaccgccacaucgucggcaaguccugccccaagccccaccgccucaaccacaugggcaucugcuccugcggccucuacaagcagcccggcguccccgucaaguggaagcgcuga

SEQ ID NO: 993 - RNA, 1476 nt, Artificial Sequence
  derived and/or modified protein sequence (opt2) from MOPV/LASV reassortant(IGS-12;Clade IV)__AFY05590__GPC
augggccagaucgucaccuucuuccaggaggucccccacgucaucgaggaggucaugaacaucguccucaucgcccucuccguccucgccguccucaagggccucuacaacuucgccaccugcggccucgucggccucgucaccuuccuccuccucugcggccgcuccugcaccaccucccucuacaagggcgucuacgagcuccagacccucgagcucaacauggagacccucaacaugaccaugccccucuccugcaccaagaacaacucccaccacuacaucauggucggcaacgagaccggccucgagcucacccucaccaacaccuccaucaucaaccacaaguucugcaaccucuccgacgcccacaagaagaaccucuacgaccacgcccucauguccaucaucuccaccuuccaccucuccauccccaacuucaaccaguacgaggccauguccugcgacuucaacggcggcaagaucuccguccaguacaaccucucccacuccuacgccggcgacgccgccaaccacugcggcaccgucgccaacggcguccuccagaccuucaugcgcauggccuggggcggcuccuacaucgcccucgacuccggccgcggcaacugggacugcaucaugaccuccuaccaguaccucaucauccagaacaccaccugggaggaccacugccaguucucccgccccucccccaucggcuaccucggccuccucucccagcgcacccgcgacauguacaucucccgccgccuccucggcaccuucaccuggacccucuccgacuccgagggcgaggacacccccggcggcuacugccucacccgcuggaugcucaucgaggccgagcucaagugcuucggcaacaccgccgucgccaagugcaacgagaagcacgacgaggaguucugcgacaugcuccgccucuucgacuucaacaagcaggccauccagcgccucaaggccgaggcccagauguccauccagcucaucaacaaggccgucaacgcccucaucaacgaccagcucaucaugaagaaccaccuccgcgacaucaugggcauccccuacugcaacuacuccaaguacugguaccucaaccacaccaccaccggccgcaccucccuccccaagugcuggcucgucuccaacggcuccuaccucaacgagacccacuucuccgacgacaucgagcagcaggccgacaacaugaucaccgagaugcuccagaaggaguacauggagcgccagggcaagaccccccucggccucgucgaccucuucgucuucuccaccuccuucuaccucaucuccaucuuccuccaccucgucaagauccccacccaccgccacaucgucggcaaguccugccccaagccccaccgccucaaccacaugggcaucugcuccugcggccucuacaagcagcccggcguccccgucaaguggaagcgcuga

SEQ ID NO: 994 - RNA, 1476 nt, Artificial Sequence
  derived and/or modified protein sequence (opt2) from LASV(LM032-SLE-2010;Clade IV)__AIT17802__GPC
augggccagaucgucaccuucuuccaggaggucccccacgucaucgaggaggucaugaacaucguccucaucgcccucuccauccucgccguccucaagggccucuacaaccucgccaccugcggccucgucggccucgucaccuuccuccuccucugcggccgcuccugcaccaccucccucuacaagggcgucuacgagcuccagacccucgagcucaacauggagacccucaacaugaccaugccccucuccugcaccaagaacaacucccaccacuacaucauggucggcaacgagaccggccucgagcucacccucaccaacaccuccaucaucaaccacaaguucugcaaccucuccgacgcccacaagaagaaccucuacaaccacgcccucauguccaucaucuccaccuuccaccucuccauccccaacuucaaccaguacgaggccauguccugcgacuucaacggcggcaagaucuccguccaguacaaccucucccacuccuacgccggcgacgccgccaaccacugcggcaccgucgccaacggcguccuccagaccuucaugcgcauggccuggggcggcuccuacaucgcccucgacuccggccgcgaccgcugggacugcaucaugaccuccuaccaguaccucaucauccagaacaccaccugggaggaccacugccaguucucccgccccucccccaucggcuaccucggccuccucucccagcgcacccgcgacaucuacaucucccgccgccuccucggcaccuucaccuggacccucuccgacuccgagggcaaggacacccccggcggcuacugccucacccgcuggaugcucaucgaggccgagcucaagugcuucggcaacaccgccgucgccaagugcaacgagaagcacgacgaggaguucugcgacaugcuccgccucuucgacuucaacaagcaggccauccagcgccucaaggccgaggcccagauguccauccagcucaucaacaaggccgucaacgcccucaucaacgaccagcucaucaugaagaaccaccuccgcgacaucaugggcauccccuacugcaacuacuccaaguacugguaccucaaccacaccaccaccggcaagaccucccuccccaagugcuggcucgucuccaacggcuccuaccucaacgagacccacuucuccgacgacaucgagcagcaggccgacaacaugaucaccgagaugcuccagaaggaguacauggagcgccucggcaagaccccccucggccucgucgaccucuucgucuucuccaccuccuucuaccucaucuccaucuuccuccaccucgucaagauccccacccaccgccacaucgucggccgcuccugccccaagccccaccgccucaaccacaugggcaucugcuccugcggccucuacaagcagcccggcguccccgucaaguggaagcgcuga

SEQ ID NO: 995 - RNA, 1476 nt, Artificial Sequence
  derived and/or modified protein sequence (opt2) from LASV(LM222-SLE-2010;Clade IV)__AIT17806__GPC
augggccagaucgucaccuucuuccaggaggucccccacgucaucgaggaggucaugaacaucguccucaucgcccucuccauccucgccguccucaagggccucuacaacuucgccaccugcggccucaucggccucgucaccuuccuccuccucugcggccgcuccugcaccaccucccucuacaagggcgucuacgagcuccagacccucgagcucaacauggagacccucaacaugaccaugccccucuccugcaccaagaacaacucccaccacuacaucauggucggcaacgagaccggccucgagcucacccucaccaacaccuccaucaucaaccacaaguucugcaaccucuccgacgcccacaagaagaaccucuacgaccacgcccucauguccaucaucuccaccuuccaccucuccauccccaacuucaaccaguacgaggccauguccugcgacuucaacggcggcaagaucuccguccaguacaaccucucccacuccuacgccggcgacgccgccaaccacugcggcaccgucgccaacggcguccuccagaccuucaugcgcauggccuggggcggcuccuacaucgcccucgacuccggccgcggcaagugggacugcaucaugaccuccuaccaguaccucaucauccagaacaccaccugggaggaccacugccaguucucccgccccucccccaucggcuaccucggccuccucucccagcgcacccgcgacaucuacaucucccgccgccuccucggcaccuucaccuggacccucuccgacuccgagggcaaggacacccccggcggcuacugccucacccgcuggaugcucaucgaggccgagcucaagugcuucggcaacaccgccgucgccaagugcaacgagaagcacgacgaggaguucugcgacaugcuccgccucuucgacuucaacaagcaggccauccagcgccucaaggccgaggcccagauguccauccagcucaucaacaaggccgucaacgcccucaucaacgaccagcucaucaugaagaaccaccuccgcgacaucaugggcauccccuacugcaacuacuccaaguacugguaccucaaccacaccaccaccggcaagaccucccuccccaagugcuggcucgucuccaacggcuccuaccucaacgagacccacuucuccgacgacaucgagcagcaggccgacaacaugaucaccgagaugcuccagaaggaguacauggagcgccagggcaagaccccccucggccucgucgaccucuucgucuucuccaccuccuucuaccucaucuccaucuuccuccaccucgucaagauccccacccaccgccacaucgucggcaaguccugccccaagccccaccgccucaaccacaugggcaucugcuccugcggccucuacaagcagcccggcguccccgucaaguggaagcgcuga

SEQ ID NO: 996 - RNA, 1476 nt, Artificial Sequence
  derived and/or modified protein sequence (opt2) from LASV(LM395-SLE-2009;Clade IV)__AIT17810__GPC
augggccagaucgucaccuucuuccaggaggucccccacgucaucgaggaggucaugaacaucguccucaucgcccucuccauccucgccguccucaagggccucuacaaccucgccaccugcggccucgucggccucgucaccuuccuccuccucugcggccgcuccugcaccaccucccucuacaagggcgucuacgagcuccagacccucgagcucaacauggagacccucaacaugaccaugccccucuccugcaccaaggacaacucccaccacuacauccgcgucggcaacgagaccggccucgagcucacccucaccaacaccuccauccucaaccacaaguucugcaaccucuccgacgcccacaagaagaaccucuacgaccacgcccucauguccaucaucuccaccuuccaccucuccauccccaacuucaaccaguacgaggccauguccugcgacuucaacggcggccgcaucuccguccaguacaaccucucccacuccuacgccggcgacgccgccaaccacugcggcaccgucgccaacggcguccuccagaccuucaugcgcauggccuggggcggcuccuacaucgcccucgacuccggccgcggccgcugggacugcaucaugaccuccuaccaguaccucaucauccagaacaccaccugggaggaccacugccaguucucccgccccucccccaucggcuaccucggccuccucucccagcgcacccgcgacaucuacaucucccgccgccuccucggcaccuucaccuggacccucuccgacuccgagggcaaggacacccccggcggcuacugccucacccgcuggaugcucaucgaggccgagcucaagugcuucggcaacaccgccgucgccaagugcaacgagaagcacgacgaggaguucugcgacaugcuccgccucuucgacuucaacaagcaggccauccagcgccucaaggccgaggcccagauguccauccagcucaucaacaaggccgucaacgcccucaucaacgaccagcucaucaugaagaaccaccuccgcgacaucaugggcauccccuacugcaacuacuccaaguacugguaccucaaccacaccaccaccggcaagaccucccucccccgcugcuggcucgucuccaacggcuccuaccucaacgagacccacuucuccgacgacaucgagcagcaggccgacaacaugaucaccgagaugcuccagaaggaguacauggagcgccagggcaagaccccccucggccucgucgaccucuucgucuucuccaccuccuucuaccucaucuccaucuuccuccaccucgucaagauccccacccaccgccacgucgucggcaagcccugccccaagccccaccgccucaaccacaugggcaucugcuccugcggccucuacaagcagcccggcguccccgucaaguggaagcgcuga

SEQ ID NO: 997 - RNA, 1476 nt, Artificial Sequence
  derived and/or modified protein sequence (opt2) from LASV(LM765-SLE-2012;Clade IV)__AIT17814__GPC
augggccagaucgucaccuucuuccaggaggucccccacgucaucgaggaggucaugaacaucguccucaucgcccucuccauccucgccguccucaagggccucuacaacuucgccaccugcggccucgucggccucgucaccuuccuccuccucugcggccgcuccugcaccaccucccucuacaagggcgucuacgagcuccagacccucgagcucaacauggagacccucaacaugaccaugccccucuccugcaccaagaacaacucccaccacuacaucauggucggcaacgagaccggccucgagcucacccucaccaacaccuccaucaucgaccacaaguucugcaaccucuccgacgcccaccgcaagaaccucuacgaccacgcccucauguccaucaucuccaccuuccaccucuccauccccaacuucaaccaguacgaggccauguccugcgacuucaacggcggcaagaucuccguccaguacaaccucucccacuccuacgccaaggacgccgccgaccacugcggcaccgucgccaacggcguccuccagaccuucaugcgcauggccuggggcggcuccuacaucgcccucgacuccggccgcggccgcugggacugcaucaugaccuccuaccaguaccucaucauccagaacaccaccugggaggaccacugccaguucucccgccccucccccaucggcuaccucggccuccucucccagcgcacccgcgacaucuacaucucccgccgccuccucggcaccuucaccuggacccucuccgacuccgagggcaaggacacccccggcggcuacugccucacccgcuggaugcucaucgaggccgagcucaagugcuucggcaacaccgccgucgccaagugcaacgagaagcacgacgaggaguucugcgacaugcuccgccucuucgacuucaacaagcaggccauccagcgccucaaggccgaggcccagauguccauccagcucaucaacaaggccgucaacgcccucaucaacgaccagcucaucaugaagaaccaccuccgcgacaucaugggcauccccuacugcaacuacuccaaguacugguaccucaaccacaccaccaccggcaagaccucccuccccaagugcuggcucgucuccaacggcuccuaccucaacgagacccacuucuccgacgacaucgagcagcaggccgacaacaugaucaccgagaugcuccagaaggaguacauggagcgccagggcaagaccccccucggccucgucgaccucuucgucuucuccaccuccuucuaccucaucuccaucuuccuccaccucgucaagauccccacccaccgccacaucgucggcaagcccugccccaagccccaccgccucaaccacaugggcaucugcuccugcggccucuacaagcagcccggcguccccgucaaguggaagcgcuga

SEQ ID NO: 998 - RNA, 1476 nt, Artificial Sequence
  derived and/or modified protein sequence (opt2) from LASV(LM774-SLE-2012;Clade IV)__AIT17820__GPC
augggccagaucgucaccuucuuccaggaggucccccacgucaucgaggaggucaugaacaucguccucaucgcccucuccauccucgccguccucaagggccucuacaacuucgccaccugcggccucgucggccucgucaccuuccuccuccucugcggccgcuccugcaccaccucccucuacaagggcgucuacgagcuccagacccucgagcucaacauggagacccucaacaugaccaugccccucuccugcaccaagaacaacucccaccacuacaucauggucggcaacgagaccggccucgagcucacccucaccaacaccuccaucaucaaccacaaguucugcaaccucuccgacgcccacaagaagaaccucuacgaccacgcccucauguccaucaucuccaccuuccaccucuccauccccaacuucaaccaguacgaggccauguccugcgacuucaacggcggcaagaucuccguccaguacaaccucucccacuccuacgccgaggacgccgccaaccacugcggcaccgucgccaacggcguccuccagaccuucaugcgcauggccuggggcggcuccuacaucgcccucgacuccggccgcggcaacugggacugcaucaugaccuccuaccaguaccucaucauccagaacaccaccugggaggaccacugccaguucucccgccccucccccaucggcuaccucggccuccucucccagcgcacccgcgacaucuacaucucccgccgccuccucggcaccuucaccuggacccucuccgacuccgagggcaaggacacccccggcggcuacugccucacccgcuggaugcucaucgaggccgagcucaagugcuucggcaacaccgccgucgccaagugcaacgagaagcacgacgaggaguucugcgacaugcuccgccucuucgacuucaacaagcaggccauccagcgccucaaggccgaggcccagauguccauccagcucaucaacaaggccgucaacgcccucaucaacgaccagcucaucaugaagaaccaccuccgcgacaucaugggcauccccuacugcaacuacuccaaguacugguaccucaaccacaccaccaccggcaagaccucccuccccaagugcuggcucgucuccaacggcuccuaccucaacgagacccacuucuccgacgacaucgagcagcaggccgacaacaugaucaccgagaugcuccagaaggaguacauggagcgccagggcaagaccccccucggccucgucgaccucuucgucuucuccaccuccuucuaccucaucuccaucuuccuccaccucgucaagauccccacccaccgccacaucgucggcaaguccugccccaagccccaccgccucaaccacaugggcaucugcuccugcggccucuacaagcagcccggcguccccgucaaguggaagcgcuga

SEQ ID NO: 999 - RNA, 1476 nt, Artificial Sequence
  derived and/or modified protein sequence (opt2) from LASV(LM776-SLE-2012;Clade IV)__AIT17824__GPC
augggccagaucgucaccuucuuccaggaggucccccacgucaucgaggaggucaugaacaucguccucaucgcccucuccauccucgccguccucaagggccucuacaacuucgccaccugcggccucgucggccucgucaccuuccuccuccucugcggccgcuccugcaccaccuccgucuacaagggcgucuacgagcuccagacccucgagcucaacauggagacccucaacaugaccaugccccucuccugcaccaagaacaacucccaccacuacaucauggucggcaacgagaccggccucgagcucacccucaccaacaccuccaucaucaaccacaaguucugcaaccucuccgacgcccacaagaagaaccucuacgaccacgcccucauguccaucaucuccaccuuccaccucuccauccccaacuucaaccaguacgaggccauguccugcgacuucaacggcggcaagaucuccguccaguacaaccucucccacuccuacgccggcgacgccgccaaccacugcggcaccgucgccaacggcguccuccagaccuucaugcgcauggccuggggcggcuccuacaucgcccucgacuccggccacggcaagugggacugcaucaugaccuccuaccaguaccucaucauccagaacaccaccugggaggaccacugccaguucucccgccccucccccaucggcuaccucggccuccucucccagcgcacccgcgacaucuacaucucccgccgccuccucggcaccuucaccuggacccucuccgacuccgagggcaaggacacccccggcggcuacugccucacccgcuggaugcucaucgaggccgagcucaagugcuucggcaacaccgccgucgccaagugcaacgagaagcacgacgaggaguucugcgacaugcuccgccucuucgacuucaacaagcaggccauccagcgccucaaggccgaggcccagauguccauccagcucaucaacaaggccgucaacgcccucaucaacgaccagcucaucaugaagaaccaccuccgcgacaucaugggcauccccuacugcaacuacuccaaguacugguaccucaaccacaccaccaccggcaagaccucccuccccaagugcuggcucgucuccaacggcuccuaccucaacgagacccacuucuccgacgacaucgagcagcaggccgacaacaugaucaccgagaugcuccagaaggaguacauggagcgccagggcaagaccccccucggccucgucgaccucuucgucuucuccaccuccuucuaccucaucuccaucuuccuccaccucgucaagauccccacccaccgccacaucgucggcaaguccugccccaagccccaccgccucaaccacaugggcaucugcuccugcggccucuacaagcagcccggcguccccguccgcuggaagcgcuga

SEQ ID NO: 1000 - RNA, 1476 nt, Artificial Sequence
  derived and/or modified protein sequence (opt2) from LASV(LM778-SLE-2012;Clade IV)__AIT17828__GPC
augggccagaucgucaccuucuuccaggaggucccccacgucaucgaggaggucaugaacaucguccucaucgcccucuccauccucgccguccucaagggccucuacaacuucgccaccugcggccucgucggccucgucaccuuccuccuccucugcggccgcuccugcaccaccucccucuacaagggcgacuacgagcuccagacccucgagcucaacauggagacccucaacaugaccaugccccucuccugcaccaagaacaacucccaccacuacaucauggucggcaacgagaccggccucgagcucacccucaccaacaccuccaucaucaaccacaaguucugcaaccucuccgacgcccacaagaagaaccucuacgaccacgcccucauguccaucaucuccaccuuccaccucuccauccccaacuucaaccaguacgaggccauguccugcgacuucaacggcggcaagaucuccguccaguacaaccucucccacuccuacgccggcgacgccgccaaccacugcggcaccgucgccaacggcguccuccagaccuucaugcgcauggccuggggcggcuccuacaucgcccucgacuccggccgcggcaacugggacugcaucaugaccuccuaccaguaccucaucauccagaacaccaccugggaggaccacugccaguucucccgccccucccccaucggcuaccucggccuccucucccagcgcacccgcgacaucuacaucucccgccgccuccucggcaccuucaccuggacccucuccgacuccgagggcaaggacacccccggcggcuacugccucacccgcuggaugcucaucgaggccgagcucaagugcuucggcaacaccgccgucgccaagugcaacgagaagcacgacgaggaguucugcgacaugcuccgccucuucgacuucaacaagcaggccauccagcgccucaaggccgaggcccagauguccauccagcucaucaacaaggccgucaacgcccucaucaacgaccagcucaucaugaagaaccaccuccgcgacaucaugggcauccccuacugcaacuacuccaaguacugguaccucaaccacaccaccaccggcaagaccucccuccccaagugcuggcucgucuccaacggcuccuaccucaacgagacccacuucuccgacgacaucgagcagcaggccgacaacaugaucaccgagaugcuccagaaggaguacauggagcgccagggcaagaccccccucggccucgucgaccucuucgucuucuccaccuccuucuaccucaucuccaucuuccuccaccucgucaagauccccacccaccgccacaucgucggcaaguccugccccaagccccaccgccucaaccacaugggcaucugcuccugcggccucuacaagcagcccggcguccccgucaaguggaagcgcuga

SEQ ID NO: 1001 - RNA, 1476 nt, Artificial Sequence
  derived and/or modified protein sequence (opt2) from LASV(Mad39;Clade IV)__ANH09722__GPC
augggccagaucgucaccuucuuccaggaggucccccacgucaucgaggaggucaugaacaucguccucaucgcccucuccauccucgccguccucaagggccucuacaacgucgccaccugcggccucaucggccucgucaccuuccuccuccucugcggccgcuccugcaccaccacccucuacaagggcgucuacgagcuccaggcccucgagcucaacauggagacccucaacaugaccaugccccucuccugcaccaagaacaacucccaccacuacauccgcgucggcaacgagaccggccucgagcucacccucaccaacaccucccucaucaaccacaaguucugcaaccucuccgacgcccacaagaagaaccucuacgaccacgcccucauguccaucaucuccaccuuccaccucuccauccccaacuucaaccaguacgaggccauguccugcgacuucaacgacggcaagaucuccguccaguacaaccucucccacaccuacgccggcgacaccgccaaccacugcggcaccgucgccaacggcguccuccagaccuucaugcgcauggccuggggcggcuccuacaucgcccucgacuccggccgcggcggcugggacugcaucaugaccuccuaccaguaccucaucauccagaacaccaccugggaggaccacugccaguucucccgccccucccccaucggcuaccucggccuccucucccagcgcacccgcgacaucuacaucucccgccgccuccucggcaccuucaccuggacccucuccgacuccgagggcaaggacacccccggcggcuacugccucacccgcuggaugcucaucgaggccgagcucaagugcuucggcaacaccgccgucgccaagugcaacgagaagcacgacgaggaguucugcgacaugcuccgccucuucgacuucaacaagcaggccauccagcgccucaaggccgaggcccagauguccauccagcucaucaacaaggccgucaacgcccucaucaacgaccagcucaucaugaagaaccaccuccgcgacaucaugggcauccccuacugcaacuacuccaaguacugguaccucaaccacaccgucaccggcaagaccucccuccccaagugcuggcucgucuccaacggcuccuaccucaacgagacccacuucuccgacgacaucgagcagcaggccgacaacaugaucaccgagaugcuccagaaggaguacauggagcgccagggcaagaccccccucggccucgucgaccucuucgucuucuccaccuccuucuaccucaucuccaucuuccuccaccucgucaagauccccacccaccgccacgucgucggcaagcccugccccaagccccaccgccucaaccacaugggcaucugcuccugcggcuucuacaagcagcccggcguccccguccgcuggaagcgcuga

SEQ ID NO: 1002 - RNA, 1476 nt, Artificial Sequence
  derived and/or modified protein sequence (opt2) from LASV(Mad41;Clade IV)__ANH09724__GPC
augggccagaucgucaccuucuuccaggaggucccccacgucaucgaggaggucaugaacaucguccucaucgcccucuccauccucgccguccucaagggccucuacaacgucgccaccugcggccucaucggccucgucaccuuccuccuccucugcggccgcuccugcaccaccacccucuacaagggcgucuacgagcuccaggcccucgagcucaacauggagacccucaacaugaccaugccccucuccugcaccaagaacgacucccaccacuacaucauggucggcaacgagaccggccucgagcucacccucaccaacaccuccaucaucucccacaaguucugcaaccucuccgacgcccacaagcagaaccucuacgaccacgcccucauguccaucaucuccaccuuccaccucuccauccccaacuucaaccaguacgaggccauguccugcgacuucaacggcggcaagaucuccguccaguacaaccucucccacaccuacgccggcgacgccgccaaccacugcggcaccgucgccaacggcguccuccagaccuucaugcgcauggccuggggcggcuccuacaucgcccucgacuccggccgcggcggcugggacugcaucaugaccuccuaccaguaccucaucauccagaacaccaccugggaggaccacugccaguucucccgccccucccccaucggcuaccucggccuccucucccagcgcacccgcgacaucuacaucucccgccgccuccucggcaccuucaccuggacccucuccgacuccgagggcaaggacacccccggcggcuacugccucacccgcuggaugcucaucgaggccgagcucaagugcuucggcaacaccgccgucgccaagugcaacgagaagcacgacgaggaguucugcgacaugcuccgccucuucgacuucaacaagcaggccauccagcgccucaaggccgaggcccagauguccauccagcucaucaacaaggccgucaacgcccucaucaacgaccagcucaucaugaagaaccaccuccgcgacaucaugggcauccccuacugcaacuacuccaaguacugguaccucaaccacaccgucaccggcaagaccucccuccccaagugcuggcucgucuccaacggcuccuaccucaacgagacccacuucuccgacgacaucgagcagcaggccgacaacaugaucaccgagaugcuccagaaggaguacauggagcgccagggcaagaccccccucggccucgucgaccucuucgucuucuccaccuccuucuaccucaucuccaucuuccuccaccucgucaagauccccacccaccgccacgucgucggcaagcccugccccaagccccaccgccucaaccacaugggcaucugcuccugcggcuucuacggccagcccggcguccccguccgcuggaagcgcuga

SEQ ID NO: 1003 - RNA, 1476 nt, Artificial Sequence
  derived and/or modified protein sequence (opt2) from LASV(Mad63;Clade IV)__ANH09728__GPC
augggccagaucgucaccuucuuccaggaggucccccacgucaucgaggaggucaugaacaucguccucaucgcccucuccguccucgccguccucaagggccucuacaacgucgccaccugcggccucaucggccucgucaccuuccuccuccucugcggccgcuccugcaccaccacccucuacaagggcgucuacgagcuccaggcccucgagcucaacaugggcacccucaacaugaccaugccccucuccugcaccaagaacaacucccaccacuacaucauggucggcaacgagaccggccucgagcucacccucaccaacaccuccaucaucaaccacaaguucugcaaccucuccgacgcccacaagaaggaccucuacgaccacgcccucauguccaucaucuccaccuuccaccucuccguccccaacuucaaccaguacgaggccauguccugcgacuucaacggcggcaagaucuccguccaguacaaccucucccacgccuacgccggcgacaccgccaaccacugcggcaccgucgccaacggcguccuccagaccuucaugcgcauggccuggggcggcuccuacaucgcccucgacuccggccgcggcggcugggacugcaucaugaccuccuaccaguaccucaucauccagaacaccaccugggaggaccacugccaguucucccgccccucccccaucggcuaccucggccuccucucccagcgcacccgcgacaucuacaucucccgccgccuccucggcaccuucaccuggacccucuccgacuccgagggcgaguacacccccggcggcuacugccucacccgcuggaugcucaucgaggccgagcucaagugcuucggcaacaccgccgucgccaagugcaacgagaagcacgacgaggaguucugcgacaugcuccgccucuucgacuucaacaagcaggccauccagcgccucaaggccgaggcccagauguccauccagcucaucaacaaggccgucaacgcccucaucaacgaccagcucaucaugaagaaccaccuccgcgacaucaugggcauccccuacugcaacuacuccaaguacugguaccucaaccacaccgucaccggcaagaccucccuccccaagugcuggcucgucuccaacggcuccuaccucaacgagacccacuucuccgacgacaucgagcagcaggccgacaacaugaucaccgagaugcuccagaaggaguacauggagcgccagggcaagaccccccucggccucgucgaccucuucgucuucuccaccuccuucuaccucaucuccaucuuccuccaccucgucaagauccccacccaccgccacgucgucggcaagcccugccccaagccccaccgccucaaccacaugggcaucugcuccugcggcuucuacaagcagcccggcguccccguccgcuggaagcgcuga

SEQ ID NO: 1004 - RNA, 1476 nt, Artificial Sequence
  derived and/or modified protein sequence (opt2) from LASV(Mad69;Clade IV)__ANH09730__GPC
augggccagaucgucaccuucuuccaggaggucccccacgucaucgaggaggucaugaacaucguccucaucgcccucuccguccucgccguccucaagggccucuacaacgucgccaccugcggccucaucggccucgucaccuuccuccuccucugcggccgcuccugcaccaccacccucuacaagggcgucuacgagcuccaggcccucgagcucaacauggagacccucaacaugaccaugccccucuccugcaccaagaacaacucccaccacuacaucauggucggcaacgagaccggccucgagcucacccucaccaacaccuccaucaucaaccacaaguucugcaaccucuccgacgcccacaagaagaaccucuacgaccacgcccucauguccaucaucuccaccuuccaccucuccauccccaacuucaaccaguacgaggccauguccugcgacuucaaccagggcaagaucuccguccaguacaaccucucccacgccuacgccggcgacgccgccaaccacugcggcaccgucgccaacggcguccuccagaccuucaugcgcauggccuggggcggcuccuacaucgcccucgacuccggccgcggcggcugggacugcaucaugaccuccuaccaguaccucaucauccagaacaccaccugggagaaccacugccaguucucccgccccucccccaucggcuaccucggccuccucucccagcgcacccgcgacaucuacaucucccgccgccuccucggcaccuucaccuggacccucuccgacuccgagggcaagggcacccccggcggcuacugccucacccgcuggaugcucaucgaggccgagcucaagugcuucggcaacaccgccgucgccaagugcaacgagaagcacgacgaggaguucugcgacaugcuccgccucuucgacuucaacaagcaggccauccagcgcuucaaggccgaggcccagauguccauccagcucaucaacaaggccgucaacgcccucaucaacgaccagcucaucaugaagaaccaccuccgcgacaucaugggcauccccuacugcaacuacuccaaguacugguaccucaaccacaccgucaccggcaagaccucccuccccaagugcuggcucgucuccaacggcuccuaccucaacgagacccacuucuccgacgacaucgagcagcaggccgacaacaugaucaccgagaugcuccagaaggaguacauggagcgccagggccgcaccccccucggccucgucgaccucuucgucuucuccaccuccuucuaccucaucuccaucuuccuccaccucgucaagauccccacccaccgccacgucgucggcaagcccugccccaagccccaccgccucaaccacaugggcaucugcuccugcggcuucuacaagcagcccggcguccccguccgcuggaagcgcuga

SEQ ID NO: 1005 - RNA, 1476 nt, Artificial Sequence
  derived and/or modified protein sequence (opt2) from LASV(Mad83;Clade IV)__ANH09732__GPC
augggccagaucgucaccuucuuccaggaggucccccacgucaucgaggaggucaugaacaucguccucaucgcccucuccauccucgccguccucaagggcgucuacaacgucgccaccugcggccucaucggccucgucaccuuccuccuccucuccggccgcuccugcaccaccaccaucuacaagggcgucuacgagcuccaggcccucgagcucaacauggagacccucaacaugaccaugccccucuccugcaccaagaacaacucccaccacuacaucauggucggcaacgagaccggccucgagcucacccucaccaacaccuccaucaucaaccacaaguucugcaaccucuccgacgcccacaagaagaaccucuacgaccacgcccucauguccaucaucuccaccuuccaccucuccauccccaacuucaaccaguacgaggccauguccugcgacuucaacggcggcaagaucuccguccaguacaaccucucccacaccuacgccggcgacgccgccaaccacugcggcaccgucgccaacggcguccuccagaccuucaugcgcauggccuggggcggcuccuacaucgcccucgacuccggccacggcggcugggacugcaucaugaccuccuaccaguaccucaucauccagaacaccaccugggagaaccacugccaguucucccgccccucccccaucggcuaccucggccuccucucccagcgcacccgcgacaucuacaucucccgccgccuccucggcaccuucaccuggacccucuccgacuccgagggcaaggacacccccggcggcuacugccucacccgcuggaugcucaucgaggccgagcucaagugcuucggcaacaccgccgucgccaagugcaacgagaagcacgacgaggaguucugcgacaugcuccgccucuucgacuucaacaagcaggccauccagcgccucaaggccgaggcccagauguccauccagcucaucaacaaggccgucaacgcccucaucaacgaccagcucaucaugaagaaccaccuccgcgacaucaugggcauccccuacugcaacuacuccaaguacugguaccucaaccacaccgucaccggcaagaccucccuccccaagugcuggcucgucuccaacggcuccuaccucaacgagacccacuucuccgacgacaucgagcagcaggccgacaacaugaucaccgagaugcuccagaaggaguacauggagcgccagggcaagaccccccucggccucgucgaccucuucgucuucuccaccuccuucuaccucaucuccaucuuccuccaccucgucaagauccccacccaccgccacaucgucggcaagcccugccccaagccccaccgccucaaccacaugggcaucugcuccugcggcuucuacaagcagcccggcguccccguccgcuggaagcgcuga

SEQ ID NO: 1006 - RNA, 1476 nt, Artificial Sequence
  derived and/or modified protein sequence (opt2) from LASV(NL;Clade IV)__AAO59512__GPC
augggccagaucgucaccuucuuccaggaggucccccacgucaucgaggaggucaugaacaucguccucaucgcccucuccauccucgccguccucaagggccucuacaacuucgccaccugcggccucgucggccucgucgccuuccuccuccucugcggccgcuccugcaccuccucccucuacaagggcgucuacgagcuccagacccucgagcucaacauggagacccucaacaugaccaugccccucuccugcaccaagaacaacucccaccacuacauccgcgucggcaacgagaccggccucgagcucacccucaccaacaccuccaucaucaaccacaaguucugcaaccucuccgacgcccacaagaagaaccucuacgaccacgcccucauguccaucaucuccaccuuccaccucuccauccccaacuucaaccaguacgaggccauguccugcgacuucaacggcggcaagaucuccguccaguacaaccucucccacuccuacgccgucgacgccgccaagcacugcggcaccgucgccaacggcguccuccagaccuucaugcgcauggccuggggcggcuccuacaucgcccucgacuccggccacggccgcugggacugcaucaugaccuccuaccaguaccucaucauccagaacaccaccugggaggaccacugccaguucucccgccccucccccaucggcuaccucggccuccucucccagcgcacccgcgacaucuacaucucccgccgccuccucggcaccuucaccuggacccucuccgacuccgagggcaaggacacccccggcggcuacugccucacccgcuggaugcucaucgaggccgagcucaagugcuucggcaacaccgccgucgccaagugcaacgagaagcacgacgaggaguucugcgacaugcuccgccucuucgacuucaacaagcaggccauccagcgccucaagaccgaggcccagauguccauccagcucaucaacaaggccgucaacgcccucaucaacgaccagcucaucaugaagaaccaccuccgcgacaucaugggcauccccuacugcaacuacucccgcuacugguaccucaaccacaccaccaccggcaagaccucccuccccaagugcuggcucgucuccaacggcuccuaccucaacgagacccgcuucuccgacgacaucgagcagcaggccgacaacaugaucaccgagaugcuccagaaggaguacauggagcgccagggcaagaccccccucggccucgucgaccucuucgucuucuccaccuccuucuaccucaucuccaucuuccuccaccucgucaagauccccacccaccgccacaucgucggcaaguccugccccaagccccaccgccucaaccacaugggcaucugcuccugcggccucuacaagcagcccggcguccccgucaaguggaagcgcuga

SEQ ID NO: 1007 - RNA, 1476 nt, Artificial Sequence
  derived and/or modified protein sequence (opt2) from LASV(Z0947-SLE-2011;Clade IV)__AIT17840__GPC
augggccagaucgucaccuucuuccaggaggucccccacgucaucgaggaggucaugaacaucguccucaucgcccucuccauccucgccguccucaagggccucuacaacuucgccaccugcggccucgucggccucgucaccuuccuccuccucugcggccgcuccugcaccaucucccucuacaagggcgucuacgagcuccagacccucgagcucaacauggagacccucaacaugaccaugccccucuccugcaccaagaacaacucccaccacuacaucauggucggcaacgagaccggccucgagcucacccucaccaacaccuccaucaucaaccacaaguucugcaaccucuccgacgcccacaagaagaaccucuacgaccacgcccucauguccaucaucuccaccuuccaccucuccauccccaacuucaaccaguacgaggccauguccugcgacuucaacggcggcaagaucuccguccaguacaaccucucccacuccuacgccggcgacgccgccaaccacugcggcaccgucgccaacggcguccuccagaccuucaugcgcauggccuggggcggcuccuacaucgcccucgacuccggccgcgaccgcugggacugcaucaugaccuccuaccaguaccucaucauccagaacaccaccugggaggaccacugccaguucucccgccccucccccaucggcuaccucggccuccucucccagcgcacccgcgacaucuacaucucccgccgccuccucggcaccuucaccuggacccucuccgacuccgagggcaaggacacccccggcggcuacugccucacccgcuggaugcucaucgaggccgagcucaagugcuucggcaacaccgccgucgccaagugcaacgagaagcacgacgaggaguucugcgacaugcuccgccucuucgacuucaacaagcaggccauccagcgccucaaggccgaggcccagauguccauccagcucaucaacaaggccgucaacgcccucaucaacgaccagcucaucaugaagaaccaccuccgcgacaucaugggcauccccuacugcaacuacuccaaguacugguaccucaaccacaccaccaccggcaagaccucccuccccaagugcuggcucgucuccaacggcuccuaccucaacgagacccacuucuccgacgacaucgagcagcaggccgacaacaugaucaccgagaugcuccagaaggaguacauggagcgccagggcaagaccccccucggccucgucgaccucuucgucuucuccaccuccuucuaccucaucuccaucuuccuccaccucgucaagauccccacccaccgccacaucgucggcaagcccugccccaagccccaccgccucaaccacaugggcaucugcuccugcggccucuacaagcagcccggcguccccgucaaguggaagcgcuga

SEQ ID NO: 1008 - RNA, 1476 nt, Artificial Sequence
  derived and/or modified protein sequence (opt2) from LASV(Z0948-SLE-2011;Clade IV)__AIT17844__GPC
augggccagaucgucaccuucuuccaggaggucccccacgucaucgaggaggucaugaacaucguccucaucgcccucuccauccucgccguccucaagggccucuacaacuucgccaccugcggccucgucggccucgucaccuuccuccuccucugcggccgcuccugcaccaucucccucuacaagggcgucuacgagcuccagacccucgagcucaacauggagacccucaacaugaccaugccccucuccugcaccaagaacaacucccaccacuacaucauggucggcaacgagaccggccucgagcucacccucaccaacaccuccaucaucaaccacaaguucugcaaccucuccgacgcccacaagaagaaccucuacgaccacgcccucauguccaucaucuccaccuuccaccucuccauccccaacuucaaccaguacgaggccauguccugcgacuucaacggcggcaagaucuccguccaguacaaccucucccacuccuacgccggcgacgccgccaaccacugcggcaccgucgccaacggcguccuccagaccuucaugcgcauggccuggggcggcuccuacaucgcccucgacuccggccgcgaccgcugggacugcaucaugaccuccuaccaguaccucaucauccagaacaccaccugggaggaccacugccaguucucccgccccucccccaucggcuaccucggccuccucucccagcgcacccgcgacaucuacaucucccgccgccuccucggcaccuucaccuggacccucuccgacuccgagggcaaggacacccccggcggcuacugccucacccgcuggaugcucaucgaggccgagcucaagugcuucggcaacaccgccgucgccaagugcaacgagaagcacgacgaggaguucugcgacaugcuccgccucuucgacuucaacaagcaggccauccagcgccucaaggccgaggcccagauguccauccagcucaucaaccgcgccgucaacgcccucaucaacgaccagcucaucaugaagaaccaccuccgcgacaucaugggcauccccuacugcaacuacuccaaguacugguaccucaaccacaccaccaccggcaagaccucccuccccaagugcuggcucgucuccaacggcuccuaccucaacgagacccacuucuccgacgacaucgagcagcaggccgacaacaugaucaccgagaugcuccagaaggaguacauggagcgccagggcaagaccccccucggccucgucgaccucuucgucuucuccaccuccuucuaccucaucuccaucuuccuccaccucgucaagauccccacccaccgccacaucgucggcaagcccugccccaagccccaccgccucaaccacaugggcaucugcuccugcggccucuacaagcagcccggcguccccgucaaguggaagcgcuga

SEQ ID NO: 1009 - RNA, 1476 nt, Artificial Sequence
  derived and/or modified protein sequence (opt2) from LASV(Z148;Clade IV)__AAT49008__GPC
augggccagaucgucaccuucuuccaggaggucccccacgucaucgaggaggucaugaacaucguccucaucgcccucuccauccucgccguccucaagggccucuacaacgucgccaccugcggccucaucggccucgucaccuuccucuuccucugcggccgcuccugcuccaccacccucuacaagggcgucuacgagcuccagacccucgagcucaacauggagacccucaacaugaccaugccccucuccugcaccaagaacaacucccaccacuacaucauggucggcaacgagaccggccucgagcucacccucaccaacaccuccaucaucaaccacaaguucugcaaccucuccgacgcccacaagaagaaccucuacgaccacacccucauguccaucaucuccaccuuccaccucuccauccccaacuucaaccaguacgaggccauguccugcgacuucaacggcggcaagaucuccguccaguacaaccucucccacuccuacgccgucgacgccgccaaccacugcggcaccgucgccaacggcguccuccagaccuucaugcgcauggccuggggcggcuccuacaucgcccucgacuccggccgcggcaacugggacugcaucaugaccuccuaccaguaccucaucauccagaacaccaccugggaggaccacugccaguucucccgccccucccccaucggcuaccucggccuccucucccagcgcacccgcgacaucuacaucucccgccgccuccucggcaccuucaccuggacccucuccgacuccgagggcaaggacacccccggcggcuacugccucacccgcuggaugcucaucgaggccgagcucaagugcuucggcaacaccgccgucgccaagugcaacgagaagcacgacgaggaguucugcgacaugcuccgccucuucgacuucaacaagcaggccauccagcgccucaaggccgaggcccagauguccauccagcucaucaacaaggccgucaacgcccucaucaacgaccagcucaucaugaagaaccaccuccgcgacaucaugggcauccccuacugcaacuacucccgcuacugguaccucaaccacaccgucaccggcaagaccucccuccccaagugcuggcucgucuccaacggcuccuaccucaacgagacccacuucuccgacgacaucgagcagcaggccgacaaccucaucaccgagaugcuccagaaggaguacauggagcgccagggcaagaccccccucggccucgucgaccucuucgucuucuccaccuccuucuaccucaucuccaucuuccuccaccucgucaagauccccacccaccgccacaucgucggcaagcccugccccaagccccaccgccucaaccacaugggcaucugcuccugcggcgucuacaagcagcccggcguccccguccgcuggaagcgcuga

SEQ ID NO: 1010 - RNA, 1476 nt, Artificial Sequence
  derived and/or modified protein sequence (opt2) from LASV(Bamba-R114;Clade V)__AHC95555__GPC
augggccagaucgucaccuucuuccaggaggucccccacgucaucgaggaggucaugaacaucguccucaucgcccucuccauccucgccguccucaagggccucuacaacaucgccaccugcggccucaucggccucgucaccuuccuccuccucugcggccgcuccugcuccuccaaccucuacaagggcgucuacgagcuccagucccucgaccucaacauggagacccucaacaugaccaugccccucuccugcaccaagaacaacucccaccacuacauccgcgccggcaacgagaccggccucgagcucacccucaccaacaccucccucaucaaccacaaguucugcaaccucuccgacgcccacaagaagaaccucuacgaccacacccucauguccaucaucuccaccuuccaccucuccauccccaacuucaaccaguacgaggccauguccugcgacuucaacggcggcaagaucuccguccaguacaaccucucccacgccuacgccaucgacgccgccgagcacugcggcaccgucgccaacggcguccuccagaccuucaugcgcauggccuggggcggcuccuacaucgcccucgacuccggccgcggcaacugggacugcaucaugaccuccuaccaguaccucaucauccagaacaccaccugggaggaccacugccaguucucccgccccucccccaucggcuaccucggccuccucucccagcgcacccgcgacaucuacaucucccgccgccuccucggcaccuucaccuggacccucuccgacuccgagggcaacgccacccccggcggcuacugccucacccgcuggaugcucaucgaggccgagcucaagugcuucggcaacaccgccgucgccaagugcaacgagaagcacgacgaggaguucugcgacaugcuccgccucuucgacuucaacaagcaggccaucucccgccucaaguccgaggcccagauguccauccagcucaucaacaaggccgucaacgcccucaucaacgaccagcucaucaugaagaaccaccuccgcgacaucaugggcauccccuacugcaacuacuccaaguacugguaccucaaccacaccaucaccggccgcaccucccuccccaagugcuggcucgucuccaacggcuccuaccucaacgagacccacuucuccgacgacaucgagcagcaggccgacaacaugaucaccgagaugcuccagaaggaguacauggagcgccagggcaagaccccccucggccucgucgaccucuucgucuucuccaccuccuucuaccucaucuccaucuuccuccaccucgucaagauccccacccaccgccacaucgucggcaagcccugccccaagccccaccgccucaaccacaugggcaucugcuccugcggccucuacaagcagcccggcgucccccucaaguggaagcgcuga

SEQ ID NO: 1011 - RNA, 1476 nt, Artificial Sequence
  derived and/or modified protein sequence (opt2) from LASV(Komina-R16;Clade V)__AHC95557__GPC
augggccagaucgucaccuucuuccaggaggucccccacgucaucgaggaggucaugaacaucguccucaucgcccucuccauccucgccguccucaagggccucuacaacaucgccaccugcggccucaucggccucgucaccuucuuccuccucugcggccgcuccugcuccuccaaccucuacaagggcgucuacgagcuccagucccucgaccucaacauggagacccucaacaugaccaugccccucuccugcaccaagaacaacucccaccacuacauccgcgucggcaacgagaccggccucgagcucacccucaccaacaccucccuccucaaccacaaguucugcaaccucuccgacgcccacaagcgcaaccucuacgaccacgcccucauguccaucaucuccaccuuccaccucuccauccccaacuucaaccaguacgaggccauguccugcgacuucaacggcggcaagaucaccguccaguacaaccucucccacuccuacgccggcgacaccgccaagcacugcggcaccaucgccaacggcguccuccagaccuucaugcgcauggccuggggcggcuccuacaucgcccucgacuccggccacggcaacugggacugcaucaugaccuccuaccaguaccucaucauccagaacaccaccugggaggaccacugccaguucucccgccccucccccaucggcuaccucggccuccucucccagcgcacccgcgacaucuacaucucccgccgccuccucggcaccuucaccuggacccucuccgacuccgagggcaacgccacccccggcggcuacugccucacccgcuggaugcucaucgaggccgagcucaagugcuucggcaacaccgccgucgccaagugcaacgagaagcacgacgaggaguucugcgacaugcuccgccucuucgacuucaacaagcaggccaucucccgccuccgcuccgaggcccagauguccauccagcucaucaacaaggccgucaacgcccucaucaacgaccagcucaucaugaagaaccaccuccgcgacaucaugggcauccccuacugcaacuacuccaaguacugguaccucaaccacaccgucaccggccgcaccucccuccccaagugcuggcucgucuccaacggcuccuaccucaacgagacccacuucuccgacgacaucgagcagcaggccgacaacaugaucaccgagaugcuccagaaggaguacauggaccgccagggcaagaccccccucggccucgucgaccucuucgucuucuccaccuccuucuaccucaucuccaucuuccuccaccucgucaagauccccacccaccgccacaucgucggcaagcccugccccaagccccaccgccucaaccgcaugggcaucugcuccugcggccucuacaagcagcccggcguccccgucaaguggaagcgcuga

SEQ ID NO: 1012 - RNA, 1476 nt, Artificial Sequence
  derived and/or modified protein sequence (opt2) from LASV(Ouoma-R123;Clade V)__AHC95559__GPC
augggccagaucaucaccuucuuccaggaggucccccacgucaucgaggaggucaugaacaucguccucaucgcccucuccauccucgccguccucaagggccucuacaacaucgccaccugcggccucaucggccucgucaccuuccuccuccucugcggccgcuccugcuccuccucccucuacaagggcgucuacgagcuccagucccucgaccucaacauggagacccucaacaugaccaugccccucuccugcaccaagaacaacucccaccacuacauccgcgucggcaacgagaccggccucgagcucacccucaccaacaccucccucaucaaccacaaguucugcaaccucuccgacgcccacaagaagaaccucuacgaccacgcccucauguccaucaucuccaccuuccaccucuccauccccaacuucaaccaguacgaggccauguccugcgacuucaacggcggcaagaucuccguccaguacaaccucucccacgccuacgccaucgacgccgccucccacugcggcaccgucgccaacggcguccuccagaccuucaugcgcauggccuggggcggcuccuacaucgcccucgacuccggccacggcaacugggacugcaucaugaccuccuaccaguaccucaucauccagaacaccaccugggaggaccacugccaguucucccgccccucccccaucggcuaccucggccuccucucccagcgcacccgcgacaucuacaucucccgccgccuccucggcaccuucaccuggacccucuccgacuccgagggcaacgccacccccggcggcuacugccucacccgcuggaugcucaucgaggccgagcucaagugcuucggcaacaccgccgucgccaagugcaacgagaagcacgacgaggaguucugcgacaugcuccgccucuucgacuucaacaagcaggccaucucccgccucaaguccgaggcccagauguccauccagcucaucaacaaggccgucaacgcccucaucaacgaccagcucaucaugaagaaccaccuccgcgacaucaugggcauccccuacugcaacuacuccaaguacugguaccucaaccacaccgucaccggcaagaccucccuccccaagugcuggcucgucuccaacggcuccuaccucaacgagacccacuucuccgacgacaucgagcagcaggccgacaacaugaucaccgagaugcuccagaaggaguacauggagcgccagggcaagaccccccucggccucgucgaccucuucgucuucuccaccuccuucuaccucaucuccaucuuccuccaccucgucaagauccccacccaccgccacaucgucggcaagcccugccccaagccccaccgccucaaccacaugggcaucugcuccugcggccucuacaagcagcccggcguccccgucaaguggaagcgcuga

SEQ ID NO: 1013 - RNA, 1476 nt, Artificial Sequence
  derived and/or modified protein sequence (opt2) from LASV(Soromba-R;Clade V)__AHC95553__GPC
augggccagaucgucaccuucuuccaggaggucccccacgucaucgaggaggucaugaacaucguccucaucgcccucuccauccucgccguccucaagggccucuacaacaucgccaccugcggccucaucggccucgucaccuucuuccuccucugcggccgcuccugcuccuccaaccucuacaagggcgucuacgagcuccagucccucgaccucaacauggagacccucaacaugaccaugccccucuccugcaccaagaacaacucccaccacuacauccgcgucggcaacgagaccggccucgagcucacccucaccaacaccucccuccucgaccacaaguucugcaaccucuccgacgcccacaagaagaaccucuacgaccacgcccucauguccaucaucuccaccuuccaccucuccauccccaacuucaaccaguacgaggccauguccugcgacuucaacggcggcaagaucaccguccaguacaaccucucccacuccuacgccggcgacgccgcccgccacugcggcaccaucgccaacggcguccuccagaccuucaugcgcauggccuggggcggcuccuacaucgcccucgacuccggccacggcaacugggacugcaucaugaccuccuaccaguaccucaucauccagaacaccaccugggaggaccacugccaguucucccgccccucccccaucggcuaccucucccuccucucccagcgcacccgcgacaucuacaucucccgccgccuccucggcaccuucaccuggacccucuccgacuccgagggcaacgccacccccggcggcuacugccucacccgcuggaugcucaucgaggccgagcucaagugcuucggcaacaccgccgucgccaagugcaacgagaagcacgacgaggaguucugcgacaugcuccgccucuucgacuucaacaagcaggccaucucccgccuccgcuccgaggcccagauguccauccagcucaucaacaaggccgucaacgcccucaucaacgaccagcucaucaugaagaaccaccuccgcgacaucaugggcauccccuacugcaacuacuccaaguacugguaccucaaccacaccgucaccggccgcaccucccuccccaagugcuggcucgucuccaacggcuccuaccucaacgagacccacuucuccgacgacaucgagcagcaggccgacaacaugaucaccgagaugcuccagaaggaguacauggaccgccagggcaagaccccccucggccucgucgaccucuucgucuucuccaccuccuucuaccucaucuccaucuuccuccaccucgucaagauccccacccaccgccacaucgucggcaagcccugccccaagccccaccgccucaaccgcaugggcaucugcuccugcggccucuacaagcagcccggcguccccgucaaguggaagcgcuga

SEQ ID NO: 1014 - RNA, 1473 nt, Artificial Sequence; identical to SEQ ID NO: 768
  derived and/or modified protein sequence (opt2) from LASV(Alzey;Clade VI)__SCA79105__GPC

SEQ ID NO: 1015 - RNA, 1473 nt, Artificial Sequence
  derived and/or modified protein sequence (opt2) from LASV(Lassa/H.sapiens-wt/TGO/2016/201600568;Clade VI)__AVN98153__GPC
augggccagaucaucaccuucuuccaggaggucccccacgucaucgaggaggucaugaacaucguccucaucgcccucucccuccucgccauccucaagggcgucuacaacgucgccaccugcggcaucaucggccucgucaccuuccucuuccucugcggccgcuccugcucccucaucuacaagggcuccuacgagcuccagacccucgagcucaacauggagacccucaacaugaccaugccccucuccugcaccaagaacuccucccaccacuacauccgcgucggcaacgagaccggccucgagcucacccucaccaacaccuccaucaucaaccacaaguucugcaaccucuccgacgcccacaagcgcaaccucuacgaccacgcccucauguccauccucuccaccuuccaccucuccauccccaacuucaaccaguacgaggccauguccugcgacuucaacggcggcaagaucuccguccaguacaaccucucccacgccuacgccgucgacgccgccgagcacugcggcaccgucgccaacggcguccuccagaccuucaugcgcauggccuggggcggcuccuacaucgcccucgacuccggccgcggcaacugggacugcaucaugaccuccuaccaguaccucaucauccagaacaccaccugggaggaccacugccaguucucccgccccucccccaucggcuaccucggccuccucucccagcgcacccgcgacaucuacaucucccgccgccuccucggcaccuucaccuggacccucuccgacuccgagggcaacgagacccccggcggcuacugccucacccgcuggaugcucaucgaggccgagcucaagugcuucggcaacaccgccgucgccaagugcaacgagaagcacgacgaggaguucugcgacaugcuccgccucuucgacuucaacaagcaggccauccagcgccucaaguccgaggcccagauguccauccagcucaucaacaaggccgucaacgcccucaucaacgaccagcucaucaugaagaaccaccuccgcgacaugaugggcauccccuacugcaacuacuccaaguacugguaccucaaccacaccuccuccggccgcgccucccuccccaagugcuggcucgucuccaacggcuccuaccucaacgagacccacuucuccgacgacaucgagcagcaggccgacaacaugaucaccgagaugcuccagaaggaguacaucgaccgccagggcaagaccccccucggccucgucgaccucuucgucuucuccaccuccuucuaccucaucuccaucuuccuccaccucaucaagauccccacccaccgccacaucgucggcaagcccugccccaagccccaccgccucaaccacaugggcaucugcuccugcggccucuacaagcagcccggcguccccacccgcuggaagcgcuga

SEQ ID NO: 1016 - RNA, 1473 nt, Artificial Sequence
  derived and/or modified protein sequence (opt2) from LASV(NIGERIA IKEJI;Clade II)__AMZ00373__GPC
augggccagaucaucaccuucuuccaggaggucccccacgucaucgaggaggucaugaacaucguccucaucgcccucucccuccucgccauccucaagggcaucuacaacgucgccaccugcggccucuucggccucaucuccuuccucuuccucugcggccgcuccugcuccaccauguacaagggcgucuacgagcuccagacccucgagcucgacauggccaaccucaacaugaccaugccccucuccugcaccaagaacaacucccaccacuacaucauggucggcaacgagaccggccucgagcucacccucaccaaccaguccaucaucaaccacaaguucugcaaccucuccgacgcccacaagaagaaccucuacgaccacacccucauguccaucaucuccaccuuccaccucuccauccccaacuucaaccaguacgaggccauguccugcgacuucaacggcggcaagaucuccguccaguacaaccucucccacuccuacgccgucgacgccgccaaccacugcggcaccgucgccaacggcguccuccagaccuucaugcgcauggccuggggcggcuccuacaucgcccucgacuccggcaagggcaacugggacugcaucaugaccuccuaccaguaccucaucauccagaacaccaccugggaggaccacugccaguucucccgccccucccccaucggcuaccucggccuccucucccagcgcacccgcgacaucuacaucucccgccgccuccucggcaccuucaccuggacccucuccgacuccgagggcaacgacgcccccggcggcuacugccucacccgcuggaugcucaucgaggccgagcucaagugcuucggcaacaccgccaucgccaagugcaacgagaagcacgacgaggaguucugcgacaugcuccgccucuucgacuucaacaagcaggccaucaagcgccucaaggccgaggcccagauguccauccagcucaucaacaaggccgucaacgcccucaucaacgaccagcucaucaugaagaaccaccuccgcgacaucaugggcauccccuacugcaacuacuccaaguacugguaccucaacaacaccgucaccggcaaguccucccuccccaagugcuggcucgucuccaacggcuccuaccucaacgagacccacuucuccgacgacaucgagcagcaggccgacaacaugaucaccgagaugcuccagaaggaguacauggaccgccagggcaagaccccccucggccucgucgaccucuucgucuucuccaccuccuucuaccucaucuccaucuuccuccaccucgucaagauccccacccaccgccacaucaccggcaagcccugccccaagccccaccgccucaaccacaugggcaucugcuccugcggccucuacaagcagcccggcguccccgucaaguggaagcgcuga

SEQ ID NO: 1017 - RNA, 1476 nt, Artificial Sequence
  derived and/or modified protein sequence (opt3) from LASV(Josiah;Clade IV)__NP_694870__GPC
augggccagaucgugaccuucuuucaagaggucccccacguuauugaagaggugaugaacauaguacugaucgcccucagcgugcuugcuguccugaagggguuguacaauuucgcaacaugcggauuagugggucugguuacuuuucuacuccuguguggcagauccugcacgaccucucuuuauaaagggguguacgaacugcagacauuggagcucaacauggaaacucugaauaugaccaugccucugucauguacaaagaacaauagucaucacuauauuauggucggaaacgagaccggccucgaguuaacucugacaaauaccagcaucauuaaccauaaauucugcaaucuuuccgacgcccacaagaaaaacuuguacgaucaugcgcugaugucuaucauaucgacguuucaccuaucaaucccaaauuucaaccaguaugaagcuaugagcugugacuuuaauggugggaagauuagugugcaguacaaccucucccacucuuaugccggagaugcagccaaucauugcggcacuguagcuaacggcguucugcaaaccuucaugaggauggcauggggagggagcuacaucgcccuugacuccggucggggcaacugggauuguauuaugacaucauaccaguaucugaucauacagaauacuaccugggaggaccacugccaguuuagucgcccgagccccauuggguacuugggacuccugucucaacgaacacgugauaucuauauuuccagaagguuacugggcaccuucacguggacucucucagacagcgaagguaaggauacaccugggggauacugucuuacccgguggaugcugaucgaggcugaguugaaaugcuuuggcaacacugccguggcgaaguguaaugaaaaacaugacgaggaguucugcgauaugcuacgccuguuugacuucaacaagcaggcaauccagagacucaaagccgaagcucagaugaguauucaacugauaaauaaggccgucaacgcacuuaucaaugaucagcugauuaugaagaaccacuugagggacaucaugggcauaccauauugcaauuacucuaaauauugguaccucaaccacacaaccacggggcggaccucccugcccaaguguugguuagugagcaauggaucguaccugaacgaaacacauuucucugacgauauugagcagcaagcugacaauaugaucacugagaugcuacagaaagaauauauggagcgccaggguaagaccccucucggccugguggaucuuuuugucuucuccacaucauuuuacuugaucaguauuuuccugcaccucguuaaaaucccaacucaucgacacauugugggaaagagcugccccaaaccucauagacugaaccacauggggauauguuccugcggccuuuauaagcagccagguguaccggugaaguggaaaagguga

SEQ ID NO: 1018 - RNA, 1473 nt, Artificial Sequence
  derived and/or modified protein sequence (opt3) from LASV(LP;Clade I)__AAF86701__GPC
augggccagaucauuaccuucuuucaagaggugccccacgucauagaagagguuaugaacaucgugcugauugcccucagccuucuggcuaucuugaagggguuauacaauauugcaacaugcggaaucauaggucugguagccuuccuauuucucuguggcaaauccugcucucugacucuuaaagggggauaugaacugcagacguuggagcucaacauggaaacccugaauaugacaaugccucugucauguacuaagaacaguagccaucacuacaucagagugggcaaugagaccggucucgaguuaacacugaccaacacuuccauuaucaaucauaaguucugcaaccuuucugacgcgcacaaaaagaauuuguaugaucaugcucugaugucgauuaucucaacauuucaccuaagcauaccaaacuucaaucaguacgaagccaugaguugugacuuuaacgggggaaagauuuccguccaguauaaucucucucacagcuacgcaggcgaugccgcugagcauugcggcaccguggcaaacgggguucugcaaacguucaugaggauggccuggggaggucgguauaucgcucuugacuccggcaaagggaauugggauuguauuaugacuucauaccaguaccugaucauccagaacaccacaugggaagaccacugccaguuuagucgcccgagccccauuggauauuugggccuccugucucaacgaacucgugauauauacaucuccagaagguuacuggguaccuucacauggacccucucagacagcgaggggaacgagacgccuggaggcuauugucuuacucgguggaugcugauugaagccgaguugaagugcuuuggcaauacagcgguggcaaaauguaacgaaaagcaugaugaggaguucugcgacaugcuacgccuguuugauuucaauaaacaggccaucagaaggcucaaggcugaagcccagaugaguauacagcugauuaacaaggcagucaaugcucuuaucaacgaccaacugaucaugaaaaaucacuugcgggauauuauggggaucccauacugcaacuauucuaaguacugguaucucaaucacaccuccagcggacgcacuucgcugcccaaauguugguuaauuucuaacgguuccuaccugaaugagacacaguucucagacgacauagaacagcaagccgauaacaugaucaccgagaugcuacagaaggaauacauugagcgacagggcaaaacgccucucgggcugguggacaucuuuaucuucaguaccagcuuuuaucuuauuuccauauucuugcaucugaucaagauuccaacacacagacauaucguaggaaaacccugcccuaagccacacaggcucaaucauaugggcguuuguucuugcggucuguacaagcacccgggggugcccacuaaauggaagcgguga

SEQ ID NO: 1019 - RNA, 1473 nt, Artificial Sequence
  derived and/or modified protein sequence (opt3) from LASV(803213;Clade II)__AAF86703__GPC
augggccagaucauuaccuucuuucaagaggugccccacgucauagaagagguuaugaacaucgugcugauugcccucagccuucuggcuaucuugaaggggauuuacaauguagcaacaugcggauuauucggucugaucuccuuucuacuccuguguggcagaucuugcucagugacuuauaaaggggucuacgaacuucagacgcuggaguugaacauggccaaucucaacaugaccaugccucugaguuguacaaagaauaacagccaucacuauauaauggugggaaaugaaacuggccuggagcucaccuuaacaaacaccuccaucauuaaucauaaauucugcaaccugucugacgcgcacaagaaaaaucuuuacgaucaugcuuugaugucgaucauuucaacuuuucaccugagcaucccaaacuucaaucaguaugaggccaugaguugugacuuuaacggugggaagauauccguucaguacaaucuaucucacagcuucgcaguggaugccgcuaaccauugcggaacaauugcaaacggcguccuccaaaccuuuaugaggauggccuggggcggguccuauaucgcucuggacucaggaaaggguaauugggauuguauuaugacgaguuaccaguaccuuaucauccagaacacuaccugggaagaccacugccaguucagccggccgucucccauuggcuaucugggguugcucucccaacgcacacgagauauauacaucucacguagacuguuaggaacuuuuaccuggacacugagcgacagugagggcaaugaagccccugguggguauugucucaccagguggaugcuuauugaggcggagcugaaaugcuucggaaacacggcaguggccaaguguaaugaaaaacaugaugaggaauuuugcgacauguugcggcuauucgauuucaacaagcaggcuaucaaacgccugaagacugaggcccagaugucuauacagcucauuaauaaggcaguaaacgcucugaucaaugaccaacuuaucaugaaaaaccaccugagagauauuaugggcaucccauacugcaauuauuccagguacugguauuugaaccacacaguuaccggcaagacuagccucccccgguguuggcuggugucgaaugggucuuacuuaaacgaaacacauuuuuccgacgacauugagcagcaggccgauaauaugauaaccgagaugcugcaaaaagaauacauggaccgccagggaaagacgccucuaggucucgucgaucuguucguguuuucaaccaguuucuaucuuaucagcaucuuuuugcaccuggugaaaauuccaacacaucgacacaucgucggcaagcccugcccuaaaccacauagacucaaccacauggggauuuguuccugcggacuguacaagcacccgggcguucccgugaaguggaaaagguga

SEQ ID NO: 1020 - RNA, 1473 nt, Artificial Sequence
  derived and/or modified protein sequence (opt3) from LASV(GA391;Clade III)__CAA36645__GPC
augggccagaucgugaccuucuuucaagaggucccccacguuauugaagaggugaugaacauaguacugaucgcccucagcauucuugcuauccugaagggguuguacaauguggcaacaugcggauuaauuggucuggucacuuuccuacuccuguccggcagaucuuguucacuuaucuauaaagggacguacgaacugcagaccuuggagcucaacauggaaacacugaauaugacuaugccucugaguugcaccaagaacaauagccaucacuauauaagggugggaaacgagacaggccucgaguuaacccugacuaauacauccauccuuaaccauaaauuuuguaauuugucugacgcccacaagcggaaccuguacgaucauucgcuaaugucaauuaucagcaccuuccaccucaguauuccaaauuuuaaccaguaugaagcgauguccugcgacuucaauggugggaaaaucacgguucaguacaaccugucucacagcuuugcuguggaugccgcaggacauuguggcacucuugccaauggcguccugcaaaccuucaugcgcauggcuuggggaggguccuauauagcauuggacucaggucgaggcaacugggauugcauuaugacaaguuaccaguaccucaucauucagaacacuaccugggacgaucacugucaguuuagccguccgucucccaucggguaucugggauuacugucccaaagaacaagggacaucuacauuucacggcgccuccuuggcaccuucacguggacucugagcgauagugaggguaaugaaacaccugggggauauugcuugaccagauggaugcuaauagaggccgagcugaaguguuuuggcaacacugcuguggccaagugcaaugaaaaacaugacgaggaguucugugauaugcucaggcuguuugacuucaacaagcaggcgauccggcgccuuaaaacagaagcacagaugucuauucagcugaucaauaaggccguaaacgcuuugauaaaugaucaacucauuaugaaaaaccaucugcgagacaucaugggcaucccauacugcaauuauuccagauacugguauuuaaaccacaccagcacggggaagaccucgcugcccaggugcuggcuaauuucuaauggauccuaccucaacgaaacaaaguucucagacgauaucgagcagcaggccgacaauaugauuacugagaugcugcaaaaagaauacauagaucggcaggguaagaccccucuuggcuugguugaccuguuuguguucaguacuagcuuuuaucucaucuccauuuuccugcaccuugucaaaaucccaacacaccgucauaucguggggaagcccuguccuaaaccacaccgccugaaccauaugggaauuugcucuuguggcuuguacaagcagccgggugugcccgucagauggaaaagguga

SEQ ID NO: 1021 - RNA, 1476 nt, Artificial Sequence
  derived and/or modified protein sequence (opt3) from LASV(AV;Clade V)__CCA30314__GPC
augggccagaucgugaccuucuuucaagaggucccccacguuauugaagaggugaugaacauaguacugaucgcccucagcauucuugcugugcugaagggguuguacaauaucgcaacaugcggauuaauuggucugaucacuuuccuacuccuguguggcagauccugcagcucaaaccuuuauaaaggggucuacgaacugcagaguuuggaccucaauauggagacgcugaacaugaccaugccucugagcuguacaaagaauaacucccaucacuauauaagggugggaaaugauacuggccucgaauuaacccugacaaacaccucuauccuuaaucauaaauuuugcaacuugucggacgcccacaagaaagaucuguacgaccaugcgcuaaugucaauuaucagcacuuuccaccucaguauuccaaauuuuaaccaguaugaggcuauguccugugauuucaauggugggaagaucucuguucaguacaaccugagccacuccuaugccauagacgcagccaaucauugcggaacaguggcuaacggcauucuucaaaccuuuaugcggauggcauggggcgggucauacaucgcccuggauaguggacgcgguaacugggacuguauuaugacgagcuaccaguauuugaucauccagaauacuaccugggagaaccacugccaguucucucgaccgucccccauuggcuaccucgggcuguuaucacaacguacaagagauauauauaucagcaggcggcugcucggaacuuuuaccuggacacuuagugacucugaaggcaaugcuaccccugguggguacugucugacgcgcuggauguugauugaggccgaacuaaagugcuucggaaacacugcggucgcaaaauguaaugagaagcaugaugaggaauuuugcgacaugcugagacucuucgauuuuaacaaacaggccaucuccaggcugaagucugaggcucagaugucgauacagcuuauuaauaaagccgugaacgcacugaucaaugaccaauugaucaugaagaaccaccuccgggacauuaugggcaucccauauugcaauuacucuaaguauugguaccugaaccacacaauuaccggcaaaacuuccuuacccaaguguuggcugguaucaaaugggaguuaccuaaacgaaacacauuucagcgaugacauagagcagcaggcugauaauaugaucaccgaaaugcuccaaaaagaguauauggagcgccagggaaagacgccucugggucuuguugacuuguucguguuuuccaccucuuucuaccugauuagcaucuuucuccgacuggucaaaaucccaacacacagacauauugugggcaagcccugcccuaaaccacacaggcuuaaccauauggggauauguucaugcggacuguauaagcagccgggcgugcccguccgguggaagcguuga

SEQ ID NO: 1022 - RNA, 1473 nt, Artificial Sequence
  derived and/or modified protein sequence (opt3) from LASV(Togo/2016/7082;Clade VI)__AMR44577__GPC
augggccagaucauuaccuucuuucaagaggugccccacgucauagaagagguuaugaacaucgugcugauugcccucagccuucuggcuaucuugaaggggguauacaauguggcaacaugcggaauuaucgguuuagucacuuuccuguuucuauguggcagauccugcucucucauauauaaagggucauacgaacugcagacgcuugagcugaacauggaaaccuugaauaugacaaugccucucaguuguacuaagaacagcucccaucacuauaucagggugggaaaugagaccggccuggagcugacacucaccaacacuucuauuaucaaucauaaauucugcaacuuaucggacgcccacaagcggaaucuguacgaucaugcgcuuaugucaauuuugagcacauuucaccugaguaucccaaacuucaaucaguaugaagcuauguccugugacuuuaacggugggaaaauaucuguucaguacaaucuaagccacgccuaugcaguggaugccgcugagcauugcggaaccgucgcaaacggcgugcuccaaacguucaugcgcauggccuggggcggguccuacauugcucuggacucaggacgagguaauugggauuguaucaugaccaguuaccaguaucuuauuauccagaacacuacaugggaagaccacugccaguuuagccguccgucucccaucggcuaccugggguugcucucccaaagaacuagggauauuuauauaucacggcgccuguuaggaaccuucacauggacccugagcgacagugagggcaacgagacgccugguggguacugucucacuagauggaugcuuaucgaagccgagcugaagugcuuuggaaauacagcgguagcaaaguguaacgaaaaacaugaugaggaguucugcgacauguugaggcuauuugauuucaauaagcaggccauucagcggcugaaaucugaagcucagauguccauccaacucauaaacaaggccguuaaugcacugauuaacgaccagcuuaucaugaaaaaucaucugcgcgauaugaugggcaucccauauugcaacuacagcaaguauugguacuugaaucacaccucgucuggccgaacuucccuccccaaguguuggcuggugucaaacgggaguuacuuaaaugagacacacuucagcgacgacauugaacagcaagcugauaacaugaucaccgagaugcugcagaaagaauauauugacagacagggaaagacgccucuaggucucgucgaucuguuuguguucuccaccucuuuuuaccuuauaagcaucuucuugcaccugauuaaaaucccaacacauaggcacaucgugggcaagcccugcccuaaaccacaucggcucaaucacauggggauuuguucaugcggacuguauaagcagccgggcguccccacucguuggaaacgcuga

SEQ ID NO: 1023 - RNA, 1473 nt, Artificial Sequence
  derived and/or modified protein sequence (opt3) from LASV(KAK-428;Clade n.d. (VII))__ANH09740__GPC
augggccagaucgugaccuucuuucaagaggucccccacguuauugaagaggugaugaacauaguacugaucgcccucagccuucuggcuauuuugaagggguuauacaauuucgcaacaugcggagugaucggucugauuacuuuucuacuccuguguggcagauccugcucugccacguauaaagggcaguacgaacuucagacccuggaguugaacauggaaucacucaauaugacaaugccucugaguuguacuaagaacaauagccaucacuauaucagggcgggaaacaauaccggccuggagcucacauuaaccaacacuuccauaaucucucauaaauucugcaaucugucggacgcucacaagaaaaaccuuuacgaucauacauugaugucaauuaucaccacguuucaccugagcauuccaaauuucaaccaguaugaggccaugaguugugacuuuaauggugggaagaucuccauacaauacaaccuaucucacagcuaugcaggagaugccgcucagcauugcggcacugucgcaaauggcgugcuccagaccuucaugcggauggccuggggaggguccuaccuggcucuugacucaggucgccgaggcugggauuguauuaucaguagcuaccaguaucugauuauccaaaacacaacuugggacgaucacugccaguuuucucguccgucccccaucggguacuugggauucguuucacagaagaccagagacauuuauauaagcaggcggcuccugggcacauuuaccuggacguuaagugauucugaaggucaugacaugccugggggauacugucugacucgcuggaugcucaucgaggccgaucuuaaaugcuucggcaacacagcgguggcaaaguguaaugaaaaacacgacgaggaguuuugcgauauguggagacuguucgacuucaacaagcaggccauucaaagguugaaagcugaagcccagaugaauauccagcuaauaaacaaggcagucaaugcucugauuaacgaccaacucaugaugaagaaucaucugcgggauaucaugggcaucccauauugcaacuacuccaaauuuugguaucuuaauaacaccacuacagggcgcaccagccugccccgauguugguugauuucgaauggaucuuaccucaacgagacgcacuucuccgacgauaucgaacagcaggccgacaauaugauuaccgagaugcugcagaaggaauacauggauagacaagguaaaacaccuuuaggccugguggaccuauuuguauucucaaccaguuuuuaucucauaacuaucuuccugcaccuuguuaagauuccaacacauaggcacaucguggggaaacccugcccuaagccacaucgguugaaccacaugggaaucuguagcugcggccuguacaaacagccggguguccccgugcguuggaagcgcuga

SEQ ID NO: 1024 - RNA, 1473 nt, Artificial Sequence
  derived and/or modified protein sequence (opt3) from LASV(Acar 3080;Clade I)__AAT49014__GPC
augggccagaucauuaccuucuuucaagaggugccccacgucauagaagagguuaugaacaucgugcugauugcccucagccuucuggcuaucuugaagggguuauacaauauugcaacaugcggaaucauaggucugguagccuuccuauuucucuguggcaaauccugcucucugacucuuaaagggggauaugaacugcagacguuggagcucaacauggaaacccugaauaugacaaugccucugucauguacuaagaacaguagccaucacuacaucagagugggcaaugagaccggucucgaguuaacacugaccaacacuuccauuaucaaucauaaguucugcaaccuuucugacgcgcacaaaaagaauuuguaugaucaugcucugaugucgauuaucucaacauuucaccuaagcauaccaaacuucaaucaguacgaagccaugaguugugacuuuaacgggggaaagauuuccguccaguauaaucucucucacagcuacgcaggcgaugccgcugagcauugcggcaccguggcaaacgggguucugcaaacguucaugaggauggccuggggaggucgguauaucgcucuugacuccggcaaagggaauugggauuguauuaugacuucauaccaguaccugaucauccagaacaccacaugggaagaccacugccaguuuagucgcccgagccccauuggauauuugggccuccugucucaacgaacucgugauauauacaucuccagaagguuacuggguaccuucacauggacccucucagacagcgaggggaacgagacgccuggaggcuauugucuuacucgguggaugcugauugaagccgaguugaagugcuuuggcaauacagcgguggcaaaauguaacgaaaagcaugaugaggaguucugcgacaugcuacgccuguuugauuucaauaaacaggccaucagaaggcucaaggcugaagcccagaugaguauacagcugauuaacaaggcagucaaugcucuuaucaacgaccaacugaucaugaaaaaucacuugcgggauauuauggggaucccauacugcaacuauucuaaguacugguaucucaaucacaccuccagcggacgcacuucgcugcccaaauguugguuaauuucuaacgguuccuaccugaaugagacacaguucucagacgacauagaacagcaagccgaucauaugaucaccgagaugcuacagaaggaauacauugagcgacagggcaaaacgccucucgggcugguggacaucuuuaucuucaguaccagcuuuuaucuuauuuccauauucuugcaccugaucaagauuccaacacauagacacaucguaggaaaacccugcccuaagccacauaggcucaaccacaugggcguuuguucuugcggucuguacaagcacccgggggugcccacuaaauggaagcgguga

SEQ ID NO: 1025 - RNA, 1473 nt, Artificial Sequence; identical to SEQ ID NO: 1018
  derived and/or modified protein sequence (opt3) from LASV(Pinneo-NIG-1969;Clade I)__AIT17836__GPC

SEQ ID NO: 1026 - RNA, 1473 nt, Artificial Sequence
  derived and/or modified protein sequence (opt3) from LASV(ISTH0009-NIG-2011;Clade II)__AIT17404__GPC
augggccagaucauuaccuucuuucaagaggugccccacgucauagaagagguuaugaacaucgugcugauugcccucagccuucuggcuaucuugaaggggauuuacaauguagcaacaugcggauuauucggucugguguccuuucuacuccuguguggcagaucuugcucaacuacguauaaaggggucuacgaacuucagacccuggaguuggacauggccagucucaacaugacaaugccucugagcuguacuaagaauaacucccaucacuauaucauggugggaaaugaaaccggccuggagcucacauuaaccaacacuucuauaaucaaucauaaauucugcaaccugucggaugcgcacaagaaaaaucuuuacgaccaugcuuugaugucaauuaucagcacauuucaccugaguauuccaaacuucaaucaguaugaggccauguccugugauuuuaacggugggaagaucucuguucaguacaaucuaagccacgcauaugccguggacgcugcaaaccauugcggaaccauagccaauggcguccuccaaacguucaugaggauggcuuggggcggguccuacauugcccuggauucaggaaaggguaguugggacuguaucaugacuagcuaccaguaucuuauuauccagaacaccacaugggaagaucacugccaguuuucucggccgucccccaucggcuaccugggguugcucucacaacgcacucgagacauuuauauaagccguagacuguuaggaaccuucacauggacccugagugauucugagggcaacgaaacgccugguggguacugucucacuagguggaugcuuaucgaggcggagcugaaaugcuuuggaaauacagcaguggccaaguguaacgaaaaacaugacgaggaguucugcgauauguugcggcuauuugacuucaauaagcaggcuauucgcagacugaaaaccgaagcccagauguccauccagcucauaaacaaggcaguaaaugcucugauuaacgaucaacuuaucaugaagaaucaccugagggacaucaugggcauuccauauugcaacuacagcaaauauugguacuugaaucacacuguuacaggcaagaccucgcucccccgguguuggcuggugucuaacggguccuacuuaaaugaaacgcauuucucagacgauaucgagcagcaggccgacaacaugauuaccgagcugcuacaaaaagaauauauggaucgccagggaaagacaccucucggucuggucgaccuuuuuguguucaguacuagcuuuuacuugauauccaucuuccugcaccucauuaaaaucccaacccaucgacacaucacaggcaagcccugcccuaaaccacauagacugaaucacauggggauuuguucuugcggacuuuauaagcacccgggcgugcccgucaaguggaaaagguga

SEQ ID NO: 1027 - RNA, 1473 nt, Artificial Sequence
  derived and/or modified protein sequence (opt3) from LASV(ISTH0012-NIG-2011;Clade II)__AIT17408__GPC
augggccagaucauuaccuucuuucaagaggugccccacgucauagaagagguuaugaacaucgugcugauugcccucagccuucuggcuaucuugaaggggauuuacaauguagcaacaugcggauuauucggucugguguccuuucuacuccuguguggcagaucuugcucaacuacguauaaaggggucuacgaacuucagacccuggaguuggacauggccagucucaacaugacaaugccucugagcuguacuaagaauaacucccaucacuauaucauggugggaaaugaaaccggccuggagcucacauuaaccaacacuucuauaaucaaucauaaauucugcaaccugucggaugcgcacaagaaaaaucuuuacgaccaugcuuugaugucaauuaucagcacauuucaccugaguauuccaaacuucaaucaguaugaggccauguccugugauuuuaacggugggaagaucucuguucaguacaaucuaagccacaccuaugcaguggacgccgcuaaccauugcggaacggucgcaaauggcgugcuccaaacuuucaugaggauggccuggggcggguccuacauagcucuggauucaggaaaggguaguugggacuguauuaugaccagcuaccaguaucuuaucauucagaacacaacuugggaagaucacugccaguuuucucggccgucccccaucggcuaccugggguugcucucacaacgcacccgagacaucuauauuagccguagacuguuaggaacauucaccuggacgcugagugauucugagggcaacgaaacuccugguggguacugucucacaagguggaugcuuauagaggccgagcugaaaugcuuuggaaauaccgcgguagcaaaguguaacgaaaaacaugacgaggaguucugcgauauguugcggcuauuugacuucaauaagcaggccauccgcagacugaaaacugaagcucagauguccauucagcucaucaacaaggccguuaaugcacugauaaacgaucaacuuauuaugaagaaucaccugagggacaucaugggcaucccauauugcaacuacagcaaauauugguacuugaaucacacagugaccggcaagacgucgcucccccgguguuggcuggucucuaacggguccuacuuaaaugaaacccauuucucagacgauauugagcagcaggcugacaacaugaucacagagcugcuacaaaaagaauauauggaucgccagggaaagacuccucucggucugguggaccuuuuuguguucaguaccagcuuuuacuugauuuccauauuccugcaccucgucaaaaucccaacacaucgacacguuauuggcaagcccugcccuaaaccacauagacugaaucacauggggaucuguucuugcggacuuuauaagcacccgggcgugcccguaaaguggaaaagguga

SEQ ID NO: 1028 - RNA, 1473 nt, Artificial Sequence
  derived and/or modified protein sequence (opt3) from LASV(ISTH0047-NIG-2011;Clade II)__AIT17412__GPC
augggccagaucauuaccuucuuucaagaggugccccacgucauagaagagguuaugaacaucgugcugauugcccucagccuucuggcuaucuugaaggggauuuacaauguagcaacaugcggauuauucggucugguguccuuucuacuccuguguggcagaucuugcucaacuacguauaaaggggucuacgaacuucagacccuggaguuggacauggccagucucaacaugacaaugccucugagcuguacuaagaauaacucccaucacuauaucauggugggaaaugaaaccggccuggagcucacauuaaccaacacuucuauaaucaaucauaaauucugcaaccugucggaugcgcacaagaaaaaucuuuacgaccaugcuuugaugucaauuaucagcacauuucaccugaguauuccaaacuucaaucaguaugaggccauguccugugauuuuaacggugggaagaucucuguucaguacaaucuaagccacgcauaugccguggacgcugcaaaccauugcggaaccauagccaauggcguccuccaaacguucaugaggauggcuuggggcggguccuacauugcccuggauucaggaaaggguaguugggacuguaucaugacuagcuaccaguaucuuauuauccagaacaccucuugggaagaucacugccaguuuucccggccgucacccaucggcuaccugggguugcucagccaacgcacacgagacauuuauauaagucguagacuguuaggaacuuucaccuggacacugucugauuccgagggcaacgaaaccccugguggguacugucucacgagguggaugcuuaucgaggcggagcugaaaugcuuuggaaauacugcaguggccaaguguaacgaaaaacaugacgaggaguucugcgauauguugcggcuauuugacuucaauaagcaggcuauucgcagacugaaaacagaagcccagaugagcauccagcucauaaacaaggcaguaaaugcucugauuaacgaucaacuuaucaugaagaaucaccugagggacaucaugggcauuccauauugcaacuacucgaaauauugguacuugaaucacaccguuacuggcaagacaucucucccccgguguuggcugguguccaacgggucauacuuaaaugaaacccauuucagugacgauaucgagcagcaggccgacaacaugauuacggagcugcuacaaaaagaauauauagaucgccagggaaagaccccucucggucuggucgaccuuuuuguguucagcacauccuuuuacuugaucucuauuuuccugcaccucgugaaaaucccaacucaucgacacgucaucggcaagcccugcccuaaaccacauagacugaaucacauggggauuuguagcugcggacuuuauaagcacccgggcguucccgugaaguggaaaagguga

SEQ ID NO: 1029 - RNA, 1473 nt, Artificial Sequence
  derived and/or modified protein sequence (opt3) from LASV(ISTH0073-NIG-2011;Clade II)__AIT17416__GPC
augggccagaucauuaccuucuuucaagaggugccccacgucauagaagagguuaugaacaucgugcugauugcccucagccuucuggcuaucuugaaggggauuuacaauguagcaacaugcggauuauucggucugguguccuuucuacuccuguguggcagaucuugcucaacuacguauaaaggggucuacgaacuucagacccuggaguuggacauggccagucucaacaugacaaugccucugagcuguacuaagaauaacucccaucacuauaucauggugggaaaugaaaccggccuggagcucacauuaaccaacacuucuauaaucaaucauaaauucugcaaccugucggaugcgcacaggaagaaucuuuacgaccaugcuuugaugucaauuaucagcacauuucaccugaguauuccaaacuucaaucaguaugaggccauguccugugauuuuaacggugggaaaaucucuguucaguacaaucuaagccacgcauaugccguggacgcugcaaaccauugcggaaccauagccaauggcguccuccaaacguucaugcggauggcuuggggcggguccuacauugcccuggauucaggaaaggguaguugggacuguaucaugacuagcuaccaguaucuuauuauccagaacaccucuugggaagaucacugccaguuuucccgcccgucacccaucggcuaccugggguugcucagccaacgaacacgugacauuuauauaaguagaaggcuguuaggaacuuucaccuggacacugucugauuccgagggcaacgaaaccccugguggguacugucucacgcgguggaugcuuaucgaggcggagcugaagugcuuuggaaauacugcaguggccaaauguaacgaaaagcaugacgaggaguucugcgauauguugcgccuauuugacuucaauaaacaggcuauuagaaggcugaagacagaagcccagaugagcauccagcucauaaacaaagcaguaaaugcucugauuaacgaucaacuuaucaugaagaaucaucugcgggacaucaugggcauuccauauugcaacuacucgaaguauugguacuugaaucacaccguuacuggcaaaacaucucucccccgcuguuggcugguguccaacgggucauacuuaaaugaaacccacuucagugacgauaucgagcagcaggccgacaacaugauuacggagcugcuacaaaaggaauauauagaucgacagggaaaaaccccucucggucuggucgaccuuuuuguguucagcacauccuuuuacuugaucucuauuuuccugcaccucgugaagaucccaacucauagacacgucaucggcaaacccugcccuaagccacauaggcugaaucacauggggauuuguagcugcggacuuuauaaacacccgggcguucccgugaaguggaagcgguga

SEQ ID NO: 1030 - RNA, 1473 nt, Artificial Sequence
  derived and/or modified protein sequence (opt3) from LASV(ISTH0230-NIG-2011;Clade II)__AIT17420__GPC
augggccagaucauuaccuucuuucaagaggugccccacgucauagaagagguuaugaacaucgugcugauugcccucagccuucuggcuaucuugaaggggauuuacaauguagcaacaugcggauuauucggucugguguccuuucuacuccuguguggcagaucuugcucaacuacguauaaaggggucuacgaacuucagacccuggaguuggacauggccagucucaacaugacaaugccucugagcuguacuaagaauaacucccaucacuauaucauggugggaaaugaaaccggccuggagcucacauuaaccaacacuucuauaaucaaucauaaauucugcaaccugucggaugcgcacaagaaaaaucuuuacgaccaugcuuugaugucaauuaucagcacauuucaccugaguauuccaaacuucaaucaguaugaggccauguccugugauuuuaacggugggaagaucucuguucaguacaaucuaagccacaccuaugcaguggacgccgcuaaccauugcggaacgauagcaaauggcguccuccaaacuuucaugaggauggccuggggcggguccuacauugcucuggauucaggaaaggguaguugggacuguaucaugaccagcuaccaguaucuuauuauccagaacacaacuugggaagaucacugccaguuuucucggccgucccccaucggcuaccugggguugcucucacaacgcacccgagacauuuauauaagccguagacuguuaggaacauucaccuggacgcugagugauucugagggcaacgaaacuccugguggguacugucucacaagguggaugcuuaucgaggccgagcugaaaugcuuuggaaauaccgcgguggcaaaguguaacgaaaaacaugacgaggaguucugcgauauguugcggcuauuugacuucaauaagcaggccauucgcagacugaaaacugaagcucagauguccauccagcucauaaacaaggccguaaaugcacugauuaacgaucaacuuaucaugaagaaucaccugagggacaucaugggcauuccauauugcaacuacagcaaauauugguacuugaaucacacaguuaccggcaagacgucgcucccccgguguuggcuggugucuaacggguccuacuuaaaugaaacccauuucucagacgauaucgagcagcaggcugacaacaugauuacagagcugcuacaaaaagaauauauggaucgccagggaaagacuccucucggucuggucgaccuuuuuguguucaguaccagcuuuuacuugauauccaucuuccugcaccucauuaaaaucccaacacaucgacacaucacuggcaagcccugcccuaaaccacauagacugaaucacauggggauuuguucuugcggacuuuauaagcacccgggcgugcccgucaaguggaaaagguga

SEQ ID NO: 1031 - RNA, 1473 nt, Artificial Sequence
  derived and/or modified protein sequence (opt3) from LASV(ISTH0531-NIG-2011;Clade II)__AIT17424__GPC
augggccagaucauuaccuucuuucaagaggugccccacgucauagaagagguuaugaacaucgugcugauugcccucagccuucuggcuaucuugaaggggauuuacaauguagcaacaugcggauuauucggucugguguccuuucuacuccuguguggcagaucuugcucaacuacguauaaaggggucuacgaacuucagacccuggaguuggacaugacaaaccucaauaugacuaugccucugaguuguaccaagaacaauagccaucacuauaucauggugggaaacgaaacaggccuggagcucaccuuaacuaauacauccauaaucaaccauaaauucugcaaucugucugaugcccacaagaaaaaccuuuacaaucaugcguugaugucgauuaucucaaccuuucaccugagcauuccaaacuucaaucaguaugaggcuaugaguugugacuuuaacggugggaagaucuccguucaguacaaucuaucucacgccuaugcaguggaugccgcuaaccauugcggaacgauagcaaacggcguccuccaaacuuucaugaggauggccuggggcgggagcuacauugcucuggacuccggaaaggguucaugggauuguaucaugaccaguuaccaguaucuuauuauccagaauacaacuugggaagaccacugccaguuuagccggccgucucccaucggcuaccugggguugcucucccaacgcacccgagauauuuauauaucacguagacuguuaggaacauucaccuggacgcugagcgacagugagggcaacgaaacuccugguggguacugucucacaagguggaugcuuaucgaggccgagcugaaaugcuuuggaaauaccgcgguggcaaaguguaacgaaaaacaugaugaggaguucugcgacauguugcggcuauuugauuucaauaagcaggccauucgcagacugaaaacugaagcucagacaaacauccagcucauaaauaaggccguaaacgcacugauuaaugaccaacuuaucaugaagaaccaccugagggauaucaugggcauuccauauugcaauuacucuaaauauugguacuugaaccacaccguuacgggcaagaccucccucccccgguguuggcuggugagcaaugggucguacuuaaacgaaacacauuucucugacgacaucgagcagcaggcugauaauaugauuacugagcugcuacaaaaagaauauauggaccgccagggaaagaccccucucggucuggucgaucuuuuuguguucuccacaucauuuuacuugauaaguaucuuccugcaccucgugaaaauuccaacucaucgacacaucaucggcaagcccugcccuaaaccacauagacugaaccacauggggauuuguagcugcggacuuuauaagcacccgggcguccccguuaaguggaaaagguga

SEQ ID NO: 1032 - RNA, 1473 nt, Artificial Sequence
  derived and/or modified protein sequence (opt3) from LASV(ISTH0595-NIG-2011;Clade II)__AIT17428__GPC
augggccagaucauuaccuucuuucaagaggugccccacgucauagaagagguuaugaacaucgugcugauugcccucagccuucuggcuaucuugaaggggauuuacaauguagcaacaugcggauuauucggucugguguccuuucuacuccuguguggcagaucuugcucaacuacguauaaaggggucuacgaacuucagacccuggaguuggacauggccagucucaacaugacaaugccucugagcuguacuaagaauaacucccaucacuauaucauggugggaaaugaaaccggccuggagcucacauuaaccaacacuucuauaaucaaucauaaauucugcaaccugucggaugcgcacaagaaaaaucuuuacgaccaugcuuugaugucaauuaucagcacauuucaccugaguauuccaaacuucaaucaguaugaggccauguccugugauuuuaacggugggaagaucucuguucaguacaaucuaagccacaccuaugcaguggacgccgcuaaccauugcggaacgauagcaaauggcguccuccaaacuuucaugaggauggccuggggcggguccuacauugcucuggauucaggaaaggguaguugggacuguaucaugaccagcuaccaguaucuuauuauccagaacacaacuugggaagaucacugccaguuuucucggccgucccccaucggcuaccugggguugcucucacaacgcacccgagacauuuauauaagccguagacuguuaggaacauucaccuggacgcugagugauucugagggcaacgaaacuccugguggguacugucucacaagguggaugcuuaucgccgcggaccugaaaugcuuuggaaauaccgcaguggccaaguguaacgagaaacaugaugaggaguucugcgacauguugcggcuauuugauuucaauaagcaggcuauugaacgccugaaaacugaagcccagauguccauccagcucauaaacaaggcaguaaaugcucugauuaacgaccaacuuaucaugaagaaucaccugagagacaucaugggcauuccauauugcaacuacagcaaauauugguacuugaaucacacaguuaccggcaggacgucgcucccccgguguuggcuggugucuaacggguccuacuuaaaugagacccauuucucagaugacaucgaacagcaggccgauaacaugauuacagagcugcuacaaaaggaguauauggaccgccagggaaaaacuccucucggucuggucgaucuuuuuguguucaguaccagcuuuuacuugauauccaucuuccugcaccucgugcgaaucccaacacauagacacgucauuggcaagcccugcccuaaaccacauaggcugaaucacauggggaucuguucuugcggacuuuauaagcacccgggcguucccgugaaauggaagcgguga

SEQ ID NO: 1033 - RNA, 1473 nt, Artificial Sequence
  derived and/or modified protein sequence (opt3) from LASV(ISTH0964-NIG-2011;Clade II)__AIT17430__GPC
augggccagaucauuaccuucuuucaagaggugccccacgucauagaagagguuaugaacaucgugcugauugcccucagccuucuggcuaucuugaaggggauuuacaauguagcaacaugcggauuauucggucugguguccuuucuacuccuguguggcagaucuugcucaacuacguauaaaggggucuacgaacuucagacccuggaguuggacauggccagucucaacaugacaaugccucugagcuguacuaagaauaacucccaucacuauaucauggugggaaaugaaaccggccuggagcucacauuaaccaacacuucuauaaucaaucauaaauucugcaaccugucggaugcgcacaagaaaaaucuuuacgaccaugcuuugaugucaauuaucagcacauuucaccugaguauuccaaacuucaaucaguaugaggccauguccugugauuuuaacggugggaggaucucuguucaguacaaucuaagccacaccuaugcaguggacgccgcuaagcauugcggaacgauagcaaacggcguccuccaaacuuucaugcggauggccuggggcggguccuacauugcucuggauucaggaaaggguaguugggacuguaucaugaccagcuaccaguaucuuauuauccagaauacaacuugggaagaucacugccaguuuucucgcccgucccccaucggcuaccugggguugcucucacaacgaacccgugacauuuauauaagcagaaggcuguuaggaacauucaccuggacgcugagugauucugagggcaacgaaacuccugguggguacugucucacacgguggaugcuuaucgaggccgagcugaaaugcuuuggaaacaccgcgguggcaaaguguaaugaaaaacaugacgaggaguucugcgauauguugcgccuauuugacuucaacaagcaggccauuagaaggcugaaaacugaagcucagauguccauccagcucauaaauaaggccguaaacgcacugauuaaugaucaacuuaucaugaagaaccaucugcgggacaucaugggcauuccauauugcaauuacagcaaauauugguacuugaaccacacaguuaccggcaagacgucgcucccccgcuguuggcuggugucuaauggguccuacuuaaacgaaacccacuucucagacgauaucgagcagcaggcugacaauaugauuacagagcugcuacaaaaagaauauauagaucgacagggaaagacuccucucggucuggucgaccuuuuuguguucaguaccagcuuuuacuugaucuccauuuuccugcaccucgugaaaaucccaacacauagacacgucaucggcaagcccugcccuaaaccacauaggcugaaccacauggggauuuguucuugcggacuuuauaagcacccgggcguucccgugaaguggaaacgguga

SEQ ID NO: 1034 - RNA, 1473 nt, Artificial Sequence
  derived and/or modified protein sequence (opt3) from LASV(ISTH1038-NIG-2011;Clade II)__AIT17438__GPC
augggccagaucauuaccuucuuucaagaggugccccacgucauagaagagguuaugaacaucgugcugauugcccucagccuucuggcuaucuugaaggggauuuacaauguagcaacaugcggauuauucggucugguguccuuucuacuccuguguggcagaucuugcucaacuacguauaaaggggucuacgaacuucagacccuggaguuggacauggccaaccucaauaugacaaugccucugaguuguacuaagaacaauagccaucacuauaucagggugggaaacgaaaccggccuggagcucacauuaaccaauacuuccauaaucucucauaaauucugcaaccugucggaugcgcacaagaaaaaucuuuacgaccaugcuuugaugucaauuaucagcacauuucaccugaguauuccaaacuucaaucaguaugaggccauguccugugauuuuaacggugggaagaucucuguucaguacaaucuaagccacaccuaugcaguggacgccgcuaaccauugcggaacgauagcaaauggcguccuccaaacuuucaugcggauggccuggggcggguccuacauugcucuggauucaggaaaggguaguugggacuguaucaugaccagcuaccaguaucuuauuauccagaacacaacuugggaagaucacugccaguuuucucgcccgucccccaucggcuaccugggguugcucucacaacgaacccgugacauuuauauaagcagaaggcuguuaggaacauucaccuggacgcugagugauucugagggcaaagaaacuccugguggguacugucucacacgguggaugcuuaucgaggccgagcugaagugcuuuggaaacaccgcgguggcaaaauguaaugaaaagcaugacgaggaguucugcgauauguugcgccuauuugacuucaacaaacaggccauuagaaggcugaagacugaagcucagaugaauauccagcucauaaacaaggccguaaaugcacugauuaacgaucaacuuaucaugaaaaaucaucugcgggacaucaugggcauuccauauugcaacuacuccaaguauugguacuugaaucacacaguuaccggcaaaacgagccucccccgcuguuggcuggugucgaacgggucuuacuuaaaugaaacccacuucuccgacgauaucgagcagcaggcugacaacaugauuacagagcugcuacaaaaggaauauauagaucgacagggaaaaacuccucucggucuggucgaccuuuuuguguucucaaccaguuuuuacuugaucagcauuuuccugcaccucgugaagaucccaacacauagacacgucaucggcaaacccugcccuaagccacauaggcugaaucagauggggauuuguuccugcggacuuuauaagcagccgggcguucccgugaaauggaagcgguga

SEQ ID NO: 1035 - RNA, 1473 nt, Artificial Sequence
  derived and/or modified protein sequence (opt3) from LASV(ISTH1048-NIG-2011;Clade II)__AIT17442__GPC
augggccagaucauuaccuucuuucaagaggugccccacgucauagaagagguuaugaacaucgugcugauugcccucagccuucuggcuaucuugaaggggauuuacaauguagcaacaugcggauuauucggucugguguccuuucuacuccuguguggcagaucuugcucaacuacguauaaaggggucuacgaacuucagacccuggaguuggacauggccagucucaacaugacaaugccucugagcuguacuaagaauaacucccaucacuauaucauggugggaaaugaaaccggccuggagcucacauuaaccaacacuucuauaaucaaucauaaauucugcaaccugucggaugcgcacaggaagaaucuuuacgaccaugcuuugaugucaauuaucagcacauuucaccugaguauuccaaacuucaaucaguaugaggccauguccugugauuuuaacggugggaaaaucucuguucaguacaaucuaagccacgcauaugccguggacgcugcaaaccauugcggaaccauagccaauggcguccuccaaacguucaugcggauggcuuggggcggguccuacauugcccuggauucaggaaaggguaguugggacuguaucaugacuagcuaccaguaucuuauuauccagaacaccucuugggaagaucacugccaguuuucccgcccgucacccaucggcuaccugggguugcucagccaacgaacacgugacauuuauauaaguagaaggcuguuaggaacuuucaccuggacacugucugauuccgagggcaacgaaaccccugguggguacugucucacgcgguggaugcuuaucgaggcggagcugaagugcuuuggaaauacugcaguggccaaauguaacgaaaagcaugacgaggaguucugcgauauguugcgccuauuugacuucaauaaacaggcuauuagaaggcugaagacagaagcccagaugagcauccagcucauaaacaaagcaguaaaugcucugauuaacgaucaacuuaucaugaagaaucaucugcgggacaucaugggcauuccauauugcaacuacucgaaguauugguacuugaaucacaccguuacuggcaaaacaucucucccccgcuguuggcugguguccaacgggucauacuuaaaugaaacccacuucagugacgauaucgagcagcaggccgacaacaugauuacggagcugcuacaaaaggaauauauagaucgacagggaaaaaccccucucggucuggucgaccuuuuuguguucagcacauccuuuuacuugaucucuauuuuccugcaccucgugaagaucccaacucauagacacgucaucggcaaacccugcccuaagccacauaggauuaaucacauggggauauguagcugcggacuguauaaacacccgggcguucccgugaaguggaagcgguga

SEQ ID NO: 1036 - RNA, 1473 nt, Artificial Sequence
  derived and/or modified protein sequence (opt3) from LASV(ISTH1058-NIG-2011;Clade II)__AIT17446__GPC
augggccagaucauuaccuucuuucaagaggugccccacgucauagaagagguuaugaacaucgugcugauugcccucagccuucuggcuaucuugaaggggauuuacaauguagcaacaugcggauuauucggucugguguccuuucuacuccuguguggcagaucuugcucaacuacguauaaaggggucuacgaacuucagacccuggaguuggacauggccagucucaacaugacaaugccucugagcuguacuaagaauaacucccaucacuauaucauggugggaaaugaaaccggccuggagcucacauuaaccaacacuucuauaaucaaucauaaauucugcaaccugucggaugcgcacaagaaaaaucuuuacgaccaugcuuugaugucaauuaucagcacauuucaccugaguauuccaaacuucaaucaguaugaggccauguccugugauuuuaacggugggaagaucucuguucaguacaaucuaagccacaccuaugcaguggacgccgcuucccauugcggaacggucgcaaacggcgugcuccaaacuuucaugaggauggccuggggcgggucauacauagcucuggauaguggaaaggguagcugggacuguauuaugaccucuuaccaguaucuuaucauucagaauacaacuugggaagaucacugccaguuuucccggccgucacccaucggcuaccugggguugcucagccaacgcacccgagacaucuauauuagucguagacuguuaggaacauucaccuggacgcugucugauuccgagggcaacgaaacuccugguggguacugucucacaagguggaugcuuauagaggccgagcugaaaugcuuuggaaacaccgcgguagcaaaguguaaugaaaaacaugacgaggaguucugcgauauguugcggcuauuugacuucaacaagcaggccauccgcagacugaaaacugaagcucagaugagcauucagcucaucaauaaggccguuaacgcacugauaaaugaucaacuuauuaugaagaaccaccugagggacaucaugggcaucccauauugcaauuacucgaaauauugguacuugaaccacacagugaccggcaagacgucucucccccgguguuggcuggucuccaaugggucauacuuaaacgaaacccauuucagugacgauauugagcagcaggcugacaauaugaucacagagcugcuacaaaaagaauauauggaucgccagggaaagacuccucucggucugguggaccuuuuuguguucagcaccuccuuuuacuugauuucuauauuccugcaccucgucaaaaucccaacacaucgacacguuauuggcaagcccugcccuaaaccacauagacugaaccacauggggaucuguagcugcggacuuuauaagcacccgggcgugcccguaaaguggaaaagguga

SEQ ID NO: 1037 - RNA, 1473 nt, Artificial Sequence
  derived and/or modified protein sequence (opt3) from LASV(ISTH1064-NIG-2011;Clade II)__AIT17450__GPC
augggccagaucauuaccuucuuucaagaggugccccacgucauagaagagguuaugaacaucgugcugauugcccucagccuucuggcuaucuugaaggggauuuacaauguagcaacaugcggauuauucggucugguguccuuucuacuccuguguggcagaucuugcucaacuacguauaaaggggucuacgaacuucagacccuggaguuggacauggccagucucaacaugacaaugccucugagcuguacuaagaauaacucccaucacuauaucauggugggaaaugaaaccggccuggagcucacauuaaccaacacuucuauaaucaaucauaaauucugcaaccugucggaugcgcacaagaaaaaucuuuacgaccaugcuuugaugucaauuaucagcacauuucaccugaguauuccaaacuucaaucaguaugaggccauguccugugauuuuaacggugggaagaucucuguucaguacaaucuaagccacaccuaugcaguggacgccgcuaaccauugcggaacgauagcaaauggcguccuccaaacuuucaugaggauggccuggggcggguccuacauugcucuggauucaggaaaggguaguugggacuguaucaugaccagcuaccaguaucuuauuauccagaacacaacuugggaagaucacugccaguuuucucggccgucccccaucggcuaccugggguugcucucacaacgcacccgagacauuuauauaagccguagacuguuaggaacauucaccuggacgcugagugauucugagggcaacgaaacuccugguggguacugucucacaagguggaugcuuaucgaggccgagcugaaaugcuuuggaaauaccgcgguggcaaaguguaacgaaaaacaugacgaggaguucugcgauauguugcggcuauuugacuucaauaagcaggccauucgcagacugaaaacugaagcucagauguccauccagcucauaaacaaggccguaaaugcacugauuaacgaucaacuuaucaugaagaaucaccugagggacaucaugggcauuccauauugcaacuacagcaaauauugguacuugaaucacacaguuaccggcaagacgucgcucccccgguguuggcuggugucuaacggguccuacuuaaaugaaacccauuucucagacgauaucgagcagcaggcugacaacaugauuacagagcugcuacaaaaagaauauauagaucgccagggaaagacuccucucggucuggucgaccuuuuuguguucaguaccagcuuuuacuugaucuccauuuuccugcaccucgugaaaaucccaacacaucgacacaucauuggcaagcccugcccuaaaccacauagacugaaucacauggggauauguucuugcggacuuuauaagcacccgggcguccccguuaaguggaaaagguga

SEQ ID NO: 1038 - RNA, 1473 nt, Artificial Sequence
  derived and/or modified protein sequence (opt3) from LASV(ISTH1069-NIG-2011;Clade II)__AIT17454__GPC
augggccagaucauuaccuucuuucaagaggugccccacgucauagaagagguuaugaacaucgugcugauugccuucagccuccuugcuauccugaaggggauuuacaauguagcaacaugcggauuguuugguuuaguguccuuccugcuacucuguggcagaucuugcucaacuacguauaaaggggucuacgaacugcagacccuugagcuggacauggccaguuugaacaugacaaugccucucagcuguacuaagaauaacucccaucacuauaucauggugggaaaugaaaccggccuggagcugacacucaccaacacuucuauaaucaaucauaaauuuugcaacuuaucggaugcgcacaagaggaaucuguacgaccaugcucuuaugucaauuaucagcacauuccacuugaguauuccaaacuuuaaucaguaugaggccauguccugugauuucaacggugggaaaaucucuguucaguacaaucugagccacaccuaugcaguggacgccgcuggacauugcggcacgauagcaaacggcguccuacaaacuuuuaugcggauggccuggggaggguccuacauugcucucgauucagguaagggcaguugggacuguaucaugaccagcuaccaguaucugauuauccagaauacaacuugggaagaucacugccaguucucucgcccgucccccaucggguaccuuggacuguugucacaacgaacccgugacauuuauauaagcagaaggcuccugggcacauuuaccuggacguuaagugauucugaggguaacgaaacuccugggggauacugucugacacgguggaugcucaucgaggccgagcuuaagugcuucggcaacaccgcgguggcaaaauguaaugaaaagcaugacgaggaauuuugcgauaugcugcgcuuguucgacuucaacaaacaggccauuagaaggcuaaagacugaggcucagauguccauccagcugauaaauaaagccguaaacgcacucauuaaugaucaacugaucaugaagaaccaccuucgggacaucaugggcauuccauauugcaauuacagcaaguauugguaccugaaccacacaaucaccgggaaaacgucguugccccgcuguuggcucguuucuaauggauccuaccugaacgaaacccauuuuucagacgauauugagcagcaggcugacaauaugauaacagaguuacugcaaaaggaauauauggaucgacaggguaaaacuccucuaggccucguggaccuguucgucuuuaguaccagcuucuaccuuaucuccaucuuuuugcaccuggugaagauuccaacacauagacacaucauugggaaacccugcccuaagccacauaggcucaaccacaugggaauauguucuugcggccuguauaaacacccgggugugcccguccgguggaagcguuga

SEQ ID NO: 1039 - RNA, 1473 nt, Artificial Sequence
  derived and/or modified protein sequence (opt3) from LASV(ISTH1096-NIG-2012;Clade II)__AIT17458__GPC
augggccagaucauuaccuucuuucaagaggugccccacgucauagaagagguuaugaacaucgugcugauugcccucagccuucuggcuaucuugaaggggauuuacaauguagcaacaugcggauuauucggucugguguccuuucuacuccuguguggcagaucuugcucaacuacguauaaaggggucuacgaacuucagacccuggaguuggacauggccagucucaacaugacaaugccucugagcuguacuaagaauaacucccaucacuauaucauggugggaaaugaaaccggccuggagcucacauuaaccaacacuucuauaaucaaucauaaauucugcaaccugucggaugcgcacaagaaaaaucuuuacgaccaugcuuugaugucaauuaucagcacauuucaccugaguauuccaaacuucaaucaguaugaggccauguccugugauuuuaacggugggaagaucucuguucaguacaaucuaagccacaccuaugcaauagacgccgcuaaccauugcggaacgauugcaaauggcgugcuccaaacuuucaugaggauggccuggggcggguccuacaucgcucuggauucaggaaaggguaguugggacuguauuaugaccacauaccaguaucuuaucauccagaacacuaccugggaagaucacugccaguuuagccggccgucucccauuggcuaccugggguugcucucccaacgcacacgagacauauauaucucacguagacuguuaggaaccuucacguggacucugagcgauagugagggcaacgaaacaccugguggguacugucucaccagguggaugcuuauugaggccgagcugaaaugcuuuggaaauacugcggucgcaaaguguaacgaaaaacaugacgaggaguucugcgauauguugcggcuauuugacuucaauaagcaggccauccgcagacugaaaacagaagcucagaugucuauacagcucauuaacaaggccgugaaugcacugaucaacgaucaacuuaucaugaagaaucaccugagggacauuaugggcaucccauauugcaacuacuccaaauauugguacuugaaucacaccguaacgggcaagaccagccucccccgguguuggcugguuucgaacgggucuuacuuaaaugaaacacauuucuccgacgauauugagcagcaggcugacaacaugauaacugagcugcuacaaaaagaauauauggaucgccagggaaagaccccucucggucugguggaccuuuuugucuucucaacaaguuuuuacuugaucagcauuuuccugcaccucgugaaaaucccaacucaucgacacgugaucggcaagcccugcccuaaaccacauagacugaaucacauggggauuuguuccugcggacuuuauaagcacccgggcguccccguuaaguggaaaagguga

SEQ ID NO: 1040 - RNA, 1473 nt, Artificial Sequence
  derived and/or modified protein sequence (opt3) from LASV(ISTH1107-NIG-2012;Clade II)__AIT17462__GPC
augggccagaucauuaccuucuuucaagaggugccccacgucauagaagagguuaugaacaucgugcugauugcccucagccuucuggcuaucuugaaggggauuuacaauguagcaacaugcggauuauucggucugguguccuuucuacuccuguguggcagaucuugcucaacuacguauaaaggggucuacgaacuucagacccuggaguuggacauggccagucucaacaugacaaugccucugagcuguacuaagaauaacucccaucacuauaucauggugggaaaugaaaccggccuggagcucacauuaaccaacacuucuauaaucaaucauaaauucugcaaccugucggaugcgcacaagaaaaaucuuuacgaccaugcuuugaugucaauuaucagcacauuucaccugaguauuccaaacuucaaucaguaugaggccauguccugugauuuuaacggugggaagaucucuguucaguacaaucuaagccacgcauaugccguggacgcugcaaaccauugcggaaccauagccaauggcguccuccaaacguucaugaggauggcuuggggcggguccuacauugcccuggauucaggaaaggguaguugggacuguaucaugacuagcuaccaguaucuuauuauccagaacaccacaugggaagaucacugccaguuuucucggccgucccccaucggcuaccugggguugcucucacaacgcacucgagacauuuauauaagccguagacuguuaggaaccuucacauggacccugagugauucugagggcaacgaaacgccugguggguacugucucacuagguggaugcuuaucgaggcggagcugaaaugcuuuggaaauacagcaguggccaaguguaacgaaaaacaugacgaggaguucugcgauauguugcggcuauuugacuucaauaagcaggcuauucgcagacugaaaaccgaagcccagauguccauccagcucauaaacaaggcaguaaaugcucugauuaacgaucaacuuaucaugaagaaucaccugagggacaucaugggcauuccauauugcaacuacagcaaauauugguacuugaaucacacuguuacaggcaagaccucgcuccccaaauguuggcuggugucuaacggguccuacuuaaaugaaacgcauuucucagacgauaucgagcagcaggccgacaacaugauuaccgagcugcuacaaaaggaauauauagaucggcagggaaaaacaccucucggucuggucgaccuuuuuguguucaguacuagcuuuuacuugaucuccauuuuccugcaccucgugaagaucccaacccaucgccacgucaucggcaaacccugcccuaagccacaucgacugaaucacauggggauuuguucuugcggacuuuauaagcacccgggcguucccgugaaauggaagagauga

SEQ ID NO: 1041 - RNA, 1473 nt, Artificial Sequence
  derived and/or modified protein sequence (opt3) from LASV(ISTH1111-NIG-2011;Clade II)__AIT17466__GPC
augggccagaucauuaccuucuuucaagaggugccccaggucauagaagagguuaugaacaucgugcugauugcccucagccuucuggcuaucuugaaggggauuuacaauguagcaacaugcggauuauucggucugguguccuuucuacuccuguguggcagaucuugcucaacuacguauaaaggggucuacgaacuucagacccuggaguuggacauggccagucucaacaugacaaugccucugagcuguacuaagaauaacucccaccauuauaucauggugggaaaugaaaccggccuggagcucacauuaaccaaccagucuauaaucaaucacaaauucugcaaccugucggaugcgcauaagaaaaaucuuuacgaccacgcuuugaugucaauuaucagcacuuuucaucugaguauuccaaacuucaaucaauaugaggccauguccugugauuuuaacggugggaagaucucuguucaguacaaucuaagccacacauucgcaguggacgccgcuaaccacugcggaaccauagcaaauggcguccuccagacguuuaugaggauggccuggggcggguccuauauugcucuggauucaggacgggguaguugggacuguaucaugacuagcuaccaguaccuuauuauccaaaacaccacaugggaagaucauugccaguucucucgcccgucccccaucggcuaucugggguugcucucacagcgaacucgugacauuuacauaagcagaaggcuguuaggaaccuuuacauggacccugagugauucugagggcaacgaaacgccugguggguauugucucacucgguggaugcuuaucgaggccgagcugaagugcuucggaaauacagcgguggcaaaauguaacgaaaagcacgacgaggaauuuugcgauauguugcgccuauucgacuucaauaaacaggccauuagaaggcugaagaccgaggcucaaauguccauccagcucauaaacaaagccguaaaugcacugauuaacgaucagcuuaucaugaagaaucaucugcgggacaucaugggcauuccauacugcaacuauagcaaguacugguauuugaaucacacuaucacaggcaaaaccucgcucccccgcuguuggcugguuucuaacggguccuacuuaaaugaaacgcacuuuucagacgauauugagcaacaggcugacaacaugauaaccgagcugcuacagaaggaauacauggaucgacagggaaaaacaccucucggucugguggaccuuuucgucuuuaguacuagcuucuauuugaucuccauuuuucugcaucucgugaagaucccaacccacagacaugugaucggcaaacccugcccuaagccacacaggcugaaucauauggggauuuguucuugcggacuuuacaaacacccgggcguccccguuaaguggaagcgguga

SEQ ID NO: 1042 - RNA, 1473 nt, Artificial Sequence
  derived and/or modified protein sequence (opt3) from LASV(ISTH1121-NIG-2012;Clade II)__AIT17470__GPC
augggccagaucauuaccuucuuucaagaggugccccacgucauagaagagguuaugaacaucgugcugauugcccucagccuucuggcuaucuugaaggggauuuacaauguagcaacaugcggauuauucggucugguguccuuucuacuccuguguggcagaucuugcucaacuacguauaaaggggucuacgaacuucagacccuggaguuggacauggccagucucaacaugacaaugccucugagcuguacuaagaauaacucccaucacuauaucauggugggaaaugaaaccggccuggagcucacauuaaccaacacuucuauaaucaaucauaaauucugcaaccugucggaugcgcacaggaagaaucuuuacgaccaugcuuugaugucaauuaucagcacauuucaccugaguauuccaaacuucaaucaguaugaggccauguccugugauuuuaacggugggaaaaucucuguucaguacaaucuaagccacaccuaugcaguggacgccgcuaaccauugcggaacgauagcaaauggcguccuccaaacuuucaugcggauggccuggggcggguccuacauugcucuggauucaggaaaggguaguugggacuguaucaugaccagcuaccaguaucuuauuauccagaacacaacuugggaagaucacugccaguuuucucgcccgucccccaucggcuaccugggguugcucucacaacgaacccgugacauuuauauaagcagaaggcuguuaggaacauucaccuggacgcugagugauucugagggcaacgaaacuccugguggguacugucucacacgguggaugcuuaucgaggccgagcugaagugcuuuggaaauaccgcgguggcaaaauguaacgaaaagcaugacgaggaguucugcgauauguugcgccuauuugacuucaauaaacaggccauuagaaggcugaagacugaagcucagauguccauccagcucauaaacaaagccguaaaugcacugauuaacgaucaacuuaucaugaagaaucaucugcgggacaucaugggcauuccauauugcaacuacagcaaguauugguacuugaaucacacaguuaccggcaaaacgucgcucccccgcuguuggcuggugucuaacggguccuacuuaaaugaaacccacuucucagacgauaucgagcagcaggcugacaacaugauuacagagcugcuacaaaaggaauauauagaucgacagggaaaaacuccucucggucuggucgaccuuuuuguguucaguaccagcuuuuacuugaucuccauuuuccugcaccucgugaagaucccaacacauagacacgucaucggcaaacccugcccuaagccacauaggcugaaucacauggggauuuguucuugcggacuuuauaaacacccgggcguucccgugaaguggaagcgguga

SEQ ID NO: 1043 - RNA, 1473 nt, Artificial Sequence
  derived and/or modified protein sequence (opt3) from LASV(ISTH1129-NIG-2012;Clade II)__AIT17474__GPC
augggccagaucauuaccuucuuucaagaggugccccacgucauagaagagguuaugaacaucgugcugauugcccucagccuucuggcuaucuugaaggggauuuacaauguagcaacaugcggauuauucggucugguguccuuucuacuccuguguggcagaucuugcucaacuacguauaaaggggucuacgaacuucagacccuggaguuggacauggccagucucaacaugacaaugccucugagcuguacuaagaauaacucccaucacuauaucauggugggaaaugaaaccggccuggagcucacauuaaccaacacuucuauaaucaaucauaaauucugcaaccugucggaugcgcacaagaaaaaucuuuacgaccaugcuuugaugucaauuaucagcacauuucaccugaguauuccaaacuucaaucaguaugaggccauguccugugauuuuaacggugggaagaucucuauacaguacaaucuaagccacaccuaugcaguugacgccgcuaaccauugcggaacgauugcaaauggcgugcuccaaacuuucaugaggauggccuggggcggguccuacaucgcucuggauucaggaaaggguaguugggacuguauuaugaccagcuaccaguaucuuaucauccagaacacaacuugggaagaucacugccaguuuucucggccgucccccauuggcuaccugggguugcucucacaacgcacccgagacauauauaucagccguagacuguuaggaacauucaccuggacgcugagugauucugagggcaacgaaacuccugguggguacugucucacaagguggaugcuuauugaggccgagcugaaaugcuuuggaaauaccgcggucgcaaaguguaacgaaaaacaugacgaggaguucugcgauauguugcggcuauuugacuucaauaagcaggccauccgcagacugaaaacugaagcucagauguccauacagcucauuaacaaggccgugaaugcacugaucaacgaucaacuuaucaugaagaaucaccugagggacauuaugggcaucccauauugcaacuacagcaaauauugguacuugaaucacacaauuaccggcaagacgucgcucccccgguguuggcugguaucuaacggguccuacuuaaaugaaacccauuucucagacgauauagagcagcaggcugacaacaugaucacagagcugcuacaaaaagaauauauugaucgccagggaaagacuccucucggucugguugaccuuuuuguguucaguaccagcuuuuacuugaucuccaucuuccugcaccucgucaaaauuccaacacaucgacacauaacuggcaagcccugcccuaaaccacauagacugaaucacauggggaucuguucuugcggacuuuauaagcacccgggcgugcccgugagguggaagcgguga

SEQ ID NO: 1044 - RNA, 1473 nt, Artificial Sequence
  derived and/or modified protein sequence (opt3) from LASV(ISTH1137-NIG-2011;Clade II)__AIT17478__GPC
augggccagaucauuaccuucuuucaagaggugccccacgucauagaagagguuaugaacaucgugcugauugcccucagccuucuggcuaucuugaaggggauuuacaauguagcaacaugcggauuauucggucugguguccuuucuacuccuguguggcagaucuugcucaacuacguauaaaggggucuacgaacuucagacccuggaguuggacauggccagucucaacaugacaaugccucugagcuguacuaagaauaacucccaucacuauaucauggugggaaaugaaaccggccuggagcucacauuaaccaacacuucuauaaucaaucauaaauucugcaaccugucggaugcgcacaagaaaaaucuuuacgaccaugcuuugaugucaauuaucagcacauuucaccugaguauuccaaacuucaaucaguaugaggccauguccugugauuuuaacggugggaagaucucuguucaguacaaucuaagccacaccuaugcaguggacgccgcugaucauugcggaacgauagcaaacggcguccuccaaacuuucaugaggauggccuggggcggguccuacauugcucuggacucaggaaaggguaguugggauuguaucaugaccagcuaccaguaucuuauuauccagaauacaacuugggaagaccacugccaguuuucucggccgucccccaucggcuaccugggguugcucucacaacgcacccgagauauuuauauaagccguagacuguuaggaacauucaccuggacgcugagugacucugagggcaacgaaacuccugguggguacugucucacaagguggaugcuuaucgaggccgagcugaaaugcuuuggaaacaccgcgguggcaaaguguaaugaaaaacaugaugaggaguucugcgacauguugcggcuauuugauuucaacaagcaggccauuucccgccugaaaacugaagcucagaugagcauccagcucauaaauaaggccguaaacgcacugauuaaugaccaacuuaucaugaagaaccaccugagagacaucaugggcauuccauauugcaauuacucgaaauauugguacuugaaccacacaguuaccggcaagacgucucuccccagguguuggcugguguccaaugggucauacuuaaacgaaacccauuucagugaugacaucgagcagcaggcugauaauaugauuacagagaugcugcaaaaagaauauauagaccggcagggaaagacuccucuaggucucgucgaucuguuuguguucagcaccuccuuuuaccuuaucucuauuuucuugcaccuggugaaaaucccaacacaucgccacgucaucggcaagcccugcccuaaaccacaucgacucaaccacauggggauuuguagcugcggacuguauaagcacccgggcguucccgugaaguggaaaagauga

SEQ ID NO: 1045 - RNA, 1473 nt, Artificial Sequence
  derived and/or modified protein sequence (opt3) from LASV(ISTH2010-NIG-2012;Clade II)__AIT17482__GPC
augggccagaucauuaccuucuuucaagaggugccccacgucauagaagagguuaugaacaucgugcugauugcccucagccuucuggcuaucuugaaggggauuuacaauguagcaacaugcggauuauucggucugguguccuuucuacuccuguguggcagaucuugcucaacuacguauaaaggggucuacgaacuucagacccuggaguuggacauggccagucucaacaugacaaugccucugagcuguacuaagaauaacucccaucacuauaucauggugggaaaugaaaccggccuggagcucacauuaaccaacacuucuauaaucaaucauaaauucugcaaccugucggaugcgcacaagaaaaaucuuuacgaccaugcuuugaugucaauuaucagcacauuucaccugaguauuccaaacuucaaucaguaugaggccauguccugugauuuuaacggugggaagaucucuguucaguacaaucuaagccacgcauaugccguggacgcugcaaaccauugcggaaccauagccaauggcguccuccaaacguucaugaggauggcuuggggcggguccuacauugcccuggauucaggaaaggguaguugggacuguaucaugacuagcuaccaguaucuuauuauccagaacaucaccugggaagaucacugccaguuuucucggccgucccccauuggcuaccugggguugcucucacaacgcacacgagacauauauaucagccguagacuguuaggaacuuucaccuggacacugagugauucugagggcaacgaaaccccugguggguacugucucacgagguggaugcuuauugaggcggagcugaaaugcuuuggaaauacugcaguggccaaguguaacgaaaaacaugacgaggaguucugcgauauguugcggcuauuugacuucaauaagcaggcuauccgcagacugaaaacagaagcccagauguccauacagcucauuaacaaggcaguaaaugcucugaucaacgaucaacuuaucaugaagaaucaccugagggacauuaugggcaucccauauugcaacuacagcaaauauugguacuugaaucacaccguuacuggcaagacaucgcucccccgguguuggcuggugucuaacggguccuacuuaaaugaaacccauuucucagacgauauugagcagcaggccgacaacaugauaacggagcugcuacaaaaagaauauaucgaucgccagggaaagaccccucucggucuggucgaccuuuuuguguucaguacuagcuuuuacuugauuuccaucuuccugcaccucgugaaaaucccaacacaucgacacgucguuggcaagcccugcccuaaaccacauagacugaaucacauggggauuuguucuugcggacuuuauaagcacccgggcgugcccguaaaguggaaaagguga

SEQ ID NO: 1046 - RNA, 1473 nt, Artificial Sequence
  derived and/or modified protein sequence (opt3) from LASV(ISTH2016-NIG-2012;Clade II)__AIT17486__GPC
augggccagaucauuaccuucuuucaagaggugccccacgucauagaagagguuaugaacaucgugcugauugcccucagccuucuggcuaucuugaaggggauuuacaauguagcaacaugcggauuauucggucugguguccuuucuacuccuguguggcagaucuugcucaacuacguauaaaggggucuacgaacuucagacccuggaguuggacauggccagucucaacaugacaaugccucugagcuguacuaagaauaacucccaucacuauaucauggugggaaaugaaaccggccuggagcucacauuaaccaacacuucuauaaucaaucauaaauucugcaaccugucggaugcgcacaagaaaaaucuuuacgaccaugcuuugaugucaauuaucagcacauuucaccugaguauuccaaacuucaaucaguaugaggccauguccugugauuuuaacggugggaagaucucuguucaguacaaucuaagccacaccuaugcaguggacgccgcuaaccauugcggaacgauagcaaauggcguccuccaaacuuucaugaggauggccuggggcggguccuacauugcucuggauucaggaaaggguaguugggacuguaucaugaccagcuaccaguaucuuauuauccagaacacaacuugggaagaucacugccaguuuucucggccgucccccgugggcuaccugggguugcucucacaacgcacccgagacaucuauauuagccguagacuguuaggaacauucaccuggacgcugagugauucugagggcaacgaaacuccugguggguacugucucacaagguggaugcuuauagaggccgagcugaaaugcuuuggaaauaccgcgguagcaaaguguaacgaaaaacaugacgaggaguucugcgauauguugcggcuauuugacuucaauaagcaggccauccgcagacugaaaacugaagcucagauguccauucagcucaucaacaaggccguuaaugcacugauaaacgaucaacuuauuaugaagaaucaccugagggacaucaugggcaucccauauugcaacuacagcaaauauugguacuugaaucacacagugaccggcaagacgucgcucccccgguguuggcuggucucuaacggguccuacuuaaaugaaacccauuucucagacgauauugagcagcaggcugacaacaugaucacagagcugcuacaaaaagaauauauugaucgccagggaaagacuccucucggucugguggaccuuuuuguguucaguaccagcuuuuacuugauauccaucuuccugcaccucgucaaaauuccaacacaucgacacguuaucggcaagcccugcccuaaaccacauagacugaaucacauggggaucuguucuugcggacuuuauaagcacccgggcgugcccguaaaguggaaaagguga

SEQ ID NO: 1047 - RNA, 1473 nt, Artificial Sequence
  derived and/or modified protein sequence (opt3) from LASV(ISTH2020-NIG-2012;Clade II)__AIT17490__GPC
augggccagaucauuaccuucuuucaagaggugccccacgucauagaagagguuaugaacaucgugcugauuacacucagccuucuggccaucuugaaggggauuuacaauguagcuacuugcggauuauucggucugguguccuuucuacuccuguguggcagaucuugcucaacgaccuauaaaggggucuacgaacuucagacacuggaguuggacauggcaaaccucaauaugacuaugccucugaguuguaccaagaacaauagccaucacuauaucauggugggaaacgaaacaggccuggagcucaccuuaacuaauacauccauaaucaaccauaaauucugcaaucugucugaugcccacaagaaaaaccuuuacgaccaugcguugaugucgauuaucucaaccuuucaccugagcauuccaaauuucaaccaguaugaggcuaugaguugugauuuuaauggugggaagaucuccguucaguacaaccuaucucacacguucgccguggacgcagccaaucauugcggaacuauagcuaacggcguccuccaaaccuuuaugaggauggcauggggcgggagcuauauugcccuggauuccggaaaggguucaugggacuguaucaugacaaguuaccaguaccuuauuauccagaacacuaccugggaagaucacugccaguucagccggccgucucccaucggcuaucugggguugcucucccaacgcacacgagacauuuacauaucacguagacuguuaggaaccuuuacguggacucugagcgauagugagggcaaugaaacaccugguggguauugucucaccagguggaugcuuaucgaggcugagcugaaaugcuucggaaacacugccguggcgaaguguaaugaaaaacaugacgaggaauuuugcgauauguugcggcuauucgacuucaacaagcaggcaauucgcagacugaaaacagaggcccagaugucuauccagcucauaaauaaggcuguaaacgcccugauuaaugaucaacuuaucaugaagaaccaccugagggacaucaugggcauuccauacugcaauuauuccaaauacugguauuugaaccacaccguuacgggcaagaccagccucccccgguguuggcuggugucgaaugggucuuacuuaaacgaaacacauuuuuccgacgauaucgagcagcaggcagacaauaugauuacugagcugcuacaaaaagaauacauggaucgccagggaaagaccccucucggucuggucgaccuuuucguguuuucaacaaguuucuauuugauaagcaucuuucugcaccucgugaaaauuccaacucaucgacacaucaucggcaagcccugcccuaaaccacauagacugaaccacauggggauuuguuccugcggacuuuacaagcacccgggcguccccguuaaguggaaaagguga

SEQ ID NO: 1048 - RNA, 1473 nt, Artificial Sequence
  derived and/or modified protein sequence (opt3) from LASV(ISTH2025-NIG-2012;Clade II)__AIT17494__GPC
augggccagaucauuaccuucuuucaagaggugccccacgucauagaagagguuaugaacaucgugcugauugcccucagccuucuggcuaucuugaaggggguauacaauguggcaacaugcggauuauucggucuggucuccuuucuacuccuguguggcagaucuugcucaacuauuuauaaagggguguacgaacuucagacgcuggaguuggacauggccagucucaacaugaccaugccucugagcuguacaaagaauaacucccaucacuauaucaugguuggaaaugaaacuggccuggagcucaccuuaacaaacaccucuauaaucaaucauaaauucugcaaccugucggaugcgcacaagaaaaaucuuuacgaccaugcuuugaugucaauuaucagcacuuuucaccugaguauuccaaacuucaaucaguaugaggccauguccugugauuuuaacggugggaagaucucugugcaguacaaucuaagccacacauaugcagucgacgccgcuaaccauugcggaaccauagcaaauggcgugcuccaaacguucaugaggauggccuggggcggguccuacauugcucuggauucaggaaaggguaguugggacuguaucaugacuagcuaccaguaucuuauuauccagaacaccucuugggaagaucacugccaguuuucccggccgucacccaucggcuaccugggguugcucagccaacgcacacgagacauuuauauaagucguagacuguuaggaacuuucaccuggacacugucugauuccgagggcaacgaaaccccugguggguacugucucacgagguggaugcuuaucgaggccgagcugaaaugcuuuggaaauacugcgguagcaaaguguaacgaaaaacaugacgaggaguucugcgauauguugcggcuauuugacuucaauaagcaggccauucgcagacugaaaacagaagcucagaugagcauccagcucauaaacaaggccguuaaugcacugauuaacgaucaacuuaucaugaagaaucaccugagggacaucaugggcauuccauauugcaacuacucgaaauauugguacuugaaucacaccgugacuggcaagacaucucucccccgguguuggcuggucuccaacgggucauacuuaaaugaaacccauuucagugacgauaucgagcagcaggcugacaacaugauuacggagcugcuacaaaaagaauauauagaucgccagggaaagaccccucucggucugguggaccuuuuuguguucagcacauccuuuuacuugaucucuauuuuccugcaccucgucaaaaucccaacucaucgacacguuaucggcaagcccugcccuaaaccacauagacugaaucacauggggauuuguagcugcggacuuuauaagcacccgggcgugcccguaaaguggaaaagguga

SEQ ID NO: 1049 - RNA, 1473 nt, Artificial Sequence
  derived and/or modified protein sequence (opt3) from LASV(ISTH2031-NIG-2012;Clade II)__AIT17498__GPC
augggccagaucauuaccuucuuucaagaggugccccacgucauagaagagguuaugaacaucgugcugauugcccucagccuucuggcuaucuugaaggggauuuacaauguagcaacaugcggauuauucggucugguguccuuucuacuccuguguggcagaucuugcucaacuacguauaaaggggucuacgaacuucagacccuggaguuggacauggccagucucaacaugacaaugccucugagcuguacuaagaauaacucccaucacuauaucauggugggaaaugaaaccggccuggagcucacauuaaccaacacuucuauaaucaaucauaaauucugcaaccugucggaugcgcacaagaaaaaucuuuacgaccaugcuuugaugucaauuaucagcacauuucaccugaguauuccaaacuucaaucaguaugaggccauguccugugauuuuaacggugggaagaucucuguucaguacaaucuaagccacaccuaugcaguggacgccgcuaaccauugcggaacgauagcaaauggcguccuccaaacuuucaugaggauggccuggggcggguccuacauugcucuggauucaggaaaggguaacugggacuguaucaugaccaguuaccaguaucuuauuauccagaacacaacuugggaagaucacugccaguuuagccggccgucucccaucggcuaccugggguugcucucccaacgcacccgagacauuuauauaucacguagacuguuaggaacauucaccuggacgcugagcgauagugagggcaaugaaacuccugguggguacugucucacaagguggaugcuuaucgagaccgagcugaaaugcuuuggaaacacugccguggcgaaguguaaugaaaaacaugacgaggaguucugcgauauguugcggcuauuugacuucaacaagcaggcaauuucucgccugagauccgaagcccagaugagcauccagcucauaaauaaagcuguaaacgcccugauuaaugaucaacuuaucaugaagaaccaccugagggacaucaugggcauuccauauugcaauuacucgaaguauugguacuugaaccacacaguuaccggcaaaacgucucuccccaaguguuggcugguguccaaugggucauacuuaaacgaaacccauuucagugacgauaucgagcagcaggcagacaauaugauuacagagaugcugcaaaaagaauauauagaucggcagggaaagacuccucuaggucucgucgaccuguuuguguucagcaccuccuuuuaccuuaucucuauuuucuugcaccuggugaaaaucccaacacaucgccacaucacuggcaagcccugcccuaaaccacaucgacucaaccacauggggauuuguagcugcggacuguauaagcacccgggcguccccguuaaguggaaaagauga

SEQ ID NO: 1050 - RNA, 1473 nt, Artificial Sequence
  derived and/or modified protein sequence (opt3) from LASV(ISTH2037-NIG-2012;Clade II)__AIT17502__GPC
augggccagaucauuaccuucuuucaagagauaccccacgugaucgaagaggucaugaacauuguucugaucacacucagccuucuggccauuuugaaggggaucuacaauguggcuacuugcggauuauucggucugguauccuuucuacuccuguguggcaaaucuugcucaacgaccuauaaggggguguacgaacuucagacacuggaguuggacauggcaagucucaacaugacuaugccucugagcuguaccaaaaauaacucccaucacuauauaauggucggaaaugaaacaggccuggagcucaccuuaacuaacacaucuaucauuaaucauaaguucugcaaccugucggaugcccaccggaaaaaucuuuacgaccauaccuugaugucaaucauuagcacguuucaccugaguaucccaaacuucaaucaguaugaggcgauguccugugauuuuaacggugggaagauaucugugcaguacaaucuaagccacgcuuaugccauugacgcagccacucauugcggaaccaucgcuaacggcguucuccaaacauucaugaggauggcauggggcggguccuacauugcccuggauucaggaaaggguggcugggacuguaucaugaccaguuaccaguaucuuaucauucagaauacuacaugggaagaucacugccaguuuagccggccgucucccauaggguaccugggauugcucucccaacgcacccgagacaucuauauuucacguagacuguuaggcacguucacuuggacacugagcgauagugaggguaacgaaaccccugggggauacugucucacuagguggaugcuuaucgaggcugagcugaaaugcuuuggcaacacagccguggcgaaguguaaugaaaaacaugacgaggaguucugcgauauguugcggcuauuugacuucaacaagcaggcaauacgcagacugaaaaccgaagcccagaugucuauucagcucaucaauaaggcugucaacgcccugaucaaugaucaacuuauuaugaggaaccaccugagagacaucaugggcauuccauauugcaauuacuccaaguauugguacuugaaccacacggugaccgggaaaacaagccuccccaaguguuggcugguaucgaauggaucuuacuuaaacgaaacucauuucuccgacgauauagagcagcaggcagacaauaugaucaccgagcugcuacaaaaagaauauauggaucgccaggguaagacaccucucggccugguugaccuuuuuguguucucaaccaguuuuuacuugauuagcaucuuccugcaccucgucaaaaucccaacucaucgacacgugauugggaagcccugcccuaaaccacauagacugaaccacaugggaguguguuccugcggccuuuauaagcacccggguguccccguuaaguggaaaagguga

SEQ ID NO: 1051 - RNA, 1473 nt, Artificial Sequence
  derived and/or modified protein sequence (opt3) from LASV(ISTH2042-NIG-2012;Clade II)__AIT17506__GPC
augggccagaucauuaccuucuuucaagaggugccccacgucauagaagagguuaugaacaucgugcugauugcccucagccuucuggcuaucuugaaggggauuuacaauguagcaacaugcggauuauucggucugguguccuuucuacuccuguguggcagaucuugcucaacuacguauaaaggggucuacgaacuucagacccuggaguuggacauggccagucucaacaugacaaugccucugagcuguacuaagaauaacucccaucacuauaucauggugggaaaugaaaccggccuggagcucacauuaaccaacacuucuauaaucaaucauaaauucugcaaccugucggaugcgcacaagaaaaaucuuuacgaccaugcuuugaugucaauuaucagcacauuucaccugaguauuccaaacuucaaucaguaugaggccauguccugugauuuuaacggugggaagaucucuguucaguacaaucuaagccacgcauaugccguggacgcugcagaacauugcggaaccauagccaacggcguccuccaaacguucaugaggauggcuuggggcggguccuacauugcccuggauucaggaaaggguaguugggacugugugaugacuagcuaccaguaucuuaucauucagaauaccacaugggaggaucacugccaguuuucucggccgucccccaucggcuaccugggguugcucucacaacgcacucgagacaucuauauuagccguagacuguuaggaaccuucacauggacccugagugauucugaaggcaacgagacgccugguggguacugucucacuagguggaugcuuauagaggcggaacugaaaugcuuuggaaacacagcaguagccaaguguaaugagaaacaugacgaagaguucugcgauauguugcggcuauuugacuucaacaagcaggcuaucgaacgccugaaaaccgaggcccagauguccauucagcucaucaauaaggcaguuaacgcucugauaaaugaucaacuuauuaugaagaaccaccugagagacaucaugggcaucccauauugcaauuacagcaaauauugguacuugaaccacacugugacaggcaagaccucgcuccccagguguuggcuggucucuaauggguccuacuuaaacgagacgcauuucucagacgauauugaacagcaggccgacaauaugaucaccgagaugcugcaaaaagaauauauugaucggcagggaaagacaccucuaggucucguggaccuguuuguguucaguacuagcuuuuaccuuauauccaucuucuugcaccuggucaaaauuccaacccaucgccacguuaucggcaagcccugcccuaaaccacaucgacucaaccacauggggaucuguucuugcggacuguauaagcacccgggcgugcccguaaaguggaaaagauga

SEQ ID NO: 1052 - RNA, 1473 nt, Artificial Sequence
  derived and/or modified protein sequence (opt3) from LASV(ISTH2046-NIG-2012;Clade II)__AIT17510__GPC
augggccagaucauuaccuucuuucaagaggugccccacgucauagaagagguuaugaacaucgugcugauugcccucagccuucuggcuaucuugaaggggauuuacaauguagcaacaugcggauuauucggucugguguccuuucuacuccuguguggcagaucuugcucaacuacguauaaaggggucuacgaacuucagacccuggaguuggacauggccagucucaacaugacaaugccucugagcuguacuaagaauaacucccaucacuauaucauggugggaaaugaaaccggccuggagcucacauuaaccaacacuucuauaaucaaucauaaauucugcaaccugucggaugcgcacaagaaaaaucuuuacgaccaugcuuugaugucaauuaucagcacauuucaccugaguauuccaaacuucaaucaguaugaggccauguccugugauuuuaacggugggaagaucucuguucaguacaaucuaagccacaccuaugcaguggacgccgcuaaccauugcggaacgauagcaaauggcguccuccaaacuuucaugaggauggccuggggcggguccuacauugcucuggauucaggaaaggguaguugggacuguaucaugaccagcuaccaguaucuuauuauccagaacacaacuugggaagaucacugccaguuuucucggccgucccccaucggcuaccugggguugcucucacaacgcaccaaagacauuuauauaagccgacgucuguuaggaacauucaccuggacgcugagugauucugagggcaacgaaacuccugguggguacugucucacaagauggaugcuuaucgaggccgagcugaagugcuuuggaaauaccgcgguggcaaaauguaacgaaaagcaugacgaggaguucugcgauauguugaggcuauuugacuucaauaaacaggccauucggcgccugaagacugaagcucagauguccauccagcucauaaacaaggccguaaaugcacugauuaacgaucaacuuaucaugaaaaaucaccugagagacaucaugggcauuccauauugcaacuacagcaaguauugguacuugaaucacacaguuaccggcaaaacgucgcuccccagguguuggcuggugucuaacggguccuacuuaaaugaaacccauuucucagacgauaucgagcagcaggcugacaacaugauuacagagcugcuacaaaaggaauauauagaucggcagggaaaaacuccucucggucuggucgaccuuuuuguguucaguaccagcuuuuacuugaucuccauuuuccugcaccucgugaagaucccaacacaucgccacgucaucggcaaacccugcccuaagccacaucgacugaaucacauggggauuuguucuugcggacuuuauaagcacccgggcguucccgugaaauggaagagauga

SEQ ID NO: 1053 - RNA, 1473 nt, Artificial Sequence
  derived and/or modified protein sequence (opt3) from LASV(ISTH2050-NIG-2012;Clade II)__AIT17514__GPC
augggccagaucauuaccuucuuucaagaggugccccacgucauagaagagguuaugaacaucgugcugauugcccucagccuucuggcuguauugaaggggaucuacaauguggcaacaugcggauuauucggucuggucuccuuucuacuccuguguggcagaucuugcucaacuacguauaaagggguguacgaacuucagacccuggaguuggacauggccagucucaacaugacaaugccucugagcuguacuaagaauaacucccaucacuauauuaugguuggaaaugaaaccggccuggagcucacauuaaccaacacuucuaucauaaaucauaaauucugcaaccugucggaugcgcacaagaaaaaucuuuacgaccaugcuuugaugucaaucauuagcacauuucaccugaguaucccaaacuucaaucaguaugaggccauguccugugauuuuaacggugggaagauuucugugcaguacaaucuaagccacaccuaugcagucgacgccgcuaaccauugcggaacgaucgcaaauggcgugcuccaaacuuucaugaggauggccuggggcggguccuacauagcucuggauucaggaaaggguaguugggacuguauuaugaccagcuaccaguaucuuaucauucagaacacaacuugggaagaucacugccaguuuucucggccgucccccaucggcuaccugggguugcucucacaacgcacccgagacaucuauauuagccguagacuguuaggaacauucaccuggacgcugagugauucugagggcaacgaaacuccugguggguacugucucacaagguggaugcuuauagaggccgagcugaaaugcuuuggaaauaccgcgguagcaaaguguaacgaaaaacaugacgaggaguucugcgauauguugcggcuauuugacuucaauaagcaggccauccgcagacugaaaacugaagcucagauguccauucagcucaucaacaaggccguuaaugcacugauaaacgaucaacuuauuaugaagaaucaccugagggacaucaugggcaucccauauugcaacuacagcaaauauugguacuugaaucacacagugaccggcaagacgucgcucccccgguguuggcuggucucuaacggguccuacuuaaaugaaacccauuucucagacgauauugagcagcaggcugacaacaugaucacagagcugcuacaaaaagaauauauugaucgccagggaaagacuccucucggucugguggaccuuuuuguguucaguaccagcuuuuacuugauauccaucuuccugcaccucgucaaaauuccaacacaucgacacguuaucggcaagcccugcccuaaaccacauagacugaaucacauggggaucuguucuugcggacuuuauaggcacccgggcgugcccguaaaguggaagcgguga

SEQ ID NO: 1054 - RNA, 1473 nt, Artificial Sequence
  derived and/or modified protein sequence (opt3) from LASV(ISTH2057-NIG-2012;Clade II)__AIT17518__GPC
augggccagaucauuaccuucuuucaagaggugccccacgucauagaagagguuaugaacaucgugcugauugcccucagccuucuggcuaucuugaaggggauuuacaauguagcaacaugcggauuauucggucugguguccuuucuacuccuguguggcagaucuugcucaacuacguauaaaggggucuacgaacuucagacccuggaguuggacauggccagucucaacaugacaaugccucugagcuguacuaagaauaacucccaucacuauaucauggugggaaaugaaaccggccuggagcucacauuaaccaacacuucuauaaucaaucauaaauucugcaaccugucggaugcgcacaagaaaaaucuuuacgaccaugcuuugaugucaauuaucagcacauuucaccugaguauuccaaacuucaaucaguaugaggccauguccugugauuuuaacggugggaagaucucuguucaguacaaucuaagccacgcauaugccguggacgcugcaaaccauugcggaaccauagccaauggcguccuccaaacguucaugaggauggcuuggggcggguccuacauugcccuggauucaggaaaggguaguugggacuguaucaugacuagcuaccaguaucuuauuauccagaacaccacaugggaagaucacugccaguuuucucggccgucccccaucggcuaccugggguugcucucacaacgcacucgagacauuuauauaagccguagacuguuaggaaccuucacauggacccugagugauucugagggcaacgaaacgccugguggguacugucucacuagguggaugcuuaucgaggcggagcugaaaugcuuuggaaauacagcaguggccaaguguaacgaaaaacaugacgaggaguucugcgauauguugcggcuauuugacuucaauaagcaggcuauucgcagacugaaaaccgaagcccagauguccauccagcucauaaacaaggcaguaaaugcucugauuaacgaucaacuuaucaugaagaaucaccugagggacaucaugggcauuccauauugcaacuacagcaaauauugguacuugaaucacacuguuacaggcaagaccucgcucccccgguguuggcuggugucuaacggguccuacuuaaaugaaacgcauuucucagacgauaucgagcagcaggccgacaacaugauuaccgagcugcuacaaaaagaauauauggaucgccagggaaagacaccucucggucuggucgaccuuuuuguguucaguacuagcuuuuacuugauauccaucuuccugcaccucgugaaaauuccaacccaucgacacgucaucggcaagcccugcccuaaaccacauagacugaaucacauggggaucuguucuugcggacuuuauaagcacccgggcguucccgugaaguggaaaagguga

SEQ ID NO: 1055 - RNA, 1473 nt, Artificial Sequence
  derived and/or modified protein sequence (opt3) from LASV(ISTH2064-NIG-2012;Clade II)__AIT17524__GPC
augggccagaucauuaccuucuuucaagaggugccccacgucauagaagagguuaugaacaucgugcugauugcccucagccuucuggcuaucuugaaggggauuuacaauguagcaacaugcggauuauucggucugguguccuuucuacuccuguguggcagaucuugcucaacuacguauaaaggggucuacgaacuucagacccuggaguuggacauggccagucucaacaugacaaugccucugagcuguacuaagaauaacucccaucacuauaucauggugggaaaugaaaccggccuggagcucacauuaaccaacacuucuauaaucaaucauaaauucugcaaccugucggaugcgcacaagaaaaaucuuuacgaccaugcuuugaugucaauuaucagcacauuucaccugaguauuccaaacuucaaucaguaugaggccauguccugugauuuuaacggugggaagaucucuguucaguacaaucuaagccacaccuaugcaauagacgccgcuaaccauugcggaacgauugcaaauggcgugcuccaaacuuucaugaggauggccuggggcggguccuacaucgcucuggauucaggaaaggguaguugggacuguauuaugaccagcuaccaguaucuuaucauccagaacacaacuugggaagaucacugccaguuuucucggccgucccccauuggcuaccugggguugcucucacaacgcacccgagacauauauaucagccguagacuguuaggaacauucaccuggacgcugagugauucugagggcaacgaaacuccugguggguacugucucacaagguggaugcuuauugaggccgagcugaaaugcuuuggaaauaccgcggucgcaaaguguaacgaaaaacaugacgaggaguucugcgauauguugcggcuauuugacuucaauaagcaggccauccgcagacugaaaacugaagcucagauguccauacagcucauuaacaaggccgugaaugcacugaucaacgaucaacuuaucaugaagaaucaccugagggacauuaugggcaucccauauugcaacuacagcaaauauugguacuugaaucacacaguaaccggcaagacgucgcucccccgguguuggcugguuucuaacggguccuacuuaaaugaaacccauuucucagacgauauugagcagcaggcugacaacaugauaacagagaugcugcaaaaagaauauauggaucgccagggaaagacuccucuaggucucguggaccuguuugucuucaguaccagcuuuuaccuuaucuccauuuucuugcaccuggugaaaaucccaacacaucgacacgugaucggcaagcccugcccuaaaccacauagacucaaucacauggggauuuguucuugcggacuguauaagcacccgggcguccccguuaaguggaaaagguga

SEQ ID NO: 1056 - RNA, 1473 nt, Artificial Sequence
  derived and/or modified protein sequence (opt3) from LASV(ISTH2065-NIG-2012;Clade II)__AIT17528__GPC
augggccagaucauuaccuucuuucaagaggugccccacgucauagaagagguuaugaacaucgugcugauugcccucagccuucuggcuauguugaaggggaucuacaauauugcaacaugcggauuauucggucugaucuccuuucuacuccuguguggcagaucuugcucaacuacguauaaagggguauacgaacuucaggcccuggaguuggacauggcgaaccucaauaugaccaugccucugaguuguacaaagaacaauagccaucacuauauaauggugggaaacgaaacuggccuggagcucaccuuaacaaauaccuccaucauuaaccauaaauucugcaaucugucugaugcucacaagaaaaaccuuuacgaccaugccuugaugucgaucauuucaacuuuucaccugagcaucccaaauuucaaccaguaugaggcaaugaguugugauuuuaauggugggaagauauccguccaguacaaccuaucucacacauaugccggagacgcugcaaagcauugcggcaccauugccaauggcgugcuccaaacguucaugaggauggcuuggggagggagcuacaucgcccuggauuccgguaaaggcaacugggacuguauuaugacuucauaccaguaucuuaucauccagaacaccacaugggaagaucacugccaguuuagucggccgagccccauuggguaccugggauugcucucucaacgcacucgagacauauauaucucccguagacuguuaggcaccuucacauggacccugucagauagcgaggguaaugaaacgccugggggauacugucucacuagguggaugcuuauugaggcggagcugaagugcuuuggcaacacagcaguugccaaauguaaugaaaagcaugacgaggaguucugcgauauguugcggcuauuugacuucaacaaacaggcuauccgcagacugaagaccgaagcccagaugaguauacagcucauuaauaaggcagugaacgcucugaucaaugaucaacuuaucaugaaaaaccaccugagggacauuaugggcaucccauauugcaauuacucuaaguauugguacuugaaccacuccgucacugggcggacaagccucccccgcuguuggcuggugucgaauggaucuuacuuaaacgaaacccaguucuccgacgauauugagcagcaagccgacaauaugauaacggagaugcugcagaaagaauauaucgaucgacaggguaagaccccucuaggccucguagaccuguuuguuuucucaacaaguuuuuaccuuauuagcaucuucuugcaucugaucaaaauuccaacucacagacauauaguggggaagcccugcccuaaaccacacaggcucaaccauaugggaaucuguuccugcggccuguauaagcacccggguauucccgucaaguggaaacgguga

SEQ ID NO: 1057 - RNA, 1473 nt, Artificial Sequence
  derived and/or modified protein sequence (opt3) from LASV(ISTH2094-NIG-2012;Clade II)__AIT17538__GPC
augggccagaucauuaccuucuuucaagaggugccccacgucauagaagagguuaugaacaucgugcugauugcccucagccuucuggcuaucuugaaggggauuuacaauaucgcaacaugcggauuauucggucugauauccuuucuacuccuguguggcagaucuugcucaacuacguauaaagggguauacgaacuucagacccuggaguuggacauggccaaccucaauaugacaaugccucugaguuguacuaagaacaauagccaucacuauaucauggugggaaacgaaaccggccuggagcucacauuaaccaauacuuccauuaucaaccauaaauucugcaaucugucugaugcgcacaagaaaaaccuuuacgaccaugcuuugaugucgauuaucucaacauuucaccugagcauaccaaauuucaaccaguaugaggccaugaguugugauuuuaaugaagguaagauuuccguccaguacaaccuaucucacagcuaugcaaucgacgccgcugggcauugcggaaccauugcaaauggcgugcuccaaacguucaugaggauggccuggggcggguccuacaucgcucuggauucaggaaaggguaacugggacuguaucaugaccaguuaccaguaucuuauuauacagaacacuacaugggaggaucacugccaguuuagccggccgucucccaucggcuaccugggguugcucucccaacgcacucgagacauuuauaucucacguagacuguuaggaaccuucacauggacccugagcgauagugaaggcaaugaggccccugguggguacugucucacgagguggaugcuuauagaggcggaacugaaaugcuuuggaaacacugcaauugccaaguguaaugagaaacaugacgaagaguucugcgauauguugcggcuauuugacuucaacaagcaggcuaucaaacgccugaaggccgaagcacagaugucuauccaccucauuaauaaggcuguuaacgcccugaucaaugaucagcuuauuaugaaaaaccaccugagagacauaaugggcaucccauauugcaauuacuccaaguauugguacuugaaccauacagugaccggcaaaacuagccuccccaaguguuggcuggucucgaaugggucuuacuuaaacgagacacacuucuccgacgauauugagcaacaggcggacaauaugaucaccgaacugcuacagaaagaguauauggauaggcaaggaaagacgccucucggucugguggaccuuuuuguauucucaaccaguuuuuacuugaucagcauuuuccugcaucucguuaaaauaccaacacaccggcauaucgugggccgccccugcccuaagccacaccgacugaaccacauggggauuuguuccugcggacuuuauaagcauccgggcguccccgugaaauggaagagauga

SEQ ID NO: 1058 - RNA, 1473 nt, Artificial Sequence
  derived and/or modified protein sequence (opt3) from LASV(ISTH2129-NIG-2012;Clade II)__AIT17544__GPC
augggccagaucauuaccuucuuucaagaggugccccacgucauagaagagguuaugaacaucgugcugauugcccucagccuucuggcuaucuugaaggggauuuacaauguagcaacaugcggauuauucggucugguguccuuucuacuccuguguggcagaucuugcucaacuacguauaaaggggucuacgaacuucagacccuggaguuggacaugggaagucucaacaugacaaugccucugagcuguacuaagaauaacucccaucacuauaucauggugggcaaugaaaccggucuggagcucacauuaaccaacacuucuauaaucaaucauaaauucugcaaccugucggaugcccacaagaaaaaucuuuacgaccaugcguugaugucaauuaucagcacauuucaccugaguauuccaaacuucaaucaguaugaggcuauguccugugauuuuaacgggggaaagaucucuguucaguacaaucuaagccacuccuaugccguggacgcagccaaccauugcggcaccauagcuaauggcguccuccaaacguucaugaggauggcauggggagggucauacauugcccuggauagugguaagggcagcugggacuguaucaugacuucuuaccaguaucuuauuauccagaacaccacaugggaagaucacugccaguuuucccggccgucacccaucggguaccugggauugcucagccaacgcacucgagacauuuauauaagucguagacuguuaggcaccuucacauggacccugucugauuccgaggguaacgaaacgccugggggauacugucucacuagguggaugcuuaucgaggcugagcugaaaugcuuuggcaauacagccguggcgaaguguaacgaaaaacaugacgaggaguucugcgauauguugcggcuauuugacuucaauaagcaggcaauucgcagacugaaaaccgaagcccagaugagcauccagcucauaaacaaggcuguaaaugcccugauuaacgaucaacuuaucaugaagaaucaccugagggacaucaugggcauuccauauugcaacuacucgaaauauugguacuugaaucacacuguuacagggaagaccucucucccccgguguuggcugguguccaacggaucauacuuaaaugaaacgcauuucagugacgauaucgagcagcaggcagacaacaugauuaccgagcugcuacaaaaagaauauauggaucgccaggguaagacaccucucggccuggucgaccuuuuuguguucagcacuuccuuuuacuugauaucuaucuuccugcaccucgugaaaauuccaacccaucgacacaucaucgggaagcccugcccuaaaccacauagacugaaucacaugggaauuuguagcugcggccuuuauaagcacccggguguccccguuaaguggaaaagguga

SEQ ID NO: 1059 - RNA, 1473 nt, Artificial Sequence
  derived and/or modified protein sequence (opt3) from LASV(ISTH2217-NIG-2012;Clade II)__AIT17548__GPC
augggccagaucauuaccuucuuucaagaggugccccacgucauagaagagguuaugaacaucgugcugauugcccucagccuucuggcuaucuugaaggggauuuacaauguagcaacaugcggauuauucggucugguguccuuucuauuccucuguggcagaucuugcucaacuacguauaaaggggucuacgaacugcagacccuugagcuggacauggccaguuugaacaugacaaugccucucagcuguacuaagaauaacucccaucacuauaucauggugggaaaugaaaccggccuggagcugacacucaccaacacuucuauaaucaaucauaaauuuugcaacuuaucggaugcgcacaagaggaaucuguacgaccaugcucuuaugucaauuaucagcacauuccacuugaguauuccaaacuuuaaucaguaugaggccauguccugugauuucaacggugggaaaaucucuguucaguacaaucugagccacgcauaugccggagacgcugcaaagcauugcggcaccauagccaacggcgugcuacaaacguuuaugcggauggcuuggggaggguccuacauugcccucgauucagguaagggcaguugggacuguaucaugacuagcuaccaguaucugauuauccagaauaccacaugggaagaucacugccaguucucucgcccgucccccaucggguaccuuggacuguugucacaacgaacucgugacauuuauauaagcagaaggcuccugggcaccuuuacauggaccuuaagugauucugaggguaacgaaacgccugggggauacugucugacucgguggaugcucaucgaggcggagcuuaaaugcuucggcaacacagcagucgccaaguguaaugaaaaacaugacgaggaauuuugcgauaugcugcgcuuguucgacuucaacaagcaggcuauuagaaggcuacggaccgaggcccagauguccauccagcugauaaauaaagcagugaacgcucucauuaaugaucaacugaucaugaagaaccaccuucgcgacaucaugggcauuccauauugcaauuacagcaaguauugguaccugaaccacacuguaacagggaaaaccucguugcccaaguguuggcucguuucuaauggauccuaccugaacgaaacgcauuuuucagacgauaucgagcagcaggccgacaauaugauuaccgagauguuacaaaaagaauauauagaucgacaggguaagacaccucugggccuaguggaccucuucgucuuuaguacuagcuucuaccugaucuccauuuuucuucacuuggugaaaaucccaacccauagacacgugaucgggaagcccugcccuaaaccacauaggcugaaccacaugggaauuuguucuugcggccucuauaagcacccggguguccccguuaaguggaaacgguga

SEQ ID NO: 1060 - RNA, 1473 nt, Artificial Sequence
  derived and/or modified protein sequence (opt3) from LASV(ISTH2271-NIG-2012;Clade II)__AIT17552__GPC
augggccagaucauuaccuucuuucaagaggugccccacgucauagaagagguuaugaacaucgugcugauugcccucagccuucuggcuaucuugaaggggauuuacaauguagcaacaugcggauuauucggucugguguccuuucuacuccuguguggcagaucuugcucaacuacguauaaaggggucuacgaacuucagacccuggaguuggacauggccagucucaacaugacaaugccucugagcuguacuaagaauaacucccaucacuauaucauggugggaaaugaaaccggccuggagcucacauuaaccaacacuucuauaaucaaucauaaauucugcaaccugucggaugcgcacaagaaaaaucuuuacgaccaugcuuugaugucaauuaucagcacauuucaccugaguauuccaaacuucaaucaguaugaggccauguccugugauuuuaacggugggaagaucucuguucaguacaaucuaagccacgcauaugccgugaacgcugcaaaucauugcggaaccauagccaacggcguccuccaaacguucaugaggauggcuuggggcggguccuacauugcccuggacucaggaaaggguaguugggauuguaucaugacuagcuaccaguaucuuauuauccagaacaccacaugggaagaccacugccaguuuucucggccgucccccaucggcuaccugggguugcucucacaacgcacucgagauauuuauauaagccguagacuguuaggaaccuucacauggacccugagugacucugagggcaaugaaacgccugguggguacugucucacuagguggaugcuuaucgaggcggagcugaaaugcuuuggaaacacagcaguggccaaguguaaugaaaaacaugaugaggaguucugcgacauguugcggcuauuugauuucaacaagcaggcuauucgcagacugaaaaccgaagcccagauguccauccagcucauaaauaaggcaguaaacgcucugauuaaugaccaacuuaucaugaagaaccaccugagggauaucaugggcauuccauauugcaauuacagcaaauauugguacuugaaccacacuguuacaggcaagaccucgcucccccgguguuggcuggugucuaauggguccuacuuaaacgaaacgcauuucucagacgacaucgagcagcaggccgauaauaugauuaccgagcugcuacaaaaagaauauauggaccgccagggaaagacaccucucggucuggucgaucuuuuuguguucaguacuagcuuuuacuugauauccaucuuccugcaccucgugaaaauuccaacccaucgacacgucaucggcaagcccugcccuaaaccacauagacugaaccacauggggaucuguucuugcggacuuuauaagcacccgggcguucccgugaaguggaaaaaguga

SEQ ID NO: 1061 - RNA, 1473 nt, Artificial Sequence
  derived and/or modified protein sequence (opt3) from LASV(ISTH2304-NIG-2012;Clade II)__AIT17556__GPC
augggccagaucauuaccuucuuucaagaggugccccacgucauagaagagguuaugaacaucgugcugauugcccucagccuucuggcuaucuugaaggggauuuacaauguagcaacaugcggauuauucggucugguguccuuucuacuccuguguggcagaucuugcucaacuacguauaaaggggucuacgaacuucagacccuggaguuggacauggccagucucaacaugacaaugccucugagcuguacuaagaauaacucccaucacuauaucauggugggaaaugaaaccggccuggagcucacauuaaccaacacuucuauaaucaaucauaaauucugcaaccugucggaugcgcacaagaaaaaucuuuacgaccaugcuuugaugucaauuaucagcacauuucaccugaguauuccaaacuucaaucaguaugaggccauguccugugauuuuaacggugggaagaucucuguucaguacaaucuaagccacaccuaugcaguggacgccgcuaaccauugcggaacgauagcaaauggcguccuccaaacuuucaugaggauggccuggggcggguccuacauugcucuggauucaggacgggguaguugggacuguaucaugaccagcuaccaguaucuuauuauccagaacacaacuugggaagaucacugccaguuuucucgcccgucccccaucggcuaccugggguugcucucacaacgaacccgugacauuuauauaagcagaaggcuguuaggaacauucaccuggacgcugagugauucugagggcaacgaaacuccugguggguacugucucacacgguggaugcuuaucgaggccgagcugaagugcuuuggaaauaccgcgguggcaaaauguaacgaaaagcaugacgaggaguucugcgauauguugcgccuauuugacuucaauaaacaggccauuagaaggcugaagacugaagcucagauguccauccagcucauaaacaaagccguaaaugcacugauuaacgaucaacuuaucaugaagaaucaucugcgggacaucaugggcauuccauauugcaacuacagcaaguauugguacuugaaucacacaaucaccggcaaaacgucgcucccccgcuguuggcugguuucuaacggguccuacuuaaaugaaacccacuucucagacgauauugagcagcaggcugacaacaugauaacagagcugcuacaaaaggaauauaucgaucgacagggaaaaacuccucucggucugguggaccuuuuugucuucaguaccagcuuuuacuugauuuccaucuuccugcaccucgugaagaucccaacacauagacacauuacuggcaaacccugcccuaagccacauaggcugaaucacauggggauauguucuugcggacuuuauaaacacccgggcgugcccguccgguggaagcguuga

SEQ ID NO: 1062 - RNA, 1473 nt, Artificial Sequence
  derived and/or modified protein sequence (opt3) from LASV(ISTH2312-NIG-2012;Clade II)__AIT17560__GPC
augggccagaucauuaccuucuuucaagaggugccccacgucauagaagagguuaugaacaucgugcugauugcccucagccuucuggcuguauugaaggggaucuacaauguggcaacaugcggauuauucggucuggucuccuuucuacuccuguguggcagaucuugcucaacuacguauaaagggguguacgaacuucagacccuggaguuggacauggccagucucaacaugacaaugccucugagcuguacuaccaauaacucccaucacuauauuaugguuggaaaugaaacaggccuggagcucaccuuaacuaacacaucuaucauaaaucauaaguucugcaaccugucggaugcgcacaaaaagaaucuuuacgaccaugcuuugaugucaaucauuagcaccuuucaccugaguaucccaaacuucaaucaguaugaggccauguccugugauuuuaacggugggaaaauuucugugcaguacaaucuaagccacgcauaugccggagaagcugcaaaccauugcggcacgaucgccaauggcguccuccaaacuuucaugaggauggcuuggggaggguccuacauagcccuggacucagguaagggcaguugggauuguauuaugaccagcuacaaguaucuuaucauucagaacacaacuuggggagaccacugccaguuuucucggccgucccccaucggguaccugggcuugcucucacagcgcacccgagauaucuauauuagccguagacuguuagguacauucaccuggacgcugagugacucugaggggaacgaaacuccuggaggcuacugucucacaagguggaugcuuauagaggcggagcugaaaugcuuuggcaauaccgcaguggccaaguguaacgaaaaacaugaugaggaguucugcgacauguugcggcuauuugauuucaauaagcaagcuauccgcaaacugaagacugaagcccagauguccauucagcucaucaacaaggcaguaaaugcucugauaaacgaccagcuuauuaugaaaaaucaccugagagauaucauggggaucccauauugcaacuacagcagguauugguacuugaaucacacaguuaccggacggacgucgcucccccgcuguuggcuggugucuaacgguuccuacuuaaaugaaacccauuucucagacgacauugagcaacaggccgauaacaugaucacagagcugcuacagaaggaauauauugaccgacaaggcaaaacuccucucgggcuggucgaucuuuuuguguucaguaccagcuuuuacuugauauccaucuuccugcaccucgugaagauuccaacacauagacacaucaucggaaaacccugcccuaagccacauaggcugaaucacaugggcauuuguucuugcggucuuuauaaacacccggggguccccguuaaguggaagcgguga

SEQ ID NO: 1063 - RNA, 1473 nt, Artificial Sequence
  derived and/or modified protein sequence (opt3) from LASV(ISTH2316-NIG-2012;Clade II)__AIT17564__GPC
augggccagaucauuaccuucuuucaagaggugccccacgucauagaagagguuaugaacaucgugcugauugcccucagccuucuggcuaucuugaaggggauuuacaauguagcaacaugcggauuauucggucugcuauccuuucuccugcuuuguggcagaucuugcucaacuacguauaaagggguguacgaacugcagaccuuggagcucgacauggccagucugaacaugacaaugccucugagcuguacuaagaauaacucccaucacuauaucauggucggaaaugaaaccggccucgaguuaacacugaccaacacuucuauaaucaaucauaaauucugcaaccuuucggaugcgcacaagaaagacuuguacgaucaugcucugaugucaauuaucagcacauuucaccuaaguauuccaaauuucaaccaguaugaggccauguccugugacuuuaauggugggaagaucucugugcaguacaaccucagccacgcauaugccguugaugcugcaaagcauugcggaaccauagccaauggcgugcugcaaacguucaugaggauggcuuggggcggguccuacauugcccuugacucaggaaaagguaguugggauuguaucaugacuagcuaccaguaucugauuauccagaacaccucuugggaagaccacugccaguuuucccggccgucacccaucggcuacuuggggcuccugagccaacgcacacgagauauuuauauaagucguagauuacugggaacuuucaccuggacacucucugacuccgagggcaaugaaaccccugguggguacugucuuacgagguggaugcugaucgaggcggaguugaagugcuuuggaaacacugcagucgccaaauguaacgaaaagcaugaugaggaguucugcgacaugcuacggcuguuugauuucaauaaacaggcuauuaagcgccucaagacagaagcccagaugagcauccagcugauaaacaaagcagugaaugcucuuauuaacgaccaacugaucaugaagaaucacuugagagacaucaugggcauuccauauugcaacuacucgaaauauugguaccucaaucacaccguaacuggcaagacaucucugcccagguguugguuaguuuccaacgggucauaccugaaugaaacccauuucagugaugacaucgagcagcaggccgauaacaugauuacggagcuacuccaaaaagaauauauagaccggcagggaaagaccccucugggucuuguggauuuguuugucuucagcacauccuuuuaccugaucucuauuuuccuccaccuggugaaaaucccaacucaucgccacgugaucggcaagcccugcccuaagccacaucgacuuaaucacauggggauuuguagcugcggacuguauaaacacccgggcguccccguuaaguggaaaagauga

SEQ ID NO: 1064 - RNA, 1473 nt, Artificial Sequence
  derived and/or modified protein sequence (opt3) from LASV(ISTH2358-NIG-2012;Clade II)__AIT17572__GPC
augggccagaucauuaccuucuuucaagaggugccccacgucauagaagagguuaugaacaucgugcugauugcccucagccuucuggcuaucuugaaggggauuuacaauguagcaacaugcggauuauucggucugguguccuuucuacuccuguguggcagaucuugcucaacuacguauaaaggggucuacgaacuucagacccuggaguuggacauggccaaccucaauaugacaaugccucugaguuguacuaagaacaauagccaucacuauaucauggugggaaacgaaaccggccuggagcucacauuaaccaauacuuccauaaucaaccauaaauucugcaaucugucugaugcgcacaagaaaaaccuuuacgaccaugcuuugaugucgauuaucucaacauuucaccugagcauuccaaauuucaaccaguaugaggccaugaguugugauuuuaauggugggaagaucuccguucaguacaaccuaucucacaauuaugcaguggacgccgcuaaccauugcggaaccauagcaaacggcguccuccaaacguucaugaggauggccuggggcgggagcuacauugcucuggauuccggaaaggguaauugggacuguaucaugacuucauaccaguaucuuauuauccagaacaccacaugggaagaucacugccaguuuagucggccgagccccaucggcuaccugggguugcucucucaacgcacucgagacauuuauauaucccguagacuguuaggaaccuucacauggacccugucagauagcgagggcaaugacaugccugguggguacugucucacgagguggaugcuuaucgaagccgagcugaaaugcuuuggaaacacugcgguggcaaaguguaaugagaaacaugaugaagaguucugcgacauguugcggcuauuugauuucaacaagcaggccauucgcagacugaaaacagaagcucagaugaauauccagcucauaaacaaggccguaaaugcacugauuaacgaccaacuuaucaugaagaaucaccugagggacaucaugggcauuccauauugcaacuacaguaaauauugguacuugaaucacaccguuacuggcaagacaucucucccccgguguuggcugguguccaacgggagcuacuuaaaugagacccauuucucggaugacaucgaacagcaggcugauaacaugauuacggagcugcuacaaaaagaguauauggaccgccagggaaagaccccucucggucuggucgaucuuuuuguguucucuacauccuuuuacuugauaucaaucuuccugcaccucgugaaaauuccaacucaucgacacaucaucggcaagcccugcccuaaaccacauagacugaaccacauggggauuuguaguugcggacuuuauaagcacccgggcguccccguuaaguggaaaagguga

SEQ ID NO: 1065 - RNA, 1473 nt, Artificial Sequence
  derived and/or modified protein sequence (opt3) from LASV(ISTH2376-NIG-2012;Clade II)__AIT17576__GPC
augggccagaucauuaccuucuuucaagaggugccccacgucauagaagagguuaugaacaucgugcugauugcccucagccuucuggcuaucuugaaggggauuuacaauguagcaacaugcggauuauucggucugguguccuuucuacuccuguguggcagaucuugcucaacuacguauaaaggggucuacgaacuucagacccuggaguuggacauggccagucucaacaugacaaugccucugagcuguacuaagaauaacucccaucacuauaucauggugggaaaugaaaccggccuggagcucacauuaaccaacacuucuauaaucaaucauaaauucugcaaccugucggaugcgcacaagaaaaaucuuuacgaccaugcuuugaugucaauuaucagcacauuucaccugaguauuccaaacuucaaucaguaugaggccauguccugugauuuuaacggugggaagaucucuguucaguacaaucuaagccacaccuaugcaguggacgccgcuaaccauugcggaacgauagcaaauggcguccuccaaacuuucaugaggauggccuggggcggguccuacauugcucuggauucaggaaaggguaacugggacuguaucaugaccaguuaccaguaucuuauuauccagaacacaacuugggaagaucacugccaguuuagccggccgucucccaucggcuaccugggguugcucucccaacgcacccgagacauuuauauaucacguagacuguuaggaacauucaccuggacgcugagcgauagugagggcaaugaaacuccugguggguacugucucacaagguggaugcuuaucgaggccgagcugaaaugcuuuggaaacaccgcgguggcaaaguguaaugaaaaacaugacgaggaguucugcgauauguugcggcuauuugacuucaacaagcaggccauuucucgccugaaaacugaagcucagauguccauccagcucauaaauaaggccguaaacgcacugauuaaugaucaacuuaucaugaagaaccaccugagagacaucaugggcauuccauauugcaauuacagcaaauauugguacuugaaccacacaguuaccggcaagacgucgcuccccagguguuggcuggugucuaauggguccuacuuaaacgaaacccauuucucagacgauaucgagcagcaggcugacaauaugauuacagagaugcugcaaaaagaauauauagaucggcagggaaagacuccucuaggucucgucgaccuguuuguguucaguaccagcuuuuaccuuaucuccauuuucuugcaccuggugaaaaucccaacacaucgccacaucacuggcaagcccugcccuaaaccacaucgacucaaccacauggggauuuguucuugcggacuguauaagcacccgggcguccccguuaaguggaaaagauga

SEQ ID NO: 1066 - RNA, 1473 nt, Artificial Sequence
  derived and/or modified protein sequence (opt3) from LASV(Lassa virus/H.sapiens-wt/NGA/2015/ISTH_0543;Clade II)__AVO03639__GPC
augggccagaucauuaccuucuuucaagaggugccccacgucauagaagagguuaugaacaucgugcugauugcccucagccuucuggcuaucuugaaggggauuuacaauguagcaacaugcggauuauucggucugguguccuuucuacuccuguguggcagaucuugcucaacuacguauaaaggggucuacgaacuucagacccuggaguuggacauggccaaccucaauaugacaaugccucugaguuguacuaagaacaauagccaucacuauaucauggugggaaacgaaaccggccuggagcucacauuaaccaauacuuccauaaucaaccauaaauucugcaaucugucugaugcgcacaagaaaaaccuuuacgaccaugcuuugaugucgauuaucucaacauuucaccugagcauuccaaauuucaaccaguaugaggccaugaguugugauuuuaauggugggaagaucuccguucaguacaaccuaucucacaccuaugcaguggacgccgcuaaucauugcggaacgauagcaaacggcguccuccaaacuuucaugaggauggccuggggcgggagcuacauugcucuggauuccggaaaggguucaugggacuguaucaugaccaguuaccaguaucuugugauucagaacacaacuugggaagaucacugccaguuuagccggccgucucccaucggcuaccugggguugcucucccaacgcacccgagacaucuauauuucacguagacuguuaggaacauucaccuggacgcugagcgauagugagggcaaugaaacuccugguggguacugucucacaagguggaugcuuauagaggccgagcugaaaugcuuuggaaacaccgcgguagcaaaguguaaugaaaaacaugacgaggaguucugcgauauguugcggcuauuugacuucaacaagcaggccauccgcagacugaaaacugaagcucagaugucuauucagcucaucaauaaggccguuaacgcacugauaaaugaucaacuuauuaugaagaaccaccugagggacaucaugggcaucccauauugcaauuacuccaaauauugguacuugaaccacacagugaccggcaagacgagccucccccgguguuggcuggucucgaaugggucuuacuuaaacgaaacccauuucuccgacgauauugagcagcaggcugacaauaugaucacagagcugcuacaaaaagaauauauugaucgccagggaaagacuccucucggucugguggaccuuuuuguguucucaaccaguuuuuacuugauaagcaucuuccugcaccucgucaaaauuccaacacaucgacacaucacuggcaagcccugcccuaaaccacauagacugaaccacauggggaucuguuccugcggacuuuauaagcacccgggcguucccgugaaguggaaaagguga

SEQ ID NO: 1067 - RNA, 1473 nt, Artificial Sequence
  derived and/or modified protein sequence (opt3) from LASV(Lassa virus/H.sapiens-wt/NGA/2015/ISTH_0547;Clade II)__AVO03583__GPC
augggccagaucauuaccuucuuucaagaggugccccacgucauagaagagguuaugaacaucgugcugauugcccucagccuucuggcuaucuugaaggggauuuacaauguagcaacaugcggauuauucggucugguguccuuucuacuccuguguggcagaucuugcucaacuacguauaaaggggucuacgaacuucagacccuggaguuggacauggccagucucaacaugacaaugccucugagcuguacuaagaauaacucccaucacuauaucauggugggaaaugaaaccggccuggagcucacauuaaccaacacuucuauaaucaaucauaaauucugcaaccugucggaugcgcacaagaaaaaucuuuacgaccaugcuuugaugucaauuaucagcacauuucaccugaguauuccaaacuucaaucaguaugaggccauguccugugauuuuaacggugggaagaucucuguucaguacaaucuaagccacaccuaugcaguggacgccgcuaaccauugcggaacgauagcaaauggcguccuccaaacuuucaugaggauggccuggggcggguccuacauugcucuggauucaggaaaggguaguugggacuguaucaugaccagcuaccaguaucuuauuauccagaacacaacuugggaagaucacugccaguuuucucggccgucccccaucggcuaccugggguugcucucacaacgcacccgagacauuuauauaagccguagacuguuaggaacauucaccuggacgcugagugauucugagggcaacgaaacuccugguggguacugucucacaagguggaugcuuaucgaggccgagcugaaaugcuuuggaaauaccgcgguggcaaaguguaacgaaaaacaugacgaggaguucugcgauauguugcggcuauuugacuucaauaagcaggccauucgcagacugaaaacugaagcucagauguccauccagcucauaaacaaggccguaaaugcacugauuaacgaucaacuuaucaugaagaaucaccugagggacaucaugggcauuccauauugcaacuacagcaaauauugguacuugaaucacacaguuaccggcaagacgucgcucccccgguguuggcuggugucuaacggguccuacuuaaaugaaacccauuucucagacgauaucgagcagcaggcugacaacaugauuacagagcugcuacaaaaagaauauauagagcgccagggaaagacuccucucggucuggucgaucuuuuuguguucaguaccagcuuuuacuugaucuccauuuuccugcaccucgugaaaaucccaacacaucgacacaucacuggcaagcccugcccuaaaccacauagacugaaucacauggggauuuguucuugcggacuuuauaagcacccgggcguccccguuaaguggaaaagguga

SEQ ID NO: 1068 - RNA, 1473 nt, Artificial Sequence
  derived and/or modified protein sequence (opt3) from LASV(Lassa virus/H.sapiens-wt/NGA/2015/ISTH_0574;Clade II)__AVO03657__GPC
augggccagaucauuaccuucuuucaagaggugccccacgucauagaagagguuaugaacaucgugcugauugcccucagccuucuggcuaucuugaaggggauuuacaauguagcaacaugcggauuauucggucugguggccuuucuacuccuguguggcagauccugcucuacuacguauaaaggggucuacgaacuucagacccuggaguuggacauggcgucacucaacaugacaaugccucugaguuguacuaagaauaacagccaucacuauaucauggugggaaaugaaaccggccuggagcucacauuaaccaacacuuccauaaucaaucauaaauucugcaaccugucugaugcucacaagaaaaaucuuuacgaccaugccuugaugucgauuaucucaacauuucaccugagcauuccaaacuucaaucaguaugaggcaaugaguugugauuuuaacggugggaagaucuccguucaguacaaucuaucucacaccuaugccguggacgcugcaaaccauugcggaacgauaacuaauggcguccuccaaaccuucaugaggauggccuggggcgggagcuacauugcucuggauuccggaaaggguucaugggacuguaucaugacaaguuaccaguaucuuauuauccagaacacuaccugggaagaucacugccaguuuagccggccgucucccaucggcuaccugggguugcucucccaacgcacacgagacauuuauauaucacguagacuguuaggaaccuucacguggacucugagcgauagugagggcaacgaaacaccugguggguacugucucaccagguggaugcuuaucgaggccgagcugaaaugcuuuggaaauacugcgguggcaaaguguaacgaaaaacaugacgaggaguucugcgauauguugcggcuauuugacuucaauaagcaggccauucgcagacugaaaacagaagcucagaugucuauccagcucauaaacaaggccguaaaugcacugauuaacgaucaacuuaucaugaagaaucaccugagggacaucaugggcauuccauauugcaacuacuccaaauauugguacuugaaucacaccguuacgggccggaccagccucccccgcuguuggcuggugucgaacgggucuuacuuaaaugaaacacauuucuccgacgauaucgagcagcaggcugacaacaugauuacugagcugcuacaaaaggaauauauggaucgacagggaaaaaccccucucggucuggucgaccuuuuuguguucucaacaaguuuuuacuugauaagcaucuuccugcaccucauuaagaucccaacucauagacacgugaucggcaaacccugcccuaagccacauaggcugaaucacauggggauuuguuccugcggacuuuauaaacacccgggcguccccguuaaguggaagcgguga

SEQ ID NO: 1069 - RNA, 1473 nt, Artificial Sequence
  derived and/or modified protein sequence (opt3) from LASV(Lassa virus/H.sapiens-wt/NGA/2015/ISTH_0681;Clade II)__AVO03617__GPC
augggccagaucauuaccuucuuucaagaggugccccacgucauagaagagguuaugaacaucgugcugauugcccucagccuucuggcuaucuugaaggggauuuacaauguagcaacaugcggauuauucggucugguguccuuucuacuccuguguggcagaucuugcucaacuacguauaaaggggucuacgaacuucagacccuggaguuggacauggccagucucaacaugacaaugccucugagcuguacuaagaauaacucccaucacuauaucauggugggaaaugaaaccggccuggagcucacauuaaccaacacuucuauaaucaaucauaaauucugcaaccugucggaugcgcacaagaaaaaucuuuacgaccaugcuuugaugucaauuaucagcacauuucaccugaguauuccaaacuucaaucaguaugaggccauguccugugauuuuaacggugggaagaucucuguucaguacaaucuaagccacaccuaugcagaaggagccgcuaaccauugcggcacgauagcaaauggcgugcuccaaacuuucaugaggauggccuggggaggguccuacauugcucuggacucagguaagggcaguugggauuguaucaugaccagcuaccaguaucuuauuauccagaacacaacuugggaggaccacugccaguuuucucggccgucccccaucggguaccugggauugcucucacaacgcacccgagauauuuauauaagccguagacuguuaggcacauucaccuggacgcugagugacucugaagguaacgagacuccugggggauacugucucacaagguggaugcuuaucgaggccgaacugaaaugcuuuggcaauaccgcggucgcaaaguguaacgagaaacaugaugaagaguucugcgacauguugcggcuauuugauuucaauaagcaggccauuaugcgccugaaaacugaagcucagauguccauccagcucauaaacaaggccgugaaugcacugauuaacgaccaacuuaucaugaagaaucaccugagagauaucaugggcauuccauauugcaacuacagcaaauauugguacuugaaucacacaguaaccgggaagacgucgcuccccagguguuggcugguuucuaacggauccuacuuaaaugagacccauuucucagacgacaucgagcagcaggcugauaacaugauuacagaaaugcugcaaaaagaguauauggaccggcaggguaagacuccucuaggccucguggaucuguuugucuucaguaccagcuuuuaccuuauauccaucuucuugcaccuggugaaaauuccaacacaucgccacgugaucgggaagcccugcccuaaaccacaucgacucaaucacaugggaaucuguucuugcggccuguauaagcacccggguguccccguuaaguggaaaagauga

SEQ ID NO: 1070 - RNA, 1473 nt, Artificial Sequence
  derived and/or modified protein sequence (opt3) from LASV(Lassa virus/H.sapiens-wt/NGA/2015/ISTH_0682;Clade II)__AVO03625__GPC
augggccagaucauuaccuucuuucaagaggugccccacgucauagaagagguuaugaacaucgugcugauugcccucagccuucuggcuaucuugaaggggauuuacaauguagcaacaugcggauuauucggucugguguccuuucuacuccuguguggcagaucuugcucaacuacguauaaaggggucuacgaacuucagacccuggaguuggacauggccagucucaacaugacaaugccucugagcuguacuaagaauaacucccaucacuauaucauggugggaaaugaaaccggccuggagcucacauuaaccaacacuucuauaaucaaucauaaauucugcaaccugucggaugcgcacaagaaaaaucuuuacgaccaugcuuugaugucaauuaucagcacauuucaccugaguauuccaaacuucaaucaguaugaggccauguccugugauuuuaacggugggaagaucucuguucaguacaaucuaagccacgcauaugccguggacgcugcaaaccauugcggaaccauagccaauggcguccuccaaacguucaugaggauggcuuggggcggguccuacauugcccuggauucaggaaaggguaguugggacuguaucaugacuagcuaccacuaucuuauuauccagaacaccacaugggaagaucauugccaguuuucucggccgucccccaucggcuaccugggguugcucucacagcgcacucgagacauuuauauaagccguagacuguuaggaaccuucacauggacccugagugauucugagggcaacgaaacgccugguggguacugucucacuagguggaugcuuaucgaggcggagcugaaaugcuuuggaaauacagcaguggccaaguguaacgaaaaacacgacgaggaguucugcgauauguugcggcuauuugacuucaauaagcaagcuauucgcagacugaaaaccgaagcccagauguccauccagcucauaaacaaggcaguaaaugcucugauuaacgaucagcuuaucaugaagaaucaccugagggacaucaugggcauuccauauugcaacuacagcaaauauugguacuugaaucauacuguuacaggcaagaccucgcucccccgguguuggcuggugucuaacggguccuacuuaaaugaaacgcacuucucagacgauaucgagcaacaggccgacaacaugauuaccgagcugcuacagaaagaauauauagaucgccaaggaaagacaccucucggucuggucgaccuuuuuguguucaguacuagcuuuuacuugaucuccauuuuccugcaucucgugaaaaucccaacccaccgacaugucaucggcaagcccugcccuaaaccacacagacugaaucacauggggauuuguucuugcggacuuuauaagcauccgggcguucccgugaaguggaaaagguga

SEQ ID NO: 1071 - RNA, 1473 nt, Artificial Sequence
  derived and/or modified protein sequence (opt3) from LASV(Lassa virus/H.sapiens-wt/NGA/2015/ISTH_0687;Clade II)__AVO03581__GPC
augggccagaucauuaccuucuuucaagaggugccccacgucauagaagagguuaugaacaucgugcugauugcccucagccuucuggcuaucuugaaggggauuuacaauguagcaacaugcggauuauucggucugguguccuuucuacuccuguguggcagaucuugcucaacuacguauaaaggggucuacgaacuucagacccuggaguuggacaugacaaaccucaauaugacuaugccucugaguuguaccaagaacaauagccaucacuauaucauggugggaaacgaaacaggccuggagcucaccuuaacuaauacauccauaaucaaccauaaauucugcaaucugucugaugcccacaagaaaaaccuuuacaaucaugcguugaugucgauuaucucaaccuuucaccugagcauuccaaacuucaaucaguaugaggcuaugaguugugacuuuaacggugggaagaucuccguucaguacaaucuaucucacacguaugccguggaugcagccaaccauugcggaacugucgcuaacggcgugcuccaaaccuucaugaggauggcauggggcgggagcuacauagcccuggacuccggaaaggguggcugggauuguauuaugacaucauaccaguaucuuaucauucagaauacuaccugggaagaccacugccaguuuagucggccgagccccaucggguaccugggauugcucucucaacgcacacgagauaucuauauuucccguagacuguuaggcaccuucacguggacucugucagacagcgaggguaacgaaacaccugggggauacugucucaccagguggaugcuuauagaggcugagcugaaaugcuuuggcaauacugccguagcgaaguguaacgaaaaacaugaugaggaguucugcgacauguugcggcuauuugauuucaauaagcaggcaauccgcaaacugaaggccgaagcucagaugaguauucagcucaucaacaaggccguuaaugcacugauaaacgaccaacuuauuaugaaaaaucaccugagagauaucaugggcaucccauauugcaacuacucuaaguauugguacuugaaucacacagugaccgggaaaacgucccuccccaaguguuggcuggucagcaacggaucguacuuaaaugaaacccauuucucugacgacauugagcagcaggcugauaacaugaucacagagcugcuacaaaaagaauauauggacaggcaggguaagacuccucucggccugguggaucuuuuuguguucuccaccucauuuuacuugauuaguauauuccugcaccucgucaaaaucccaacacaucggcacauuaucgggaagcccugcccuaagccacaucgccugaaucacaugggaaucuguagcugcggccuuuauaaacacccggguguucccgugaaguggaaacgauga

SEQ ID NO: 1072 - RNA, 1473 nt, Artificial Sequence
  derived and/or modified protein sequence (opt3) from LASV(Lassa virus/H.sapiens-wt/NGA/2015/ISTH_0736;Clade II)__AVO03573__GPC
augggccagaucauuaccuucuuucaagaggugccccacgucauagaagagguuaugaacaucgugcugauugcccucagccuucuggcuguauugaaggggaucuacaauguggcaacaugcggauuauucggucuggucuccuuucuacuccuguguggcagaucuugcucaacuacguauaaagggguguacgaacuucagacccuggaguuggacauggccagucucaacaugacaaugccucugagcuguacuaagaauaacucccaucacuauauuaugguuggaaaugaaaccggccuggagcucacauuaaccaacacuucuaucauaaaucauaaauucugcaaccugucggaugcgcacaagaaaaaucuuuacgaccaugcuuugaugucaaucauuagcacauuucaccugaguaucccaaacuucaaucaguaugaggccauguccugugauuuuaacggugggaagauuucugugcaguacaaucuaagccacacccaugcagucgacgccgcuaaccacugcggaacgaucgcaaauggcgugcuccaaacuuucaugaggauggccuggggcggguccuauauagcucuggauucaggaaaggguaguugggacuguauuaugaccagcuaccaguaccuuaucauucagaacacaacuugggaagaucauugccaguuuucucggccgucccccaucggcuaucugggguugcucucacaacgcacccgagacaucuacauuagccguagacuguuaggaacauucaccuggacgcugagugauucugagggcaacgaaacuccugguggguauugucucacaagguggaugcuuauagaggccgagcugaaaugcuuuggaaauaccgcgguagcaaaguguaacgaaaaacacgacgaggaguucugcgauauguugcggcuauuugacuucaauaagcaggccauccgcagacugaaaacugaagcucagauguccauucagcucaucaacaaggccguuaaugcacugauaaacgaucaacuuauuaugaagaaucaccugagggacaucaugggcaucccauacugcaacuauagccgguacugguauuugaaucauacagugaccggcaaaacgucgcucccccgcuguuggcuggucucuaacggguccuacuuaaaugaaacccacuucucagacgauauugagcagcaggcugacaacaugaucacagagcugcuacaaaaggaauacauugaucgacagggaagaacuccucucggucugguggaccuuuuuguguucaguaccagcuuuuauuugauauccaucuuccugcaucucgucaaaauuccaacacacaggcauguuaucggcaagcccugcccuaaaccacaccggcugaaucacauggggaucuguucuugcggacuuuacaagcauccgggcgugcccguaaaauggaagcguuga

SEQ ID NO: 1073 - RNA, 1473 nt, Artificial Sequence
  derived and/or modified protein sequence (opt3) from LASV(Lassa virus/H.sapiens-wt/NGA/2015/ISTH_0789;Clade II)__AVO03551__GPC
augggccagaucgugaccuucuuucaagaggucccccacguuauugaagagauaaugaacaucgugcugauuacacucagccuucuggccaucuugaaggggguauacaauuuagcuacuugcggacugauuggucuaaucacguuccucuuucuguguggcagauccugcucuaccauauauaaagggucauaccaguuccagacacuugaacugaacauggagacuuugaauaugaccaugccucucaguuguacaaagaacagcucccaucacuauaucagggugucuaaugaaaccggacuggagcugacucucacaaacaccucgauuaucaaucauaaauuuugcaacuuaucagacgcacacaagaaaaaucuguacgaucauacgcuuaugagcauuaucaguacuuuccacuuguccauaccaaacuuuaaucaguaugaggccaugucuugugacuucaacggcgguaagauuagcguccaauacaaucugucccacucauaugcgguggaugcugccaaccauugcgggaccguugcaaauggagugcuacagacauuuaugcggauggccuggggcggcaguuacaucgcucucgacagcgggcgcggaaacugggauuguauuaugacuucuuaccaguaucugaucauccagaacaccacaugggaagaccacugccaauucucccgaccgucacccauugguuaccuuggccuguugagccagcguaccagagauauauauaucaguaggcggcuccuggggacguuuacuuggacauuaucugacuccgagggaaaggaaaccccuggcgguuacugucugacucgcuggaugcucauugaggcagagcuuaaaugcuucgggaauacagccgucgcuaaguguaacgaaaaacaugaugaggaauuuugcgacaugcugagauuguucgauuucaauaagcaggccauccagaggcuaaaagcggaggcacaaaugagcauacagcugauuaacaaggccgugaaugcucucaucaacgaccagcugaucaugaagaaucaccuucgggauauuaugggaaucccauauugcaacuacucgaaauauugguaccugaaucacaccucuacgggccgcaccuccuugcccaaguguuggcucguaucaaacggcaguuaccugaaugaaacacauuuuagcgacgacauugagcaacaggccgauaacaugauaacugagauguuacagaaagaauauaucgaccgacaggggaagaccccucugggucuaguugaucucuucguguuuuccacaucuuucuaccugauuagcaucuuucuucacuuggucaaaaucccaacucauagacacauugugggaaagucaugccccaaaccucauaggcugaaucacaugggcauauguaguugcgggcucuauaagcggccaggagugccggucaaguggaaacguuga

SEQ ID NO: 1074 - RNA, 1473 nt, Artificial Sequence
  derived and/or modified protein sequence (opt3) from LASV(Lassa virus/H.sapiens-wt/NGA/2015/ISTH_0821;Clade II)__AVO03641__GPC
augggccagaucauuaccuucuuucaagaggugccccacgucauagaagagguuaugaacaucgugcugauugcccucagccuucuggcuaucuugaaggggauuuacaauguagcaacaugcggauuauucggucugguguccuuucuacuccuguguggcagaucuugcucaacuacguauaaaggggucuacgaacuucagacccuggaguuggacauggccagucucaacaugacaaugccucugagcuguacuaagaauaacucccaucacuauaucauggugggaaaugaaaccggccuggagcucacauuaaccaacacuucuauaaucaaucauaaauucugcaaccugucggaugcgcacaagaaaaaucuuuacgaccauacauugaugucaauuaucagcaccuuucaccugaguauuccaaacuucaaucaguaugaggcuauguccugugauuuuaacggugggaagaucucuguucaguacaaucuaagccacacguaugccguggacgcagccaaccauugcggaacuauagcuaauggcguccuccaaaccuucaugaggauggcauggggcggguccuacauugcccuggauucaggaaaggguaacugggacuguaucaugacaaguuaccaguaucuuauuauccagaacacuaccugggaagaucacugccaguuuagccggccgucucccaucggcuaccugggguugcucucccaacgcacacgagacauuuauauaucacguagacuguuaggaaccuucacguggacucugagcgauagugagggcaaugaaacaccugguggguacugucucaccagguggaugcuuaucgaggcugagcugaaaugcuuuggaaacacugccguggcgaaguguaaugaaaaacaugacgaggaguucugcgauauguugcggcuauuugacuucaacaagcaggcaauuucucgccugaaaacagaagcccagauguccauccagcucauaaauaaggcuguaaacgcccugauuaaugaucaacuuaucaugaagaaccaccugagagacaucaugggcauuccauauugcaauuacagcaaauauugguacuugaaccacaccguuacgggcaagaccucgcuccccagguguuggcuggugucuaauggguccuacuuaaacgaaacacauuucucagacgauaucgagcagcaggcagacaauaugauuacugagaugcugcaaaaagaauauauagaucggcagggaaagaccccucuaggucucgucgaccuguuuguguucaguacuagcuuuuaccuuaucuccauuuucuugcaccuggugaaaaucccaacacaucgccacgucaucggcaagcccugcccuaaaccacaucgacucaaccacauggggauuuguucuugcggacuguauaagcacccgggcguucccgugaaguggaaaagauga

SEQ ID NO: 1075 - RNA, 1473 nt, Artificial Sequence
  derived and/or modified protein sequence (opt3) from LASV(Lassa virus/H.sapiens-wt/NGA/2015/ISTH_0831;Clade II)__AVO03545__GPC
augggccagaucgugaccuucuuucaagaggucccccacguuauugaagagauaaugaacaucgugcugauuacacucagccuucuggccaucuugaaggggguauacaauuuagcuacuugcggacugauuggucuaaucacguuccucuuucuguguggcagauccugcucuaugaccuauaaagggucauaccagcuugaaacacuggaguugaacauggaaacucucaauaugaccaugccucugaguuguacaaagaacaccagccaucacuauauaagggugggaaaugagacuggccuggagcucacauuaaccaacacguccaucauuaaucauaaauucugcaaccugucugacgcacacaagaaaaaucuuuacgaucauucguugaugucaaucgucagcacuuuucaccugaguauuccaaacuucaaucaguaugaagccauguccugugacuuuaacggugggaagaucucuauacaguacaaucuaagccacgcguaugcuggagaugccgcaaagcauugcggcacccucgccaacggcgugcugcaaacauucaugcggauggcuuggggaggguccuacauugcacuugacucaggucgcggcaauugggauuguaucaugaccaguuaccaguaucugauuauccagaacacuacaugggacgaucacugccaguuuagccgaccgucucccaucggguacuugggacuccugucccaacguaccagagagauuuauauaucaaggcgguuacugggcacguucacuuggacacucagcgacagugaagguaacgaggccccugggggauacugucuuacccgcuggaugcugaucgaggcugaauugaaaugcuuuggcaauacugccguugcgaaguguaacgagaaacaugaugaagaguucugcgacaugcuaagacuguuugauuucaauaagcaggcaauucagaggcucaaaacagaagcccagaugucuauccaacugauaaacaaggcugugaaugcccuuauuaacgaccagcugaucaugaagaaucacuugcgggauaucaugggcauuccauauugcaacuacuccaaauauugguaccucaaucacaccacgaccgggcgcacaagccugccccgauguugguuagucucgaacggaucuuaccugaaugagacucauuucuccgacgacaucgagcagcaagcagauaacaugauuaccgaaaugcuacagaaggaguauauagacagacaggguaaaacaccucucggccugguggaucuuuuuguauucucaaccaguuuuuacuugaucagcauuuuccugcaccucguuaagaucccaacucauaggcacaucguggggaaauccugccccaagccucaucggcugaaucacaugggaauuuguucuugcggccuuuauaaacagccaggugucccggugcguuggaagcgcuga

SEQ ID NO: 1076 - RNA, 1473 nt, Artificial Sequence
  derived and/or modified protein sequence (opt3) from LASV(Lassa virus/H.sapiens-wt/NGA/2016/ISTH_0009;Clade II)__AVO03571__GPC
augggccagaucauuaccuucuuucaagaggugccccacgucauagaagagguuaugaacaucgugcugauugcccucagccuucuggcuaucuugaaggggauuuacaauguagcaacaugcggauuacugggucuaguguccuuccuccugcuuuguggcagaucuugcucaacuacguauaaaggggucuacgaacugcagaccuuggagcucgacauggccagucugaacaugacaaugccucugagcuguacuaagaauaacucccaucacuauaucauggugggaaaugaaaccggccucgaguuaacacugaccaacacuucuauaaucaaucauaaauuuugcaaccuuucggaugcgcacaagaaaaauuuguacgaccaugcucugaugucaauuaucagcacauuccaccuaaguauuccaaacuuuaaucaguaugaggccauguccugugauuucaacggugggaggaucucuguucaguacaaucucagccacuccuaugcaguggacgccgcuaaccauugcggaaccauagcaaauggcguccugcaaacguuuaugcggauggccuggggcgggucauacauugcucuugauaguggaaaggguagcugggacuguaucaugacuucuuaccaguaucugauuauccagaacaccacaugggaagaucacugccaguucucccgcccgucacccaucggcuacuuggggcuccugagccaacgaacucgugacauuuauauaaguagaagguuacugggaaccuuuacauggacccucucugauuccgagggcaacgaaacgccugguggguacugucuuacucgguggaugcugaucgaggccgaguugaagugcuucggaaauacagcgguggcaaaauguaacgaaaagcaugacgaggaauuuugcgauaugcuacgccuguucgacuuuaauaaacaggccauuagaaggcucaagaccgaggcucagaugagcauccagcugauaaacaaagccguaaaugcacuuauuaacgaucaacugaucaugaagaaucacuugcgggacaucaugggcauuccauauugcaacuacucgaaguauugguaccucaaucacacuguuacaggcaaaaccucucugccccgcuguugguuaguguccaacgggucauaccugaaugaaacgcauuucagugacgauaucgagcagcaggcugacaacaugauuaccgagcuacuccaaaaggaauauauagaucgacagggaaaaacaccucugggucuugucgacuuguucguguuuagcacuuccuucuaccugaucucuauuuuucuccaccuggugaagaucccaacccauagacacaucacaggcaaacccugcccuaagccacauaggcuuaaucacauggggauuuguagcugcggacuguauaaccacccgggcguccccguuaaauggaagcgguga

SEQ ID NO: 1077 - RNA, 1473 nt, Artificial Sequence
  derived and/or modified protein sequence (opt3) from LASV(Lassa virus/H.sapiens-wt/NGA/2016/ISTH_0017;Clade II)__AVO03567__GPC
augggccagaucauuaccuucuuucaagaggugccccacgucauagaagagguuaugaacaucgugcugauugcccucagccuucuggcuaucuugaaggggauuuacaauguagcaacaugcggauuauucggucugguguccuuucuacuccuguguggcagaucuugcucaacuacguauaaaggggucuacgaacuucagacccuggaguuggacauggccagucucaacaugacaaugccucugagcuguacuaagaauaacucccaucacuauaucauggugggaaaugaaaccggccuggagcucacauuaaccaacacuucuauaaucaaucauaaauucugcaaccugucggaugcgcacaagaaaaaucuuuacgaccaugcuuugaugucaauuaucagcacauuucaccugaguauuccaaacuucaaucaguaugaggccauguccugugauuuuaacggugggaagaucucuguucaguacaaucuaagccacaccuaugcaauagacgccgcuaaccauugcggaacgauugcaaauggcgugcuccaaacuuucaugaggauggccuggggcggguccuacaucgcucuggauucaggaaaggguaguugggacuguauuaugaccagcuaccaguaucuuaucauccagaacacaacuugggaagaucacugccaguuuucucggccgucccccauuggcuaccugggguugcucucacaacgcacccgagacauauauaucagccguagacuguuaggaacauucaccuggacgcugagugauucugagggcaacgaaacuccugguggguacugucucacaagguggaugcuuauugaggccgagcugaaaugcuuuggaaauaccgcggucgcaaaguguaacgaaaaacaugacgaggaguucugcgauauguugcggcuauuugacuucaauaagcaggccauccgcagacugaaaacugaagcucagauguccauacagcucauuaacaaggccgugaaugcacugaucaacgaucaacuuaucaugaagaaucaccugagggacauuaugggcaucccauauugcaacuacagcaaauauugguacuugaaucacacaguaaccggcaagacgucgcucccccgguguuggcugguuucuaacggguccuacuuaaaugaaacccauuucucagacgauauugagcagcaggcugacaacaugauaacagagcugcuacaaaaagaauauauggaucgccagggaaagacuccucucggucugguggaccuuuuugucuucaguaccagcuuuuacuugaucuccauuuuccugcaccucgugcgaaucccaacacauagacacgugaucggcaaacccugcccuaagccacauaggcugaaucacauggggauuuguucuugcggacuuuauaaacacccgggcguccccguuaaguggaagcgguga

SEQ ID NO: 1078 - RNA, 1473 nt, Artificial Sequence
  derived and/or modified protein sequence (opt3) from LASV(Lassa virus/H.sapiens-wt/NGA/2016/ISTH_0035;Clade II)__AVO03619__GPC
augggccagaucauuaccuucuuucaagaggugccccacgucauagaagagguuaugaacaucgugcugauugcccucagccuucuggcuaucuugaaggggauuuacaauguagcaacaugcggauuauucggucugguguccuuucuacuccuguguggcagaucuugcucaaugacuuauaaaggggucuacgaacuucagacgcuggaguuggacauggccagucucaacaugaccaugccucugagcuguacaaagaauaacucccaucacuauaucauggugggaaaugaaacuggccuggagcucaccuuaacaaacaccucuauaaucaaucauaaauucugcaaccugucggaugcgcacaagaaaaaucuuuacgaccaugcuuugaugucaauuaucagcacuuuucaccugaguauuccaaacuucaaucaguaugaggccauguccugugauuuuaacggugggaagaucucuguucaguacaaucuaagccacacauaugcaguggacgccgcuaaccauugcggaaccauagcaaauggcguccuccaaacguucaugaggauggccuggggcggguccuacauugcucuggauucaggaaaggguaguugggacuguaucaugacuagcuaccaguaucuuauuauccagaacaccacaugggaagaucacugccaguuuucucggccgucccccaucggcuaccugggguugcucucacaacgcacucgagacauuuauauaagccguagacuguuaggaaccuucacauggacccugagugauucugagggcaacgaaacgccugguggguacugucucacuagguggaugcuuaucgaggccgagcugaaaugcuuuggaaauacagcgguggcaaaguguaacgaaaaacaugacgaggaguucugcgauauguugcggcuauuugacuucaauaagcaggccauucgcagacugaaaaccgaagcucagauguccauccagcucauaaacaaggccguaaaugcacugauuaacgaucaacuuaucaugaagaaucaccugagggacaucaugggcauuccauauugcaacuacagcaaauauugguacuugaaucacacuaucacaggcaagaccucgcucccccgguguuggcugguuucuaacggguccuacuuaaaugaaacgcauuucucagacgauauugagcagcaggcugacaacaugauaaccgagcugcuacaaaaagaauauauggaucgccagggaaagacaccucucggucugguggaccuuuuugucuucaguacuagcuuuuacuugaucuccauuuuccugcaccucgugaaaaucccaacccaucgacacgugaucggcaagcccugcccuaaaccacauagacugaaucacauggggauuuguucuugcggacuuuauaagcacccgggcguccccguuaaguggaaaagguga

SEQ ID NO: 1079 - RNA, 1473 nt, Artificial Sequence
  derived and/or modified protein sequence (opt3) from LASV(Lassa virus/H.sapiens-wt/NGA/2016/ISTH_0104;Clade II)__AVO03631__GPC
augggccaggugaucaccuucuuucaagaggucccccacguuauugaagaggugaugaacauaguacugaucgcccucagccuucuggcuauuuugaaggggaucuacaauguggcaacaugcggauuauucggucugauuuccuuucuacuccuguguggcagaucuugcucaacuacguauaaaggggucuacgaacuucagacccuggaguugaacaugcagaaucucaacaugacaaugccucugaguuguacuaagaauagcucccaucacuauaucauggugggaaacgaaaccggccuggagcucacauuaaccaauacuucuauaaucaaccauaaauucugcaaucugucggacgcccacaagaaaaaccuuuacgaucaugcguugaugucaauuaucagcacauuucaccugaguauuccaaauuucaaccaguaugaggcuauguccugugacuuuaauggugggaagaucucuguucaauacaaccuaagccacaccuaugccauagaugcagccaaucauugcggaacgguggcuaacggcguccuccagacuuucaugaggauggcauggggcggguccuacauugcccuggacucaggacgggguaacugggauuguaucaugaccaguuaccaguaucuuauuauccagaauacaacuugggaagaccacugccaauuuagccgcccgucucccaucggcuaccugggguugcucucccagcgaacccgugauauuuauauaucaagaaggcuguuaggaacauucaccuggacgcugagcgacagugagggcaacgaagcuccugguggguacugucucacucgguggaugcuuaucgaggccgagcugaagugcuuuggaaauacagcgguggcaaaauguaacgaaaagcaugaugaggaguucugcgacauguugcgccuauuugauuucaauaaacaggccauuaagagacugaaaaccgaagcucagaugucuauccaacucauaaacaaggccguaaaugcacugauuaacgaccagcuuaucaugaagaaucaccugagggauaucaugggcauuccauauugcaacuacuccaaauauugguacuugaaucacacuguuacaggccggaccagccucccccgcuguuggcuggugucgaacgggucuuacuuaaaugacacgcaguucuccgacgauaucgaacaacaggcugacaacaugauuaccgagaugcugcagaaggaguauauggaucgacagggaaaaacaccucuaggucucgucgaccuguuuguguucucaaccaguuuuuaccuuauaagcaucuucuugcaucuggugaagauuccaacucacagacauaucgucggcaggcccugcccuaaaccacaccggcucaaucauauggggaucuguuccugcggacuguauaagcacccgggcguucccgugaaauggaagcguuga

SEQ ID NO: 1080 - RNA, 1476 nt, Artificial Sequence
  derived and/or modified protein sequence (opt3) from LASV(Lassa virus/H.sapiens-wt/NGA/2016/ISTH_0133;Clade II)__AVO03635__GPC
augggccagaucauuaccuucuuucaagaggugccccacgucauagaagagguuaugaacaucgugcugauugcccucagccuucuggcuguauugaaggcaaucuacaauguggccacaugcggggucuucggauuaauuuccuuucugcuacucugugguagaucuugcucaacuacguauaaaggcguguacgaacugcagacccuugagcuggacauggcgaacuugaauaugacaaugccucucaguuguacuaagaacaauagccaucacuauaucaugguugggaacgaaaccggacuggagcugacacucaccaauacuuccauaaucaaccauaaauucugcaauuuaucugaugcucacaagaaaaaccuguacgaccauucgcuuaugucaauuaucagcacauuucacuugaguauuccaaauuucaaccaguaugaggccauguccugugauuuuaauggcgguaagaucucugugcaguacaaccugagccacuccuaugcagucgacgccgcuaagcauugcgggaccauagcaaauggagugcuacaaacguucaugaggauggccuggggcggcucauacauugcucucgauagugggaaaggagguugggacuguaucaugacuagcuaccaguaucugauuauccagaacaccacaugggaagaucacugccaguuuucucggccgucccccaucggcuaccuugggcuguugucacaacgcacucgagacauuuauauaagccguagacuccugggaaccuucacauggaccuuaagugauucugagggcaacgacgccccugguggguacugucugacgagguggaugcucaucgaagcggagcuuaagugcuuuggaaauacugcaauugccaaauguaacgagaagcaugaugaagaguucugcgacaugcugcgguuguuugauuucaaucgccaggcuaucaaaagacuaaagacagaagcccagauguccauacagcugauuaacaaggcaguaaaugcucucaucaacgaccaacugaucaugaaaaaucaccuuagggacauuaugggcaucccauauugcaacuacagcaaguauugguaccugaaucacaccauuacuggcaaaacaucguugccccgguguuggcucguuucuaacggguccuaccugaaugagacccauuucucagaugacauagaacagcaggccgauaacaugaucacggaguuacugcaaaaggaguauauggaccgccagggaaaaaccccucuaggucucguggaucuguuugucuucaguacuagcuuuuaccuuauuuccaucuucuugcaccuggugaagaucccaacacaucgacacauugugggcaaacccugcccuaagccacauagacucaaucacauggggauauguucuugcggacuguauaagcacccgggcguccccguuaaauggaagaggcaguga

SEQ ID NO: 1081 - RNA, 1473 nt, Artificial Sequence
  derived and/or modified protein sequence (opt3) from LASV(Lassa virus/H.sapiens-wt/NGA/2016/ISTH_0141;Clade II)__AVO03649__GPC
augggccagaucauuaccuucuuucaagaggugccccacgucauagaagagguuaugaacaucgugcugauuacacucagccuucuggccaucuugaaggggauuuacaauguagcuacuugcggauuauucggucugguguccuuucuacuccuguguggcagaucuugcucaacgaucuauaaaggggucuacgaacuucagacccuggaguuggacauggcaagucucaacaugacaaugccucugagcuguacuaagaauaacucccaucacuauauaauggugggaaaugaaaccggccuggagcucacauuaaccaacacuucuaucauuaaucauaaauucugcaaccugucggaugcccacaagaaaaaucuuuacgaccaugcguugaugucaaucauuagcacauuucaccugaguaucccaaacuucaaucaguaugaggcuauguccugugauuuuaacggugggaagauaucuguucaguacaaucuaagccacaccuaugccguggacgcagccgaacauugcggaacgauugcuaacggcguccuccaaacuuucaugaggauggcauggggcggguccuacaucgcccuggauucaggaaaggguaguugggacuguauuaugaccagcuaccaguaucuuaucauccagaauacaacuugggaggaucacugccaguuuucucggccgucccccauuggcuaccugggguugcucucacaacgcacccgagacauauauaucagccguagacuguuaggaacauucaccuggacgcugagugauucugaaggcaacgagacuccugguggguacugucucacaagguggaugcuuauugaggcugaacugaaaugcuuuggaaacaccgccguggcgaaguguaaugagaaacaugacgaagaguucugcgauauguugcggcuauuugacuucaacaagcaggcaauccgcagacugaaaacugaagcccagauguccauacagcucauuaauaaggcuguaaacgcccugaucaaugaucaacuuaucaugaagaaccaccugagggacauuaugggcaucccauauugcaauuacagcaaauauugguacuugaaccacacaguuaccggcaagacgucgcucccccgguguuggcuggugucuaauggguccuacuuaaacgagacccgcuucucagacgauauugagcagcaggcagacaauaugauaacagaacugcuacaaaaagaguauaucgaucgacagggaaagacuccucucggucuggucgaccuuuuuguguucaguaccagcuuuuacuugauuuccaucuuccugcaucucgugaaaaucccaacacacagacauauuauaggcaagcccugcccuaaaccacacaggcugaaccauauggggaucuguucuugcggacuuuauaagcacccgggcauucccgucaaguggaaacgguga

SEQ ID NO: 1082 - RNA, 1473 nt, Artificial Sequence
  derived and/or modified protein sequence (opt3) from LASV(Lassa virus/H.sapiens-wt/NGA/2016/ISTH_0146;Clade II)__AVO03633__GPC
augggccagaucauuaccuucuuucaagaggugccccacgucauagaagagguuaugaacaucgugcugauugcccucagccuucuggcuaucuugaaggggauuuacaauguagcaacaugcggauuauucggucugguguccuuucuacuccuguguggcagaucuugcucaacuacguauaaaggggucuacgaacuucagacccuggaguuggacauggccagucucaacaugacaaugccucugagcuguacuaagaauaacucccaucacuauaucauggugggaaaugaaaccggccuggagcucacauuaaccaacacuucuauaaucaaucauaaauucugcaaccugucggaugcgcacaagaaaaaucuuuacgaccaugcuuugaugucaauuaucagcacauuucaccugaguauuccaaacuucaaucaguaugaggccauguccugugauuuuaacggugggaagaucucuguucaguacaaucuaagccacaccuaugcaguggacgccgcuaaccauugcggaacgauagcaaauggcguccuccaaacuuucaugaggauggccuggggcggguccuacauugcucuggauucaggaaaggguaguugggacuguaucaugaccagcuaccaguaucuuauuauccagaacacaacuugggaagaucacugccaguuuucucggccgucccccaucggcuaccugggguugcucucacaacgcacccgagacauuuauauaagccguagacuguuaggaacauucaccuggacgcugagugauucugagggcaacgaaacuccugguggguacugucucacaagguggaugcuuaucgaggccgagcugaaaugcuuuggaaauaccgcgguggcaaaguguaacgaaaaacaugacgaggaguucugcgauauguugcggcuauuugacuucaauaagcaggccauucgcagacugaaaacugaagcucagauguccauccagcucauaaacaaggccguaaaugcacugauuaacgaucaacuuaucaugaagaaucaccugagggacaucaugggcauuccauauugcaacuacagcaaauauugguacuugaaucacacaguuaccggcaagacgucgcucccccgguguuggcuggugucuaacggguccuacuuaaaugaaacccauuucucagacgauaucgagcagcaggcugacaacaugauuacagagcugcuacaaaaagaauauauggaucgccagggaaagacuccucucggucuggucgaccuuuuuguguucaguaccagcuuuuacuugauauccaucuuccugcaccucgugaaaauuccaacacaucgacacgucaucggcaagcccugcccuaaaccacauagacugaaucacauggggaucuguucuugcggacuuuauaagcacccgggcguucccgugaaguggaaaagguga

SEQ ID NO: 1083 - RNA, 1473 nt, Artificial Sequence
  derived and/or modified protein sequence (opt3) from LASV(Lassa virus/H.sapiens-wt/NGA/2016/ISTH_0187;Clade II)__AVO03549__GPC
augggccagaucgugaccuucuuucaagaggucccccacguuauugaagaggugaugaacauaguacugaucgcccucagcgugcuugcuauucugaagggguuguacaauuucgcaacaugcggauuaaucggucuggucacuuuucuacuccuguccggcagaucuuguucaaugguguauaaagggguuuacgaacuucagacgcuggaguugaacauggaaacccucaauaugacaaugccucugaguugcacuaagaacaauagccaucacuauauuagggugggaaacgacaccggccuggagcucacauuaaccaauaacacucugcuuaaucauaaauucuguaacuuguccgaugcccacaagaaaaaucuguacgaccaugcgcuaaugucuaucauaucgacauuucaccucucaaucccaaacuucaaucaguaugaggcuaugagcugcgauuuuaacggugggcggauuaccguccaguacaaucugagucacuccuaugccguggacgcagccaaccauuguggaacgguagcuaacggcguucuucaaacuuucaugcgcauggcauggggcgggucuuacaucgcccuggauagccgacacggaaauugggacugcauuaugaccuccuaccaguauuugaucauacagaacacaacuugggaagaucauugucaguuuucacguccgagucccauugguuaccucggccuguuaagccaaagaaccagggacaucuauauuucucggcgccugcucgggacauucaccuggacgcuuuccgauucagagggaaaugaaacuccuggcgguuacugccugacaagauggauguugaucgaggcugagcuaaaguguuuugggaacaccgccguggcgaagugcaaugaaaaacacgacgaggaguucugugauaugcugaggcucuuugacuucaacaagcaggcaauccggcgccugaaagccgaagcucagaugagcauucagcuuauaaauaaggccgucaacgcacugaucaaugaucaauugauuaugaaaaaccaccuccgagacaucaugggaauaccauauugcaauuacaguaaguauugguaccugaaccauacuucuacaggcaagaccuccuuacccagaugcuggcuggugagcaauggcucguaccuaaacgaaacgcacuucucugacgauauugagcagcaggcugacaauaugaucaccgagaugcuccaaaaagaauaucuggauaggcaggggaagacaccucuuggauugguggacaucuuugucuucuccacuucauuuuaccugauuaguaucuuccuccaucugauuaaaauaccaacccaccggcauaucguugguaagcccuguccuaaaccacaccgucuuaaccacaugggcauuugcagcugugggcuguauaagcagccgggagugcccguacgcuggaaaagauga

SEQ ID NO: 1084 - RNA, 1473 nt, Artificial Sequence
  derived and/or modified protein sequence (opt3) from LASV(Lassa virus/H.sapiens-wt/NGA/2016/ISTH_0199;Clade II)__AVO03653__GPC
augggccagaucauuaccuucuuucaagaggugccccacgucauagaagagguuaugaacaucgugcugauugcccucagccuucuggcuaucuugaaggggauuuacaauguagcaacaugcggauuauucggucugguguccuuucuacuccuguguggcagaucuugcucaacuacguauaaaggggucuacgaacuucagacccuggaguuggacauggccagucucaacaugacaaugccucugagcuguacuaagaauaacucccaucacuauaucauggugggaaaugaaaccggccuggagcucacauuaaccaacacuucuauaaucaaucauaaauucugcaaccugucggaugcgcacaagaaaaaucuuuacgaccaugcuuugaugucaauuaucagcacauuucaccugaguauuccaaacuucaaucaguaugaggccauguccugugauuuuaacggugggaagaucucuguucaguacaaucuaagccacaccuaugcaguggacgccgcuaaccauugcggaacgauagcaaauggcguccuccaaacuuucaugaggauggccuggggcggguccuacauugcucuggauucaggaaaggguaacugggacuguaucaugaccaguuaccaguaucuuauuauccagaacacaacuugggaagaucacugccaguuuagccggccgucucccaucggcuaccugggguugcucucccaacgcacccgagacauuuauauaucacguagacuguuaggaacauucaccuggacgcugagcgauagugagggcaaugaaacuccugguggguacugucucacaagguggaugcuuaucgaggccgagcugaaaugcuuuggaaacaccgcgguggcaaaguguaaugaaaaacaugacgaggaguucugcgauauguugcggcuauuugacuucaacaagcaggccauuucucgccugaaaacugaagcucagauguccauccagcucauaaauaaggccguaaacgcacugauuaaugaucaacuuaucaugaagaaccaccugagagacaucaugggcauuccauauugcaauuacagcaaauauugguacuugaaccacacaguuaccggcaagacgucgcuccccagguguuggcuggugucuaauggguccuacuuaaacgaaacccauuucucagacgauaucgagcagcaggcugacaauaugauuacagagaugcugcaaaaagaauauauagaucggcagggaaagacuccucuaggucucgucgaccuguuuguguucaguaccagcuuuuaccuuaucuccauuuucuugcaccuggugaaaaucccaacacaucgccacgucaucggcaagcccugcccuaaaccacaucgacucaaccacauggggauuuguucuugcggacuguauaagcacccgggcguucccgugaaguggaaaagauga

SEQ ID NO: 1085 - RNA, 1473 nt, Artificial Sequence
  derived and/or modified protein sequence (opt3) from LASV(Lassa virus/H.sapiens-wt/NGA/2016/ISTH_0419;Clade II)__AVO03539__GPC
augggccagaucgugaccuucuuucaagaggucccccacguuauugaagaggugaugaacauaguacugaucgcccucagccuucuggcuauuuugaaggggaucuacaauuucgcaacaugcggauuaauuggucugaucacuuuucuauuccucuguggcagauccugcucugccauauauaaagggucauaccagcugcagacgaucgaacuuaacauggagacccugaauaugacaaugccuuugaguuguacuaagaacagcucccaucacuauauuagggugggaaaugaaaccggccucgagcugacacugaccaacaucucuauuaucgaccauaaauuuugcaaucucucggaugcgcacaagaaaaacuuauacgaccaugcucugaugucaauaauuagcacuuuccaccuuaguaucccaaauuuuaaccaguaugaggccauguccugugauuucaauggugggaagauuucuguccaauacaacuugagccacacauaugcaguggacgccgcuaaucauugcggaaccguugcaaacggcgugcugcagacguuuaugcggauggccuggggcggguccuacaucgcucuagauucaggacgcgguaauugggacuguaucaugacaaguuaccaguaucucauuauacagaacaccacaugggaagaucacugccaauucagccgaccgucucccaucggcuaccuggggcuucugucccagcguacuagagacauuuauaucucaaggcgguugcucggaaccuuuacauggacccugagcgauagugagggcaaggaaacgccugguggguacuguuuaacucgcuggaugcugauagaggccgagcucaaaugcuucggaaacacagcggucgcaaaguguaaugaaaaacaugacgaggaauuuugcgauaugcuuagacuguucgacuucaacaagcaggccauucagagguugaaagcugaggcccaaaugucuauccagcuaaucaauaaggcagugaacgcucugauuaaugaucagcucaucaugaagaaccaucugcgggacauuaugggcauaccauauugcaauuacuccaaauauugguaccuuaaccacaccagcacuggccgcacaucgcugccccgauguugguugguaucuaauggguccuaccucaacgaaacccacuuuucagacgauaucgagcaacaggccgacaauaugauuacggagaugcugcagaaggaauauaucgauagacagggaaaaaccccuuuaggucugguugaccuauucguguuuaguacuagcuucuaccucaucuccauuuuucugcaccuuauaaagaucccaacucauaggcacauugucggcaaaucuugccccaagccucaucgguugaaccacauggggaucuguagcugcggacuguauaaacaaccaggcgugccggugaaguggaagcguuga

SEQ ID NO: 1086 - RNA, 1473 nt, Artificial Sequence
  derived and/or modified protein sequence (opt3) from LASV(Lassa virus/H.sapiens-wt/NGA/2016/ISTH_0447;Clade II)__AVO03559__GPC
augggccagaucauuaccuucuuucaagaggugccccacgucauagaagagguuaugaacaucgugcugauugcccucagccuucuggcuaucuugaaggggauuuacaauaucgcaacaugcggauuauucggucugguauccuuucuacuccuguguggcagaucuugcucaacuacguauaaagggguguacgaacuucagacccuggaguuggacauggccagucucaacaugacaaugccucugagcuguacuaagaauaacucccaucacuauauaauggucggaaaugaaaccggccuggagcucacauuaaccaacacuucuaucauuaaucauaaauucugcaaccugucggaugcgcacaagaaaaaucuuuacgaccauacauugaugucaaucauuagcaccuuucaccugaguaucccaaacuucaaucaguaugaggcuauguccugugauuuuaacggugggaagauaucugugcaguacaaucuaagccacgccuaugcaguugacgccgcuaaccauugcggaacgauugcaaauggcgugcuccaaacuuucaugaggauggccuggggcggguccuacaucgcucuggauucaggaaaggguaacugggacuguauuaugaccaguuaccaguaucuuaucauccagaacacaacuugggaagaucacugccaguuuagccggccgucucccauuggcuaccugggguugcucucccaacgcacccgagacauauauaucucacguagacuguuaggaacauucaccuggacgcugagcgauagugagggcaaugaaacuccugguggguacugucucacaagguggaugcuuauugaggccgagcugaaaugcuuuggaaacaccgcggucgcaaaguguaaugaaaaacaugacgaggaguucugcgauauguugcggcuauuugacuucaacaagcaggccauccgcagacugaaaacugaagcucagaugucuauacagcucauuaauaaggccgugaacgcacugaucaaugaucaacuuaucaugaagaaccaccugagggacauuaugggcaucccauauugcaauuacuccaaauauugguacuugaaccacacaguaaccggcaagacgagccucccccgguguuggcugguuucgaaugggucuuacuuaaacgaaacccauuucuccgacgauauugagcagcaggcugacaauaugauaacagagcugcuacaaaaagaauauaucgaucgccagggaaagacuccucucggucugguggaccuuuuugucuucucaaccaguuuuuacuugauuagcaucuuccugcaccucgugaaaaucccaacacaucgacacguggucggcaagcccugcccuaaaccacauagacugaaccacauggggauuuguuccugcggacuuuauaagcacccgggcguucccgugaaguggaaaagguga

SEQ ID NO: 1087 - RNA, 1473 nt, Artificial Sequence
  derived and/or modified protein sequence (opt3) from LASV(Lassa virus/H.sapiens-wt/NGA/2016/ISTH_0543;Clade II)__AVO03595__GPC
augggccagaucauuaccuucuuucaagaggugccccacgucauagaagagguuaugaacaucgugcugauugcccucagccuucuggcuaucuugaaggggauuuacaauaucgcaacaugcggauuauucggucugauauccuuucuacuccuguguggcagaucuugcucaacuacguauaaagggguauacgaacuucagacccuggaguuggacauggccaaccucaauaugacaaugccucugaguuguacuaagaacaauagccaucacuauaucauggugggaaacgaaaccggccuggagcucacauuaaccaauacuuccauuaucaaccauaaauucugcaaucugucugaugcgcacaagaaaaaccuuuacgaccaugcuuugaugucgauuaucucaacauuucaccugagcauaccaaauuucaaccaguaugaggccaugaguugugauuuuaauggugggaagauuuccguccaguacaaccuaucucacagcuaugcaguggacgccgcuggacauugcggcaccaucgcaaauggcguucuccaaacguucaugaggauggccuggggaggguccuacauugcucuggauucagguaagggcaacugggacuguaucaugaccaguuaccaguaucuugugauccagaacacuacaugggaagaucacugccaguuuagccggccgucucccauuggguaccugggauugcucucccaacgcacucgagacauauauaucucacguagacuguuaggcaccuucacauggacccugagcgauagugaggguaaugaagccccugggggauacugucucacgagguggaugcuuauugaggcggagcugaaaugcuuuggcaacacugcaaucgccaaguguaaugaaaaacaugacgaggaguucugcgauauguugcggcuauuugacuucaacaagcaggcuauacgcagacugaaagccgaagcacagaugucuauucagcucaucaauaaggcugucaacgcccugaucaaugaucaacuuauuaugaagaaccaccugagggacaucaugggcauuccauauugcaauuacuccaaauauugguacuugaaccacacagugaccgggaagacuagccuccccaaauguuggcugguaucgaauggaucuuacuuaaacgaaacacauuucuccgacgauauagagcagcaggcggacaauaugaucaccgagcugcuacaaaaggaauauauggaucggcaggguaaaacgccucucggccugguugaccuuuuuguguucucaaccaguuuuuacuugauuagcaucuuccugcaccucgucaagaucccaacacaucgccacauuguggggcgacccugcccuaaaccacauagacugaaccacaugggaauauguuccugcggccuuuauaagcacccgggugugcccgucaaguggaaaagguga

SEQ ID NO: 1088 - RNA, 1473 nt, Artificial Sequence
  derived and/or modified protein sequence (opt3) from LASV(Lassa virus/H.sapiens-wt/NGA/2016/ISTH_0565;Clade II)__AVO03637__GPC
augggccagaucgugaccuucuuucaagaggucccccacguuauugaagaggugaugaacauaguacugaucgcccucagccuucuggcuauuuugaaggggaucuacaauguggcaacaugcggauuauucggucugauuuccuuucuacuccuguguggcagaucuugcucaacuacguauaaaggggucuacgaacuucagacccuggaguuggacauggccaaccucaauaugacaaugccucugaguuguacuaagaacagcucccaucacuauaucauggugggaaaugaaaccggccuggagcucacauuaaccaacacuucuauaaucaaucauaaauucugcaaccugucggaugcgcacaagaaaaaucuuuacgaccaugcuuugaugucaauuaucagcacauuucaccugaguauuccaaacuucaaucaguaugaggccauguccugugauuuuaacggugggaagaucucuguucaguacaaucuaagccacaccuaugcaguggacgccgcuaaccauugcggaacgauagcaaauggcguccuccaaacuuucaugaggauggccuggggcggguccuacauugcucuggauucaggaaaggguaacugggacuguaucaugaccaguuaccaguaucuuauuauccagaacacaacuugggaagaucacugccaguuuagccggccgucucccaucggcuaccugggguugcucucccaacgcacccgagacauuuauauaucacguagacuguuaggaacauucaccuggacgcugagcgauagugagggcaaugaagccccugguggguacugucucacuagguggaugcuuaucgaggcggagcugaaaugcuuuggaaacacagcaauugccaaguguaaugaaaaacaugacgaggaguucugcgauauguugcggcuauuugacuucaacaagcaggcuaucaaacgccugaagucugaagcccagauguccauacagcucauuaauaaggcagugaacgcucugaucaaugaucaacuuaucaugaaaaaccaccugagagacauuaugggcaucccauauugcaauuacagcagguauugguacuugaaccacaccguaacuggcaagacaucgcucccccgguguuggcugauuucuaauggguccuacuuaaacgaaacccauuucucagacgauauagagcagcaggccgacaauaugaucacggagcugcuacaaaaagaauauauggaucgccagggaaagaccccucucggucugguugaccuuuuuguguucaguacuagcuuuuacuugauuuccaucuuccugcaccucgucaaaaucccaacacaucgacacauugugggcagacccugcccuaagccacauaggcugaaccacauggggauauguucuugcggacuuuauaaacacccgggcgugcccgucaaguggaagcgguga

SEQ ID NO: 1089 - RNA, 1473 nt, Artificial Sequence
  derived and/or modified protein sequence (opt3) from LASV(Lassa virus/H.sapiens-wt/NGA/2016/ISTH_0572;Clade II)__AVO03611__GPC
augggccagaucauuaccuucuuucaagaggugccccacgucauagaagagguuaugaacaucgugcugauugcccucagccuucuggcuaucuugaaggggauuuacaauguagcaacaugcggauuauucggucugguggccuuucuacuccuguguggcagauccugcucuacuacguauaaaggggucuacgaacuucagacccuggaguuggacauggcgucacucaacaugacaaugccucugaguuguacuaagaauaacagccaucacuauaucauggugggaaaugaaaccggccuggagcucacauuaaccaacacuuccauaaucaaucauaaauucugcaaccugucugaugcucacaagaaaaaucuuuacgaccaugccuugaugucgauuaucucaacauuucaccugagcauuccaaacuucaaucagcacgaggcaaugaguugugauuuuaacggugggaagaucuccguucaguauaaucuaucucauaccuacgccguggacgcugcaaaccacugcggaacgauagccaauggcguccuccaaacuuucaugaggauggcuuggggcgggagcuauauugcccuggauuccggaaaggguucaugggacuguaucaugaccaguuaccaguaccuuauuauccagaacacaacuugggaagaucauugccaguuuagccggccgucucccaucggcuaucugggguugcucucccaacgcacccgagacauuuacauaucacguagacuguuaggaacauucaccuggacgcugagcgauagugagggcaacgaaacuccugguggguauugucucacaagguggaugcuuaucgaggcggagcugaaaugcuuuggaaauaccgcaguggccaaguguaacgaaaaacacgacgaggaguucugcgauauguugcggcuauuugacuucaauaagcaggcuauucgcagacugaaaacugaagcccagaugucuauccagcucauaaacaaggcaguaaaugcucugauuaacgaucaacuuaucaugaagaaucaccugagggacaucaugggcauuccauacugcaacuauuccaaauacugguauuugaaucauacaguuaccggccggacgagccucccccgcuguuggcuggugucgaacgggucuuacuuaaaugaaacccacuucuccgacgauaucgagcagcaggccgacaacaugauuacagagcugcuacaaaaggaauacauggaucgacagggaaaaacuccucucggucuggucgaccuuuuuguguucucaaccaguuuuuauuugauaagcaucuuccugcaucucauuaagaucccaacacacagacaugugaucggcaaacccugcccuaagccacacaggcugaaucacauggggauuuguuccugcggacuuuacaaacauccgggcguccccguuaaguggaagcgguga

SEQ ID NO: 1090 - RNA, 1473 nt, Artificial Sequence
  derived and/or modified protein sequence (opt3) from LASV(Lassa virus/H.sapiens-wt/NGA/2016/ISTH_0610;Clade II)__AVO03585__GPC
augggccagaucauuaccuucuuucaagaggugccccacgucauagaagagguuaugaacaucgugcugauugcccucagccuucuggcuaucuugaaggggguauacaauguggcaacaugcggauuauucggucuggucuccuuucuacuccuguguggcagaucuugcucaacuacguauaaagggguguacgaacuucagacccuggaguuggacauggccagucucaacaugacaaugccucugagcuguacuaagaauaacucccaucacuauauuaugguuggaaaugaaaccggccuggagcucacauuaaccaacacuucuaucauaaaucauaaauucugcaaccugucggaugcgcacaagaaaaaucuuuacgaccaugcuuugaugucaaucauuagcacauuucaccugaguaucccaaacuucaaucaguaugaggccauguccugugauuuuaacggugggaagauuucugugcaguacaaucuaagccacaccuaugcagucgacgccgcuaaccauugcggaacgaucgcaaauggcgugcuccaaacuuucaugaggauggccuggggcggguccuacauagcucuggauucaggacgggguaguugggacuguauuaugaccagcuaccaguaucuuaucauucagaacacaacuugggaagaucacugccaguuuucucgcccgucccccaucggcuaccugggguugcucucacaacgaacccgugacaucuauauuagcagaaggcuguuaggaacauucaccuggacgcugagugauucugagggcaacgaaacuccugguggguacugucucacacgguggaugcuuauagaggccgagcugaagugcuuuggaaauaccgcgguagcaaaauguaacgaaaagcaugacgaggaguucugcgauauguugcgccuauuugacuucaauaaacaggccaucagaaggcugaaggcugaagcccagauguccauucagcucaucaacaaagcaguuaaugcucugauaaacgaucaacuuauuaugaagaaucaucugcgggacaucaugggcaucccauauugcaacuacagcaaguauugguacuugaaucacacugugacaggccgcaccucgcucccccgauguuggcuggucucuaacggguccuacuuaaaugaaacgcacuucucagacgauauugagcagcaggccgacaacaugaucaccgagcugcuacaaaaagaauauauugauagacagggaaagacaccucucggucugguggaccuuuuuguguucaguacuagcuuuuacuugauauccaucuuccugcaccucgucaaaauuccaacccauaggcacaucaucggcaagcccugcccuaaaccacaucggcugaaucacauggggauuuguucuugcggacuuuauaagcacccgggcguucccgugaaauggaagcguuga

SEQ ID NO: 1091 - RNA, 1473 nt, Artificial Sequence
  derived and/or modified protein sequence (opt3) from LASV(Lassa virus/H.sapiens-wt/NGA/2016/ISTH_0621;Clade II)__AVO03543__GPC
augggccagaucgugaccuucuuucaagagauuccccacgucguugaagagauaaugaacaucgugcugauuacacucagccuucuggccaucuugaagggguuauacaauuucgcuacuugcggacugauuggucuaaucacguuucucuuccuguguggcagauccugcucuaccauauauaaagggucauaccagcuucaggcacuggaauugaacauggagacacucaauaugacuaugccucugaguuguaccaagaacaauagccaucacuauaucaggguaggaaacgaaacaggccuggagcucaccuuaacuaauacauccauuaucgaccauaaauuuugcaaccugucugaugcccacaagcggaaucuuuacgaccauaccuugaugucgauuaucucaacguuccaccugagcauaccaaacuuuaaucaguaugaggcgaugaguugugauuucaacggugggaaaauuuccgugcaauacaaucuaucucacagcuaugcuggagacgccgcacgccauugcggcacugucgccaacggcgugcuccagaccuuuaugcgaauggcuuggggaggguccuacaucgcacuggauucagguaagggcaauugggacuguauuaugacaaguuaccaguaucuuaucauccagaacacuaccugggaaaaccacugccaauucagccguccgucucccauuggguaccugggauugcucucccagagaacaagggauauauauaucucacggcgccuguuaggcaccuuuacguggacucugagcgacagugaggguaaggaaacaccugggggauacugucucaccagauggaugcuuauugaggccgagcugaaaugcuucggcaauacugcuguugccaaguguaacgaaaaacaugaugaggaauuuugcgacauguugaggcuauucgauuucaauaagcaggcgauccagcggcugaaaacagaggcacaaaugucuauacagcucauuaacaaggccgugaaugcucugaucaacgaccagcuuaucaugaagaaucaucugcgcgauauuaugggcaucccauauugcaacuacuccaaauauugguacuugaaucacaccacgaccgggaagacaagccuccccaaauguuggcuggucucgaacggaucuuacuuaaaugaaacucacuuuuccgacgacauugagcaacaggccgauaacaugauaaccgagaugcugcagaaggaauauaucgaccgacaggguaaaacaccucuaggccucguggaucuguucguauuuucaaccaguuucuaccuuauuagcaucuuuuugcaccugaucaagauuccaacucauagacacauaguugggaaauccugccccaagccucauaggcucaaucacaugggaaucuguucuugcggccuguauaagcaaccaggugugcuugucaaauggaagcgguga

SEQ ID NO: 1092 - RNA, 1473 nt, Artificial Sequence
  derived and/or modified protein sequence (opt3) from LASV(Lassa virus/H.sapiens-wt/NGA/2016/ISTH_0701;Clade II)__AVO03629__GPC
augggccagaucauuaccuucuuucaagaggugccccacgucauagaagagguuaugaacaucgugcugauugcccucagccuucuggcuaucuugaaggggauuuacaauguagcaacaugcggauuauucggucugguguccuuucuacuccuguguggcagaucuugcucaacuacguauaaaggggucuacgaacuucagacccuggaguuggacauggccagucucaacaugacaaugccucugagcuguacuaagaauaacucccaucacuauaucauggugggaaaugaaaccggccuggagcucacauuaaccaacacuucuauaaucggucauaaauucugcaaucugucggaugcgcacaagaaaaaccuuuacgaccaugcuuugaugucaauuaucagcacauuucaccugaguauuccaaauuucaaccaguaugaggccauguccugugauuuuaaugggggaaagaucucuguucaguacaaccuaagccacgcauaugccguggacgcugcaaaucauugcggcaccauagccaacggcguccuccaaacguucaugaggauggcuuggggaggguccuacauugcccuggauucagguaagggcaguugggacuguaucaugacuagcuaccaguaucuuauuauccagaauaccacaugggaagaucacugccaguuuucucggccgucccccaucggguaccugggauugcucucacaacgcacucgagacauuuauauaagccguagacuguuaggcaccuucacauggacccugagugauucugaggguaacgaaacgccugggggauacugucucacuagguggaugcuuaucgaggcggagcugaaaugcuuuggcaacacagcaguggccaaguguaaugaaaaacaugacgaggaguucugcgauauguugcggcuauuugacuucaacaagcaggcuauucgcagacugaaaaccgaagcccagauguccauccagcucauaaauaaggcaguaaacgcucugauuaaugaucaacuuaucaugaagaaccaccugagggacaucaugggcauuccauauugcaauuacagcaaauauugguacuugaaccacacuguuacagggaagaccucgcucccccgguguuggcuggugucuaauggauccuacuuaaacgaaacgcauuucucagacgauaucgagcagcaggccgacaauaugauuaccgagcugcuacaaaaagaauauauagaucgccaggguaagacaccucucggccuggucgaccuuuuuguguucaguacuagcuuuuacuugaucuccauuuuccugcaccucgugaaaaucccaacccaucgacacgucaucgggaagcccugcccuaaaccacauagacugaaccacaugggaauuuguucuugcggccuuuauaagcacccggguguucccgugaaguggaaaagguga

SEQ ID NO: 1093 - RNA, 1473 nt, Artificial Sequence
  derived and/or modified protein sequence (opt3) from LASV(Lassa virus/H.sapiens-wt/NGA/2016/ISTH_0702;Clade II)__AVO03557__GPC
augggccagaucauuaccuucuuucaagaggugccccacgucauagaagagguuaugaacaucgugcugauugcccucagccuucuggcuguauugaaggggaucuacaauguggcaacaugcggauuauucggucuggucgccuuucuacuccuguguggcagauccugcucuacuacguauaaagggguguacgaacuucagacccuggaguuggacauggcgaaccucaauaugacaaugccucugucauguacuaagaacaauagucaucacuauauuaugguuggaaacgaaaccggccuggagcucacauuaaccaauacuagcaucauaaaccauaaauucugcaaucuguccgaugcucacaagaaaaaccuuuacgaccaugccuugaugucuaucauuucgacauuucaccugucaaucccaaauuucaaccaguaugaggcaaugagcugugauuuuaauggugggaagauuagugugcaguacaaccuaucccacaccuaugccgucgacgcugcaaaucauugcggaacgaucgccaacggcgugcuccaaacuuucaugaggauggcuuggggcgggucuuacauagcccuggauagcggaaaggguuccugggacuguauuaugaccucauaccaguaucuuaucauucagaacacaacuugggaagaucacugccaguuuagucggccgagccccaucggcuaccugggguugcucucucaacgcacccgagacaucuauauuucccguagacuguuaggaacauucaccuggacgcugucagauagcgagggcaaugaaacuccugguggguacugucucacaagguggaugcuuauagaggcggagcugaaaugcuuuggaaacaccgcaguagccaaguguaaugaaaaacaugacgaggaguucugcgauauguugcggcuauuugacuucaacaagcaggcuauccgcagacugaaaacugaagcccagaugaguauucagcucaucaauaaggcaguuaacgcucugauaaaugaucaacuuauuaugaagaaccaccugagggacaucaugggcaucccauauugcaauuacucuaaauauugguacuugaaccacacagugaccggccggacgucccucccccgcuguuggcuggucagcaaugggucguacuuaaacgaaacccauuucucugacgauauugagcagcaggccgacaauaugaucacagagcugcuacaaaaggaauauauggaucgacagggaaaaacuccucucggucugguggaccuuuuuguguucuccaccucauuuuacuugauuaguauauuccugcaccucaucaagauuccaacacauagacacgucaucggcaaacccugcccuaagccacauaggcugaaccacauggggaucuguagcugcggacuuuauaaacacccgggcguucccgugaaguggaagcgguga

SEQ ID NO: 1094 - RNA, 1473 nt, Artificial Sequence
  derived and/or modified protein sequence (opt3) from LASV(Lassa virus/H.sapiens-wt/NGA/2016/ISTH_0703;Clade II)__AVO03597__GPC
augggccagaucauuaccuucuuucaagaggugccccacgucauagaagagguuaugaacaucgugcugauugcccucagccuucuggcuaucuugaaggggauuuacaauguagcaacaugcggauuauucggucugguguccuuucuacuccuguguggcagaucuugcucaacuacguauaaaggggucuacgaacuucagacccuggaguuggacauggccagucucaacaugacaaugccucugagcuguacuaagaauaacucccaucacuauaucauggugggaaaugaaaccggccuggagcucacauuaaccaacacuucuauaaucaaucauaaauucugcaaccugucggaugcgcacaagaaaaaucuuuacgaccaugcuuugaugucaauuaucagcacauuucaccugaguauuccaaacuucaaucaguaugaggccauguccugugauuuuaacggugggaagaucucuguucaguacaaucuaagccacaccuaugcaguggacgccgcuucccauugcggaacgauagcaaacggcguccuccaaacuuucaugaggauggccuggggcgggucauacauugcucuggauaguggaaaggguagcugggacuguaucaugaccucuuaccaguaucuuauuauccagaauacaacuugggaagaucacugccaguuuucccggccgucacccaucggcuaccugggguugcucagccaacgcacccgagacauuuauauaagucguagacuguuaggaacauucaccuggacgcugucugauuccgagggcaacgaaacuccugguggguacugucucacaagguggaugcuuaucgaggccgagcugaaaugcuuuggaaacaccgcgguggcaaaguguaaugaaaaacaugacgaggaguucugcgauauguugcggcuauuugacuucaacaagcaggccauucgcagacugaaaacugaagcucagaugagcauccagcucauaaauaaggccguaaacgcacugauuaaugaucaacuuaucaugaagaaccaccugagggacaucaugggcauuccauauugcaauuacucgaaauauugguacuugaaccacacaguuaccggccggacgucucucccccgcuguuggcugguguccaaugggucauacuuaaacgaaacccauuucagugacgauaucgagcagcaggcugacaauaugauuacagagcugcuacaaaaggaauauauagagcgacagggaaaaacuccucucggucuggucgaucuuuuuguguucagcaccuccuuuuacuugaucucuauuuuccugcaccucaucaagaucccaacacauagacacgugauuggcaaacccugcccuaagccacauaggcugaaccacauggggauauguagcugcggacuuuauaaacacccgggcguccccguuaaguggaagcgguga

SEQ ID NO: 1095 - RNA, 1473 nt, Artificial Sequence
  derived and/or modified protein sequence (opt3) from LASV(Lassa virus/H.sapiens-wt/NGA/2016/ISTH_0717;Clade II)__AVO03547__GPC
augggccagaucgugaccuucuuucaagaggucccccacguuauugaagaggugaugaacauaguacugaucgcccucagcauucuugcuauccugaagggguuguacaauguggcaacaugcggauuaauuggucuggucacuuuccuacuccuguccggcagaucuuguucaaugaucuauaaagggguguacgaacuucagacgcuggaguugaacauggaaacccucaauaugacaaugccucugaguugcacuaagaacaauagccaucacuauauaaugguuggaaacgagaccggccuggagcucacauuaaccaauacuucccugcuuaaccauaaauuuuguaauuugucugacgcccacaagaaaaaccuguacgaucauacacuaaugucgaucauuucaaccuuccaccucagcaucccaaauuuuaaccaguaugaagcgaugaguugcgacuucaauggugggaagauuacggugcaguacaaccugucccacacuuaugcugucgaugccgugaaucauuguggaacccuugcaaacggcauccugcaaacauuuaugaggauggccuggggcgggucuuacauagcuuuggacagccggcacggauccugggauugcauuaugacuucauaccaguaucucaucauucagaacaccacaugggaggaccauugucaguucagucgcccgagccccaucgguuaccugggcuuacugucucaacgaacccgugauaucuauauuuccagaaggcuccuugggacguuuacuuggacacugucagacagcgaaggaaaugagaccccuggcgguuacugcuugacucgguggaugcuaauagaggcagaacugaaguguuucgggaacacagccguagcuaaaugcaaugagaagcacgaugaagaguuuugugacaugcuccgccuguucgauuuuaacaaacaggccaucagaaggcuuaaggcggaagcacagaugaguauucagcugaucaauaaagccguuaacgcuuugauaaaugaccaacucauuaugaagaaccaucugcgggauaucaugggaaucccauauugcaauuacucuaaguauugguacuuaaaccacaccuccacgggccgcaccagccugccccgaugcuggcuagugucgaauggcucuuaccucaacgagacacacuucuccgacgacauugagcagcaggccgauaauaugaucacugaaaugcugcaaaaagaguaucuugacagacaggggaagaccccuuugggacuggucgaucucuucguguuuucaacaaguuucuaccugauuagcauauuucuucaucugaucaaaauuccaacucacaggcauaucguggguaagcccuguccuaaaccacaccgguugaaccacaugggcaucugcuccugugggcucuauaagcagccgggaguccccguucguuggaaacgcuga

SEQ ID NO: 1096 - RNA, 1473 nt, Artificial Sequence
  derived and/or modified protein sequence (opt3) from LASV(Lassa virus/H.sapiens-wt/NGA/2016/ISTH_0753;Clade II)__AVO03609__GPC
augggccagaucauuaccuucuuucaagaggugccccacgucauagaagagguuaugaacaucgugcugauugcccucagccuucuggcuaucuugaaggggauuuacaauguagcaacaugcggauuauucggucugguguccuuucuacuccuguguggcagaucuugcucaacuacguauaaaggggucuacgaacuucagacccuggaguuggacauggccagucucaacaugacaaugccucugagcuguacuaagaauaacucccaucacuauaucauggugggaaaugaaaccggccuggagcucacauuaaccaacacuucuauaaucaaucauaaauucugcaaccugucggaugcgcacaagaaaaaucuuuacgaccaugcuuugaugucaauuaucagcacauuucaccugaguauuccaaacuucaaucaguaugaggccauguccugugauuuuaacggugggaagaucucuguucaguacaaucuaagccacaccuaugcaguggacgccgcuaaccauugcggaacgauagcaaauggcguccuccaaacuuucaugaggauggccuggggcggguccuacauugcucuggauucaggaaaggguaacugggacuguaucaugaccaguuaccaguaucuuauuauccagaacacaacuugggaagaucacugccaguuuagccggccgucucccaucggcuaccugggguugcucucccaacgcacccgagacauuuauauaucacguagacuguuaggaacauucaccuggacgcugagcgauagugagggcaaugaaacuccugguggguacugucucacaagguggaugcuuaucgaggccgagcugaaaugcuuuggaaacaccgcgguggcaaaguguaaugaaaaacaugacgaggaguucugcgauauguugcggcuauuugacuucaacaagcaggccauuucucgccugaaaacugaagcucagauguccauccagcucauaaauaaggccguaaacgcacugauuaaugaucaacuuaucaugaagaaccaccugagagacaucaugggcauuccauauugcaauuacagcaaauauugguacuugaaccacacaguuaccggcaggacgucgcucccccgguguuggcuggugucuaauggguccuacuuaaacgaaacccauuucucagacgauaucgagcagcaggcugacaauaugauuacagagcugcuacaaaaggaauauauggaucgccagggaaaaacuccucucggucuggucgaccuuuuuguguucaguaccagcuuuuacuugauauccaucuuccugcaccucgugaagauuccaacacaucgacacgucaucggcaaacccugcccuaagccacauagacugaaccacauggggaucuguucuugcggacuuuauaaacacccgggcguucccgugaaguggaagagguga

SEQ ID NO: 1097 - RNA, 1473 nt, Artificial Sequence
  derived and/or modified protein sequence (opt3) from LASV(Lassa virus/H.sapiens-wt/NGA/2016/ISTH_0759;Clade II)__AVO03593__GPC
augggccagaucauuaccuucuuucaagaggugccccacgucauagaagagguuaugaacaucgugcugauugcccucagccuucuggcuaucuugaaggggauuuacaauguagcaacaugcggauuauucggucugguguccuuucuacuccuguguggcagaucuugcucaacuacguauaaaggggucuacgaacuucagacccuggaguuggacauggccagucucaacaugacaaugccucugagcuguacuaagaauaacucccaucacuauaucauggugggaaaugaaaccggccuggagcucacauuaaccaacacuucuauaaucaaucauaaauucugcaaccugucggaugcgcacaagaaaaaucuuuacgaccauacauugaugucaauuaucagcaccuuucaccugaguauuccaaacuucaaucaguaugaggcuauguccugugauuuuaacggugggaagaucucuguucaguacaaucuaagccacacguaugccguggacgcagccaaccauugcggaacuauagcuaauggcguccuccaaaccuucaugaggauggcauggggcggguccuacauugcccuggauucaggaaaggguaguugggacuguaucaugacaagcuaccaguaucuuauuauccagaacacuucuugggaagaucacugccaguuuucccggccgucacccaucggcuaccugggguugcucagccaacgcacccgagacauuuauauaagucguagacuguuaggaacauucaccuggacgcugucugauuccgagggcaacgaaacuccugguggguacugucucacaagguggaugcuuaucgaggcugagcugaaaugcuuuggaaauaccgccguggcgaaguguaacgaaaaacaugacgaggaguucugcgauauguugcggcuauuugacuucaauaagcaggcaauucgcagacugaaaacugaagcccagaugagcauccagcucauaaacaaggcuguaaaugcccugauuaacgaucaacuuaucaugaagaaucaccugagggacaucaugggcauuccauauugcaacuacucgaaauauugguacuugaaucacacaguuaccggcaagacgucucucccccgguguuggcugguguccaacgggucauacuuaaaugaaacccauuucagugacgauaucgagcagcaggcagacaacaugauuacagagcugcuacaaaaagaauauauagaucgccagggaaagacuccucucggucuggucgaccuuuuuguguucagcaccuccuuuuacuugaucucuauuuuccugcaccucgugaaaaucccaacacaucgacacgucaucggcaagcccugcccuaaaccacauagacugaaucacauggggauuuguagcugcggacuuuauaagcacccgggcguucccgugaaguggaaaagguga

SEQ ID NO: 1098 - RNA, 1473 nt, Artificial Sequence
  derived and/or modified protein sequence (opt3) from LASV(Lassa virus/H.sapiens-wt/NGA/2016/ISTH_0777;Clade II)__AVO03615__GPC
augggccagaucauuaccuucuuucaagaggugccccacgucauagaagagguuaugaacaucgugcugauugcccucagccuucuggcuaucuugaaggggauuuacaauguagcaacaugcggauuacugggucuaaucuccuuccuccugcuuuguggcagaucuugcucaacuacguauaaagggguguacgaacugcagaccuuggagcucgacauggccaaccugaauaugacaaugccucugaguuguacuaagaacagcucccaucacuauauaauggucggaaaugaaaccggccucgaguuaacacugaccaacacuucuaucauuaaucauaaauuuugcaaccuuucggaugcgcacaagaaaaauuuguacgaccaugcucugaugucaaucauuagcacauuccaccuaaguaucccaaacuuuaaucaguaugaggccauguccugugauuucaacggugggaagauaucugugcaguacaaucucagccacgcauaugccguugacgcugcaaaccauugcggaaccauugccaauggcgugcugcaaacguuuaugaggauggcuuggggcggguccuacaucgcccuugauucaggaaaggguaacugggacuguauuaugacuucauaccaguaucugaucauccagaacaccacaugggaagaucacugccaguucagccggccgucucccauuggcuacuuggggcuccugucccaacgcacucgagacauauauaucucacguagauuacugggaaccuuuacauggacccucagcgauagugagggcaaugaagcgccugguggguacugucuuacgagguggaugcugauugaggcagaguugaaaugcuucggaaacacugccaucgcuaaguguaaugaaaaacaugacgaggaauuuugcgauaugcuacggcuguucgacuuuaacaagcaggccauacgcagacucaaaacagaggcacagaugucuauucagcugaucaauaaggcugucaacgcccuuaucaaugaucaacugauuaugaagaaccacuugagggacaucaugggcauuccauauugcaauuacuccaaauauugguaccucaaccacaccgugacuggcaagacaagccugccccgguguugguuaauaucgaaugggucuuaccugaacgaaacccauuucuccgacgauaucgagcagcaggcggacaauaugauuacggagcuacuccaaaaagaauauauggaucgccagggaaagaccccucugggucuuguagacuuguucguuuuuaguacaaguuucuaccugaucagcaucuuucuccaccuggugaaaauuccaacucaucgacacauagucggcaagcccugcccuaaaccacauagacuuaaccacauggggaucuguuccugcggacuguauaagcacccgggcgugcccgugaaguggaaaagguga

SEQ ID NO: 1099 - RNA, 1473 nt, Artificial Sequence
  derived and/or modified protein sequence (opt3) from LASV(Lassa virus/H.sapiens-wt/NGA/2016/ISTH_0779;Clade II)__AVO03655__GPC
augggccagaucauuaccuucuuucaagaggugccccacgucguugaagaggugaugaacguagugcugauagcccucagccuucuggcuaucuugaaggggauuuacaauaucgcaacaugcggauuauucggucugauuuccuuucuacuccuguguggcagaucuugcucaacuacguauaaaggggucuacgaacuucagacccuggaguuggacauggccaaccucaauaugacaaugccucugaguuguacuaagaacaauagccaucacuauaucauggugggaaacgaaaccggccuggagcucacauuaaccaauacuuccauaaucaaccauaaauucugcaaucugucugaugcgcacaagaaaaaccuuuacgaccauacauugaugucgauuaucucaaccuuucaccugagcauuccaaauuucaaccaguaugaggcuaugaguugugauuuuaauggugggaagaucuccguucaguacaaccuaucucacggauaugccguggacgcagccaaucauugcggcacgauagcuaacggcguccuccaaacuuucaugaggauggcauggggagggagcuacauugcccuggauuccgguaagggcaacugggacuguaucaugaccucauaccaguaucuugugauucagaauacaacuugggaagaucacugccaguuuagucggccgagccccaucggguaccugggauugcucucucaacgcacccgagacaucuauauuucccguagacuguuaggcacauucaccuggacgcugucagauagcgaggguaacgacgcuccugggggauacugucucacuagguggaugcuuauagaagccgagcugaaaugcuuuggcaauacagcgaucgcaaaguguaacgagaaacaugaugaagaguucugcgacauguugcggcuauuugauuucaaucgccaggccauuaagagacugaaaaccgaagcucagaugaguauccagcucauaaacaaggccguaaaugcacugauuaacgaccaacuuaucaugaagaaucaccugagggacaucaugggcauuccauauugcaacuacucuaaauauugguacuugaauaacacuguuacagggaaguccagccuccccaaauguuggcuggugucgaauggaucuuacuuaaacgagacccacuucuccgaugacaucgaacagcaggcugauaauaugauuacggagaugcugcaaaaggaguauauagaccggcaggguaaaaccccucuaggccucgucgaucuguuuguguucucaacaaguuuuuaccuuaucagcauuuucuugcaucuggugcgcaucccaacucaccgacauaucaccgggaagcccugcccuaaaccacacagacucaaccauaugggaauuuguuccugcggccuguauaagcagccggguguccccguuaaguggaaaagguga

SEQ ID NO: 1100 - RNA, 1473 nt, Artificial Sequence
  derived and/or modified protein sequence (opt3) from LASV(Lassa virus/H.sapiens-wt/NGA/2016/ISTH_0917;Clade II)__AVO03535__GPC
augggccagaucgugaccuucuuucaagaggucccccacguuauugaagagauaaugaacaucgugcugauuacacucagccuucuggccaucuugaaggggguauacaauuuagcuacuugcggacugauuggucuaaucacguuccucuuucuguguggcagauccugcucuaugaccuauaaagggaacuaccagcuugaaacacuggaguugaauauggaaaugcucaacaugacuaugccucugucauguaccaagaauaacagucaucacuauauaagggugggaaaugagacaggccuggagcucaccuuaacuaacacaagcaucauucagcauaaauucugcaaucuguccgacgcacacaagcggaaccuuuacgaucauucuuugaugucgaucgucucaaccuuucaccugagcauuccaaauuucaaccaguaugaagccaugaguugugacuuuaauggugggaaaaucuccauacaauacaaccuaucucacacguaugcgggagaugcugccaagcauugcggcacucucgcaaauggcauucugcagaccuucaugcgcauggccuggggagggagcuacaucgcucuugacuccggucgaggcgggugggauuguauuaugacaaacuaccaguaucugaucauccagaacgugacuugggaggaccacugccaauuuucacguccgagucccauuggauacuugggccuccugagccagagaaccagggaaguuuauauaucucggcgcuuacuggguacauucaccuggacgcucuccgauucagaggggaaugaggcaccuggaggcuacugucuuacuagauggaugcugaucgaagccgaguugaagugcuuuggcaacacagcuguggccaaauguaaugaaaagcaugacgaggaguucugcgauaugcuaaggcuguuugacuucaacaaacaggcgauucggcgccucaaggcagaaacccagaugagcauccaacugauaaauaaagccgucaacgcucuuauuaaugaucagcugaucaugaagaaccacuugcgagacaucauggggauuccauauugcaauuacaguaaguauugguaccucaaccacacuaucacaggaagaaccucucugcccagguguugguuaguguccaaugguagcuaccugaacgagacgcauuucucggaugacauugaacagcaagccgacaauaugauaaccgagaugcuacagaaagaauauaucgaucggcagggcaagacaccucucgggcugguagaccuuuuuguuuucucuacuuccuuuuacuugauuucaaucuuccugcaccucgugaaaaucccaacccaucgucacauugucggaaagaguugccccaaaccucaucgccugaaccacaugggcauauguagcugcggucuuuauaagagaccagggguguccgugagguggaaacgguga

SEQ ID NO: 1101 - RNA, 1473 nt, Artificial Sequence
  derived and/or modified protein sequence (opt3) from LASV(Lassa virus/H.sapiens-wt/NGA/2016/ISTH_1006;Clade II)__AVO03643__GPC
augggccagaucauuaccuucuuucaagaggugccccacgucauagaagagguuaugaacaucgugcugauugcccucagccuucuggcuaucuugaaggggauuuacaauguagcaacaugcggauuauucggucugguggccuuucuacuccuguguggcagauccugcucuacuacguauaaaggggucuacgaacuucagacccuggaguuggacauggcgucacucaacaugacaaugccucugaguuguacuaagaauaacagccaucacuauaucauggugggaaaugaaaccggccuggagcucacauuaaccaacacuuccauaaucaaucauaaauucugcaaccugucugaugcucacaagaaaaaucuuuacgaccaugccuugaugucgauuaucucaacauuucaccugagcauuccaaacuucaaucaguaugaggcaauggguugugauuuuaacgggggaaagaucaguguucaguacaaucuaucccacucuuaugccguggacgcugcaaaccauugcggcaccauagccaauggcguccuccaaacguucaugaggauggcuuggggagggagcuacauugcccuggauuccgguaagggcucaugggacuguaucaugaccaguuaccaguaucuuauuauccagaacacuacaugggaagaucacugccaguuuagccggccgucucccaucggguaccugggauugcucucccaacgcacucgagacauuuauauaucacguagacuguuaggcaccuucacauggacccugagcgauagugaggguaacgaaacgccugggggauacugucucacuagguggaugcuuaucgaggcggagcugaaaugcuuuggcaauacagcaguggccaaguguaacgaaaaacaugacgaggaguucugcgauauguugcggcuauuugacuucaauaagcaggcuauucgcagacugaaaaccgaagcccagaugucuauccagcucauaaacaaggcaguaaaugcucugauuaacgaucaacuuaucaugaagaaucaccugagggacaucaugggcauuccauauugcaacuacuccaaauauugguacuugaaucacacuguuacagggcggaccagccucccccgcuguuggcuggugucgaacggaucuuacuuaaaugaaacgcauuucuccgacgauaucgagcagcaggccgacaacaugauuaccgagcugcuacaaaaggaauauauggaucgacaggguaaaacaccucucggccuggucgaccuuuuuguguucucaaccaguuuuuacuugauaagcaucuuccugcaccucauuaagaucccaacucauagacacgugaucgggaaacccugcccuaagccacauaggcugaaucacaugggaauuuguuccugcggccuuuauaaacacccggguguccccguuaaguggaagcgguga

SEQ ID NO: 1102 - RNA, 1473 nt, Artificial Sequence
  derived and/or modified protein sequence (opt3) from LASV(Lassa virus/H.sapiens-wt/NGA/2016/ISTH_1026;Clade II)__AVO03589__GPC
augggccagaucauuaccuucuuucaagaggugccccacgucauagaagagguuaugaacaucgugcugauugcccucagccuucuggcuaucuugaaggggauuuacaauguagcaacaugcggauuauucggucugguguccuuucuacuccuguguggcagaucuugcucaacuacguauaaaggggucuacgaacuucagacccuggaguuggacauggccagucucaacaugacaaugccucugagcuguacuaagaauaacucccaucacuauaucauggugggaaaugaaaccggccuggagcucacauuaaccaacacuucuauaaucaaucauaaauucugcaaccugucggaugcgcacaagaaaaaucuuuacgaccaugcuuugaugucaauuaucagcacauuucaccugaguauuccaaacuucaaucaguaugaggccauguccugugauuuuaacggugggaagaucucuguucaguacaaucuaagccacgcauaugccauagacgcugcaucccauugcggaaccauugccaacggcgugcuccaaacguucaugaggauggcuuggggcgggucauacaucgcccuggauaguggaaaggguagcugggacuguauuaugacuucuuaccaguaucuuaucauccagaauaccacaugggaagaucacugccaguuuucccggccgucacccauuggcuaccugggguugcucagccaacgcacucgagacauauauaucagucguagacuguuaggaaccuucacauggacccugucugauuccgagggcaacgaaacgccugguggguacugucucacuagguggaugcuuauugaggcggagcugaaaugcuuuggaaacacagcagucgccaaguguaaugaaaaacaugacgaggaguucugcgauauguugcggcuauuugacuucaacaagcaggcuauccgcagacugaaaaccgaagcccagaugagcauacagcucauuaauaaggcagugaacgcucugaucaaugaucaacuuaucaugaagaaccaccugagggacauuaugggcaucccauauugcaauuacucgaaauauugguacuugaaccacacuguaacaggcaagaccucucucccccgguguuggcugguuuccaaugggucauacuuaaacgaaacgcauuucagugacgauauugagcagcaggccgacaauaugauaaccgagcugcuacaaaaagaauaucucgaucgccagggaaagacaccucugggucuuguggacuuguuugucuucagcacuuccuuuuaccugaucucuauuuuccuccaccuggugaaaaucccaacccaucgacacgugaucggcagacccugcccuaagccacauaggcuuaaccacauggggauuuguagcugcggacuguauaaacacccgggcguccccguuaaguggaagcgguga

SEQ ID NO: 1103 - RNA, 1473 nt, Artificial Sequence
  derived and/or modified protein sequence (opt3) from LASV(Lassa virus/H.sapiens-wt/NGA/2016/ISTH_1070;Clade II)__AVO03651__GPC
augggccagaucauuaccuucuuucaagaggugccccacgucauagaagagguuaugaacaucgugcugauugcccucagccuucuggcuaucuugaaggggauuuacaauguagcaacaugcggauuauucggucugguguccuuucuacuccuguguggcagaucuugcucaacuacguauaaaggggucuacgaacuucagacccuggaguuggacauggccagucucaacaugacaaugccucugagcuguacuaagaauaacucccaucacuauaucauggugggaaaugaaaccggccuggagcucacauuaaccaacacuucuauaaucaaucauaaauucugcaaccugucggaugcgcacaagaaaaaucuuuacgaccaugcuuugaugucaauuaucagcacauuucaccugaguauuccaaacuucaaucaguaugaggccauguccugugauuuuaacggugggaagaucucuguucaguacaaucuaagccacaccuucgcaguggacgccgcuaaccauugcggaacgauagcaaauggcguccuccaaacuuuuaugaggauggccuggggcggguccuauauugcucuggauucaggaaaggguaguugggacuguaucaugaccagcuaccaguaccuuauuauccagaacacaacuugggaagaucacugccaguucucucggccgucccccaucggcuaucugggguugcucucacaacgcacccgagacauuuacauaagccguagacuguuaggaacauuuaccuggacgcugagugauucugagggcaacgaaacuccugguggguauugucucacaagguggaugcuuaucgaggccgagcugaaaugcuucggaaauaccgcgguggcaaaguguaacgaaaaacaugacgaggaauuuugcgauauguugcggcuauucgacuucaauaagcaggccauucgcagacugaaaacugaggcucagauguccauccagcucauaaacaaggccguaaaugcacugauuaacgaucaacuuaucaugaagaaucaccugagggacaucaugggcauuccauacugcaacuauagcaaauacugguauuugaaucacacaguuaccggcaagacgucgcucccccgguguuggcuggugucuaacggguccuacuuaaaugaaacccauuuuucagacgauaucgagcagcaggcugacaacaugauuacagagcugcuacaaaaagaauacauggaucgccagggaaagacuccucucggucuggucgaccuuuucguguuuaguaccagcuucuauuugauauccaucuuucugcaccucgugaaaauuccaacacaucgacacaucaucggcaagcccugcccuaaaccacauagacugaaucacauggggauuuguucuugcggacuuuacaagcacccgggcguccccguuaaguggaaaagguga

SEQ ID NO: 1104 - RNA, 1473 nt, Artificial Sequence
  derived and/or modified protein sequence (opt3) from LASV(Lassa virus/H.sapiens-wt/NGA/2016/ISTH_1123;Clade II)__AVO03645__GPC
augggccagaucauuaccuucuuucaagaggugccccacgucauagaagagguuaugaacaucgugcugauugcccucagccuucuggcuaucuugaaggggauuuacaauguagcaacaugcggauuauucggucugguguccuuucuacuccuguguggcagaucuugcucaacuacguauaaaggggucuacgaacuucagacccuggaguuggacaugggaagucucaacaugacaaugccucugagcuguacuaagaauaacucccaucacuauaucauggugggcaaugaaaccggucuggagcucacauuaaccaacacuucuauaaucaaucauaaauucugcaaccugucggaugcccacaagaaaaaucuuuacgaccaugcguugaugucaauuaucagcacauuucaccugaguauuccaaacuucaaucaguaugaggcuauguccugugauuuuaacgggggaaagaucucuguucaguacaaucuaagccacgccuaugcaguggacgccgcuaaccauugcggcaccauagcaaauggcguccuccaaacguucaugaggauggccuggggaggguccuacauugcucuggauucagguaagggcaguugggacuguaucaugacuagcuaccaguaucuuauuauccagaacaccucuugggaagaucacugccaguuuucccggccgucacccaucggguaccugggauugcucagccaacgcacacgagacauuuauauaagucguagacuguuaggcacuuucaccuggacacugucugauuccgaggguaacgaaaccccugggggauacugucucacgagguggaugcuuaucgaggccgagcugaaaugcuuuggcaauacugcgguggcaaaguguaacgaaaaacaugacgaggaguucugcgauauguugcggcuauuugacuucaauaagcaggccauucgcagacugaaaacagaagcucagaugagcauccagcucauaaacaaggccguaaaugcacugauuaacgaucaacuuaucaugaagaaucaccugagggacaucaugggcauuccauauugcaacuacucgaaauauugguacuugaaucacaccguuacugggaagacaucucucccccgguguuggcugguguccaacggaucauacuuaaaugaaacccauuucagugacgauaucgagcagcaggcugacaacaugauuacggagcugcuacaaaaagaauauauagaucgccaggguaagaccccucucggccuggucgaccuuuuuguguucagcacauccuuuuacuugaucucuauuuuccugcaccucgugaaaaucccaacucaucgacacgucaucgggaagcccugcccuaaaccacauagacugaaucacaugggaauuuguagcugcggccuuuauaagcacccggguguucccgugaaguggaaaagguga

SEQ ID NO: 1105 - RNA, 1473 nt, Artificial Sequence
  derived and/or modified protein sequence (opt3) from LASV(Lassa virus/H.sapiens-wt/NGA/2016/ISTH_1150;Clade II)__AVO03627__GPC
augggccaggugaucaccuucuuucaagagauuccccacgucauagaagagguuaugaacaucgugcugauuacacucagccuucuggccaucuugaaggggauuuacaauguagcuacuugcggauuauucggucugaucuccuuucuacuccuguguggcagaucuugcucaacgaccuauaaagggguguacgaacuucagacacuggaguuggacauggcaaaccucaauaugacuaugccucugaguuguaccaagaacagcucccaucacuauauaauggucggaaaugaaacaggccuggagcucaccuuaacuaacacaucuaucauuaaucauaaauucugcaaccugucggaugcccacaagaaaaaucuuuacgaccaugcguugaugucaaucauuagcaccuuucaccugaguaucccaaacuucaaucaguaugaggcuauguccugugauuuuaacggugggaagauaucugugcaguacaaucuaagccacgccuaugcaguugacgccgcuaaccauugcggaacgauugcaaauggcgugcuccaaacuuucaugaggauggccuggggcggguccuacaucgcucuggauucaggaaaggguaacugggacuguauuaugaccaguuaccaguaucuuaucauccagaacacaacuugggaagaucacugccaguuuagccggccgucucccauuggcuaccugggguugcucucccaacgcacccgagacauauauaucucacguagacuguuaggaacauucaccuggacgcugagcgauagugagggcaaugaagccccugguggguacugucucacuagguggaugcuuauugaggcggagcugaaaugcuuuggaaacacagcaaucgccaaguguaaugaaaaacaugacgaggaguucugcgauauguugcggcuauuugacuucaacaagcaggcuauacgcagacugaaaaccgaagcccagaagucuauucagcucaucaauaaggcagucaacgcucugaucaaugaucaacuuauuaugaaaaaccaccugagggacaucaugggcauuccauauugcaauuacuccaaguauugguacuugaaccacacugugacaggcaaaaccagccuccccaaguguuggcugauaucgaaugggucuuacuuaaacgaaacgcauuucuccgacgauaucgagcagcaggccgacaauaugauuaccgagcugcuacaaaaagaauauauggaucggcagggaaagacaccucucggucugguagaccuuuuuguuuucucaaccaguuuuuacuugaucagcaucuuccugcaccucgugaaaauuccaacucaucgccacauagucggccgacccugcccuaagccacauagacugaaccacauggggaucuguuccugcggacuuuauaagcacccgggcgugcccgugaaauggaagagguga

SEQ ID NO: 1106 - RNA, 1473 nt, Artificial Sequence
  derived and/or modified protein sequence (opt3) from LASV(Lassa virus/H.sapiens-wt/NGA/2016/ISTH_1174;Clade II)__AVO03555__GPC
augggccagaucauuaccuucuuucaagaggugccccacgucauagaagagguuaugaacaucgugcugauugcccucagccuucuggcuaucuugaaggggauuuacaauguagcaacaugcggauucuuugguuuaguguccuuccugcuacucuguggcagaucuugcucaacuaucuauaaaggggucuacgaacugcagacgcuugagcuggacauggccaguuugaacaugaccaugccucucagcuguacaaagaauaacucccaucacuauauaauggugggaaaugaaacuggccuggagcugacccucacaaacaccucuaucauuaaucauaaauuuugcaacuuaucggaugcgcacaagaaaaaucuguacgaccaugcucuuaugucaaucauuagcacuuuccacuugaguaucccacacuuuaaccaguaugaggccauguccugugauuucaauggugggaagauaucuguucaguacaaccugagccauacauaugcaguggacgccgcuaaucacugcggaaccauugcaaacggcguccuacaaacguuuaugaggauggccuggggcggguccuacaucgcucucgauucaggaaaggguaguugggacuguauuaugacuagcuaccaguaucugaucauccagaauaccacaugggaagaucauugccaguucucucggccgucccccauuggcuaccuugggcuguugucacaacgcacucgagacauauauaucagccguagacuccugggaaccuuuacauggaccuuaagugauucugagggcaacgaaacgccugguggguacugucugacuagguggaugcucauugaggccgagcuuaaaugcuucggaaacacagcgguggcaaaguguaaugaaaaacacgacgaggaauuuugcgauaugcugcgguuguucgacuucaacaagcaggccauccgcaaacuaaagaccgaggcucagauguccauacagcugauuaauaaggccguaaacgcacucaucaaugaucaacugaucaugaaaaaccaccuuagagacauuaugggcaucccauauugcaauuacagcaaguauugguaccugaaccauacuguuacaggcaaaaccucguugcccagguguuggcucgugucuaauggguccuaccugaacgaaacgcacuuuucagacgauauugagcagcaggcugacaauaugauaaccgaguuacugcaaaaggaauauauggaucggcagggaaaaacaccucuaggucucgucgaccuguucguguuuaguacuagcuucuaccuuaucuccaucuuuuugcaucuggugaagauuccaacccaccgccaugucaucggcaaacccugcccuaagccacaccgacucaaccacauggggauuuguucuugcggacuguauaagcauccgggcguucccgugaaauggaagagauga

SEQ ID NO: 1107 - RNA, 1473 nt, Artificial Sequence
  derived and/or modified protein sequence (opt3) from LASV(Lassa virus/H.sapiens-wt/NGA/2016/ISTH_1207;Clade II)__AVO03599__GPC
augggccagaucauuaccuucuuucaagaggugccccacgucauagaagagguuaugaacaucgugcugauugcccucagccuucuggcuaucuugaaggggauuuacaauguagcaacaugcggauuauucggucugguguccuuucuacuccuguguggcagaucuugcucaacuacguauaaaggggucuacgaacuucagacccuggaguuggacaugacaagucucaacaugacuaugccucugagcuguaccaagaauaacucccaucacuauaucauggugggaaaugaaacaggccuggagcucaccuuaacuaacacaucuauaaucaaucauaaauucugcaaccugucggaugcccacaagaaaaaucuuuacgaccaugcguugaugucaauuaucagcaccuuucaccugaguauuccaaacuucaaucaguaugaggcuauguccugugauuuuaacggugggaagaucucuguucaguacaaucuaagccacacguaugccguggacgcagccaaccauugcggaacuauagcuaauggcguccuccaaaccuucaugaggauggcauggggcggguccuacauugcccuggauucaggaaaggguaguugggacuguaucaugacaagcuaccaguaucuuauuauccagaacacuaccugggaagaucacugccaguuuucucggccgucccccaucggcuaccugggguugcucucacaacgcacacgagacauuuauauaagccguagacuguuaggaaccuucacguggacucugagugauucugagggcaacgacacaccugguggguacugucucaccagguggaugcuuaucgaagcugagcugaaaugcuuuggaaauacugccguggcgaaguguaacgagaaacaugaugaagaguucugcgacauguugcggcuauuugauuucaauaagcaggcaauucgcagacugaaaacagaagcccagauguccauccagcucauaaacaaggcuguaaaugcccugauuaacgaccaacuuaucaugaagaaucaccugagggacaucaugggcauuccauauugcaacuacagcaaauauugguacuugaaucacaccguuacgggcaagaccucgcucccccgguguuggcuggugucuaacggguccuacuuaaaugagacacauuucucagaugacaucgaacagcaggcagauaacaugauuacugagcugcuacaaaaagaguauauagaccgccagggaaagaccccucucggucuggucgaucuuuuuguguucaguacuagcuuuuacuugaucuccauuuuccugcaccucgugaaaaucccaacacaucgacacgucaucggcaagcccugcccuaaaccacauagacugaaucacauggggauuuguucuugcggacuuuauaagcacccgggcguucccgugaaguggaaaagguga

SEQ ID NO: 1108 - RNA, 1473 nt, Artificial Sequence
  derived and/or modified protein sequence (opt3) from LASV(Lassa virus/H.sapiens-wt/NGA/2016/ISTH_1306;Clade II)__AVO03623__GPC
augggccagaucauuaccuucuuucaagaggugccccacgucauagaagagguuaugaacaucgugcugauugcccucagccuucuggcuaucuugaaggggauuuacaauguagcaacaugcggauuauucggucugguguccuuucuacuccuguguggcagaucuugcucaacuacguauaaaggggucuacgaacuucagacccuggaguuggacauggccagucucaacaugacaaugccucugagcuguacuaagaauaacucccaucacuauaucauggugggaaaugaaaccggccuggagcucacauuaaccaacacuucuauaaucaaucauaaauucugcaaccugucggaugcgcacaagaaaaaucuuuacgaccaugcuuugaugucaauuaucagcacauuucaccugaguauuccaaacuucaaucaguaugaggccauguccugugauuuuaacggugggaagaucucuguucaguacaaucuaagccacaccuaugcaguggacgccgcuaaccauugcggaacggucgcaaauggcgugcuccaaacuuucaugaggauggccuggggcggguccuacauagcucuggauucaggaaaggguaguugggacuguauuaugaccagcuaccaguaucuuaucauucagaacacaacuugggaagaucacugccaguuuucucggccgucccccaucggcuaccugggguugcucucacaacgcacccgagacaucuauauuagccguagacuguuaggaacauucaccuggacgcugagugauucugagggcaacgaaacuccugguggguacugucucacaagguggaugcuuauagaggccgagcugaaaugcuuuggaaauaccgcgguagcaaaguguaacgaaaaacaugacgaggaguucugcgauauguugcggcuauuugacuucaauaagcaggccauccgcagacugaaaacugaagcucagauguccauucagcucaucaacaaggccguuaaugcacugauaaacgaucaacuuauuaugaagaaucaccugagggacaucaugggcaucccauauugcaacuacagcaaauauugguacuugaaucacacagugaccggccggacgucgcucccccgcuguuggcuggucucuaacggguccuacuuaaaugaaacccauuucucagacgauauugagcagcaggcugacaacaugaucacagagcugcuacaaaaggaauauauugaucgacagggaaaaacuccucucggucugguggaccuuuuuguguucaguaccagcuuuuacuugauauccaucuuccugcaccucgucaagauuccaacacauagacacguuaucggcaaacccugcccuaagccacauaggcugaaucacauggggaucuguucuugcggacuuuauaaacacccgggcgugcccguaaaguggaagcgguga

SEQ ID NO: 1109 - RNA, 1473 nt, Artificial Sequence
  derived and/or modified protein sequence (opt3) from LASV(Lassa virus/H.sapiens-wt/NGA/2016/ISTH_1311;Clade II)__AVO03575__GPC
augggccagaucgugaccuucuuucaagaggucccccacguuauugaagaggugaugaacauaguacugaucgcccucagccuucuggcuauuuugaaggggaucuacaauguggcaacaugcggauuauucggucugauuuccuuucuacuccuguguggcagaucuugcucaacuacguauaaaggggucuacgaacuucagacccuggaguuggacauggccaaccucaauaugacaaugccucugaguuguacuaagaacaauagccaucacuauaucauggugggaaacgaaaccggccuggagcucacauuaaccaauacuuccauaaucaaccauaaauucugcaaucugucugaugcgcacaagaaaaaccuuuacgaccaugcuuugaugucgauuaucucaacauuucaccugagcauuccaaauuucaaccaguaugaggccaugaguugugauuuuaauggugggaagaucuccguucaguacaaccuaucucacgcauaugccggagacgcugcaagccauugcggcaccauagccaauggcgugcuccaaacguucaugaggauggcuuggggaggguccuacauugcccuggauucagguaagggcaacugggacuguaucaugaccaguuaccaguaucuuauuauccagaacacuacaugggaagaucacugccaguuuagccggccgucucccaucggguaccugggauugcucucccaacgcacucgagacauuuauauaucacguagacuguuaggcaccuucacauggacccugagcgauagugaggguaaugacgcgccugggggauacugucucacgagguggaugcuuaucgaagcagagcugaaaugcuuuggcaacacugccauugcuaaguguaaugagaaacaugaugaagaguucugcgacauguugcggcuauuugauuucaacaagcaggccaucaaacgccugaagacagaagcacagaugucuauacagcucauuaauaaggcugucaacgcccugaucaaugaccaacuuaucaugaaaaaccaccugagagacauuaugggcaucccauauugcaauuacuccaaguauugguacuugaaccacaccacuacagggaaaaccagccuccccaaguguuggcugauuucgaauggaucuuacuuaaacgagacgcauuucuccgaugacauagaacagcaggcggauaauaugaucaccgagcugcuacaaaaagaguaucucgacaggcaggguaagacaccucugggccuuguggauuuguuuguauucucaaccaguuuuuaccugauuagcaucuuccuccaccugaucaaaauuccaacucaucggcacauaguugggcgccccugcccuaagccacaucgacuuaaccacaugggaaucuguuccugcggccuguauaagcacccgggugugcccgucaaauggaagagauga

SEQ ID NO: 1110 - RNA, 1473 nt, Artificial Sequence
  derived and/or modified protein sequence (opt3) from LASV(Lassa virus/H.sapiens-wt/NGA/2016/ISTH_1423;Clade II)__AVO03577__GPC
augggccagaucgugaccuucuuucaagaggucccccacguuauugaagaggugaugaacauaguacugaucgcccucagccuucuggcuauuuugaaggggaucuacaauguggcaacaugcggauuauucggucuggucuccuuucuacuccuguguggcagaucuugcucaacuacguauaaagggguguacgaacuucagacccuggaguuggacauggccaaccucaauaugacaaugccucugaguuguacuaagaacaauagccaucacuauauuaugguuggaaacgaaaccggccuggagcucacauuaaccaauacuuccaucauaaaccauaaauucugcaaucugucugaugcgcacaagaaaaaccuuuacgaccaugcuuugaugucgaucauuucaacauuucaccugagcaucccaaauuucaaccaguaugaggccaugaguugugauuuuaauggugggaagauuuccgugcaguacaaccuaucucacagcuaugcagucgacgccgcuaaucauugcggaaccguggcaaacggcguacuccaaacguucaugaggauggccuggggcggguccuacaucgcucuggauucaggaaaggguaguugggacuguauaaugacuagcuaccaguaucuuauuauccagaacauuaccugggaagaucacugccaguuuucucggccgucccccaucggcuaccugggguugcucucacaacgcacacgagacaucuauauuagccguagacuguuaggaacuuucaccuggacacugagugauucugagggcaaagaaaccccugguggguacugucucacgagguggaugcuuauagaggccgagcugaagugcuuuggaaauacugcgguugcaaaauguaacgaaaagcaugacgaggaguucugcgauauguugcggcuauuugacuucaauaaacaggccauccgcagacugaagacagaagcucagauguccauucagcucaucaacaaggccgugaaugcacugauaaacgaucaacuuauuaugaaaaaucaccugagggacaucaugggcaucccauauugcaacuacagcaaguauugguacuugaaucacaccgucacuggcaaaacaucgcucccccgguguuggcuggugucuaacggguccuacuuaaaugaaacccauuucucagacgauauugagcagcaggcugacaacaugaucacggagcugcuacaaaaggaauauauugaucgccagggaaaaaccccucucggucugguggaccuuuuugucuucaguacuagcuuuuacuugauauccaucuuccugcaccucguuaagauuccaacacaucgacacauccugggcaaacccugcccuaagccacauagacuuaaucacauggggaucuguucuugcggacuguauaagcacccgggcgugcccguaaaauggaagagguga

SEQ ID NO: 1111 - RNA, 1473 nt, Artificial Sequence
  derived and/or modified protein sequence (opt3) from LASV(Lassa virus/H.sapiens-wt/NGA/2016/ISTH_1462;Clade II)__AVO03587__GPC
augggccagaucauuaccuucuuucaagaggugccccacgucauagaagagguuaugaacaucgugcugauugcccucagccuucuggcuaucuugaaggggauuuacaauguagcaacaugcggauuauucggucugguguccuuucuacuccuguguggcagaucuugcucaacuacguauaaaggggucuacgaacuucagacccuggaguuggacauggccagucucaacaugacaaugccucugagcuguacuaagaauaacucccaucacuauaucauggugggaaaugaaaccggccuggagcucacauuaaccaacacuucuauaaucaaucauaaauucugcaaccugucggaugcgcacaagaaaaaucuuuacgaccaugcuuugaugucaauuaucagcacauuucaccugaguauuccaaacuucaaucaguaugaggccauguccugugauuuuaacggugggaagaucucuguucaguacaaucuaagccacaccuaugcaguggacgccgcuaaccauugcggaacgauagcaaauggcguccuccaaacuuucaugaggauggccuggggcggguccuacauugcucuggauucaggaaaggguaguugggacuguaucaugaccagcuaccaguaucuuauuauccagaacacaacuugggaagaucacugccaguuuucucggccgucccccaucggcuaccugggguugcucucacaacgcacccgagacauuuauauaagccguagacuguuaggaacauucaccuggacgcugagugauucugagggcaacgaaacuccugguggguacugucucacaagguggaugcuuaucgaggccgagcugaaaugcuuuggaaauaccgcgguggcaaaguguaacgaaaaacaugacgaggaguucugcgauauguugcggcuauuugacuucaauaagcaggccauucgcagacugaaaacugaagcucagauguccauccagcucauaaacaaggccguaaaugcacugauuaacgaucaacuuaucaugaagaaucaccugagggacaucaugggcauuccauauugcaacuacagcaaauauugguacuugaaucacacaguuaccggccggacgucgcucccccgcuguuggcuggugucuaacggguccuacuuaaaugaaacccauuucucagacgauaucgagcagcaggcugacaacaugauuacagagcugcuacaaaaggaauauauagagcgacagggaaaaacuccucucggucuggucgaucuuuuuguguucaguaccagcuuuuacuugaucuccauuuuccugcaccucaucaagaucccaacacauagacacgugauuggcaaacccugcccuaagccacauaggcugaaucacauggggauauguucuugcggacuuuauaaacacccgggcguccccguuaaguggaagcgguga

SEQ ID NO: 1112 - RNA, 1473 nt, Artificial Sequence
  derived and/or modified protein sequence (opt3) from LASV(Lassa virus/H.sapiens-wt/NGA/2016/ISTH_1472;Clade II)__AVO03605__GPC
augggccagaucauuaccuucuuucaagaggugccccacgucauagaagagguuaugaacaucgugcugauugcccucagccuucuggcuaucuugaaggggauuuacaauguagcaacaugcggauuauucggucugguguccuuucuacuccuguguggcagaucuugcucaacuacguauaaaggggucuacgaacuucagacccuggaguuggacauggccagucucaacaugacaaugccucugagcuguacuaagaauaacucccaucacuauaucauggugggaaaugaaaccggccuggagcucacauuaaccaacacuucuauaaucaaucauaaauucugcaaccugucggaugcgcacaagaaaaaucuuuacgaccaugcuuugaugucaauuaucagcacauuucaccugaguauuccaaacuucaaucaguaugaggccauguccugugauuuuaacggugggaagaucucuguucaguacaaucuaagccacaccuaugcaguggacgccgcuaaccauugcggaacgauagcaaauggcguccuccaaacuuucaugaggauggccuggggcggguccuacauugcucuggauucaggaaaggguaguugggacuguaucaugaccagcuaccaguaucuuauuauccagaacacaacuugggaagaucacugccaguuuucucggccgucccccaucggcuaccugggguugcucucacaacgcacccgagacauuuauauaagccguagacuguuaggaacauucaccuggacgcugagugauucugagggcaacgaaacuccugguggguacugucucacaagguggaugcuuaucgaggccgagcugaaaugcuuuggaaauaccgcgguggcaaaguguaacgaaaaacaugacgaggaguucugcgauauguugcggcuauuugacuucaauaagcaggccauucgcagacugaaaacugaagcucagauguccauccagcucauaaacaaggccguaaaugcacugauuaacgaucaacuuaucaugaagaaucaccugagggacaucaugggcauuccauauugcaacuacagcaaauauugguacuugaaucacacaguuaccggccggacgucgcucccccgcuguuggcuggugucuaacggguccuacuuaaaugaaacccauuucucagacgauaucgagcagcaggcugacaacaugauuacagagcugcuacaaaaggaauauauagaucgacagggaaaaacuccucucggucuggucgaccuuuuuguguucaguaccagcuuuuacuugaucuccauuuuccugcaccucaucaagaucccaacacauagacacgugauuggcaaacccugcccuaagccacauaggcugaaucacauggggauauguucuugcggacuuuauaaacacccgggcguccccguuaaguggaagcgguga

SEQ ID NO: 1113 - RNA, 1473 nt, Artificial Sequence
  derived and/or modified protein sequence (opt3) from LASV(Lassa virus/H.sapiens-wt/NGA/2016/ISTH_1474;Clade II)__AVO03613__GPC
augggccagaucauuaccuucuuucaagaggugccccacgucauagaagagguuaugaacaucgugcugauugcccucagccuucuggcuaucuugaaggggauuuacaauguagcaacaugcggauuauucggucugguguccuuucuacuccuguguggcagaucuugcucaacuacguauaaaggggucuacgaacuucagacccuggaguuggacauggccagucucaacaugacaaugccucugagcuguacuaagaauaacucccaucacuauaucauggugggaaaugaaaccggccuggagcucacauuaaccaacacuucuauaauccaucacaaauucugcaaucugucggaugcgcauaagaaaaaccuuuacgaccacgcuuugaugucaauuaucagcacauuucaccugaguauuccaaauuucaaccaguaugaggccauguccugugauuuuaauggugggaagaucucuguucaguacaaccuaagccauaccuaugcaguggacgccgcuaaucacugcggaacgauagcaaacggcguccuccaaacuuucaugaggauggccuggggcggguccuacauugcucuggauucaggaaaggguaguugggacuguaucaugaccagcuaccaguaucuuauuauccagaauacaacuugggaagaucauugccaguuuucucggccgucccccaucggcuaccugggguugcucucacaacgcacccgagacauuuauauaagccguagacuguuaggaacauucaccuggacgcugagugauucugagggcaacgaaacuccugguggguacugucucacaagguggaugcuuaucgaggccgagcugaaaugcuuuggaaacaccgcgguggcaaaguguaaugaaaaacacgacgaggaguucugcgauauguugcggcuauuugacuucaacaagcaggccauucgcagacugaaaacugaagcucagauguccauccagcucauaaauaaggccguaaacgcacugauuaaugaucaacuuaucaugaagaaccaccugagggacaucaugggcauuccauauugcaauuacagcaaauauugguacuugaaccauacaguuaccggccggacgucgcucccccgcuguuggcuggugucuaauggguccuacuuaaacgaaacccacuucucagacgauaucgagcagcaggcugacaauaugauuacagagcugcuacaaaaggaauauauagaucgacagggaaaaacuccucucggucuggucgaccuuuuuguguucaguaccagcuuuuacuugaucuccauuuuccugcaucucaucaagaucccaacacacagacaugugauuggcaaacccugcccuaagccacacaggcugaaccacauggggauauguucuugcggacuuuauaaacauccgggcguccccguuaaguggaagcgguga

SEQ ID NO: 1114 - RNA, 1476 nt, Artificial Sequence
  derived and/or modified protein sequence (opt3) from LASV(Lassa virus/H.sapiens-wt/NGA/2016/ISTH_1496;Clade II)__AVO03579__GPC
augggccagaucauuaccuucuuucaagaggugccccacgucauagaagagguuaugaacaucgugcugauugcccucagccuucuggcuaucuugaaggggguauacaauguggcaacaugcggauuauucggucuggucuccuuucuacuccuguguggcagaucuugcucaacuacgauuuauaaagggguguacgaacuucagacccuggaguuggacauggccagucucaacaugacaaugccucugagcuguacuaagaauaacucccaucacuauaucaugguuggaaaugaaaccggccuggagcucacauuaaccaacacuucuauaaucaaucauaaauucugcaaccugucggaugcgcacaagaaaaaucuuuacgaccaugcuuugaugucaauuaucagcacauuucaccugaguauuccaaacuucaaucaguaugaggccauguccugugauuuuaacggugggaagaucucugugcaguacaaucuaagccacgcauaugccgucgacgcugcaaaccauugcggaaccauagccaauggcgugcuccaaacguucaugaggauggcuuggggcggguccuacauugcccuggauucaggaaagcggaguugggacuguaucaugacuagcuaccaguaucuuauuauccagaacaccacaugggaagaucacugccaguuuucucgcccgucccccaucgguuaccugggcuugcucucacaacgaacucgugacauuuauauaagcagaaggcuguuagggaccuucacauggacccugagugauucugagggaaacgaaacgccuggcgguuacugucucacucgguggaugcuuaucgaggcggagcugaaaugcuuugggaauacagcaguagccaaguguaacgaaaaacaugacgaggaguucugcgauauguugcgccuauuugacuucaauaagcaggcuauuagaaggcugaaaaccgaagcccagauguccauccagcucauaaacaaggcaguuaaugcucugauuaacgaucaacuuaucaugaagaaucaucugcgggacaucaugggcauuccauauugcaacuacagcaaauauugguacuugaaucacacugugacaggaaagaccucgcucccccgcuguuggcuggucucuaacggcuccuacuuaaaugaaacgcacuucucagacgauaucgagcagcaggccgacaacaugauuaccgagcugcuacaaaaagaauauauagaucgacaggggaagacaccucucggacugguggaccuuuuuguguucaguacuagcuuuuacuugaucuccauuuuccugcaccucgucaaaaucccaacccauagacacguuaucgguaagcccugcccuaaaccacauaggcugaaucacaugggcauuuguucuugcgggcuuuauaagcacccgggagugcccguaaaguggaaacgguga

SEQ ID NO: 1115 - RNA, 1473 nt, Artificial Sequence
  derived and/or modified protein sequence (opt3) from LASV(Lassa virus/H.sapiens-wt/NGA/2016/ISTH_1541;Clade II)__AVO03553__GPC
augggccagaucgugaccuucuuucaagaggucccccacguuauugaagagauaaugaacaucgugcugauuacacucagccuucuggccguauugaaggggaucuacaauuucgcuacuugcggauuaauuggucugaucacguuucuauuccucuguggcagauccugcucuaccauauauaaagggaacuaccagcugcagacacuugaacugaauauggagacuuugaacaugaccaugccucucucauguacaaagaauaacagucaucacuauaucagggugggaaaugaaaccggccuggagcugacucucacaaacgucagcauuaucaaucaucgguuuugcaacuuauccgacgcacacaaacgcaaucuguacgaucauacccuuaugucuauuaucucgacguuccacuugucaauaccaaacuuuaaucaguaugaggccaugagcugugacuucaacggugggaagauuagugugcaauacaaucugucccacggauaugcgguugaugcugccaaacauugcggcacuguggcaaacggcguccuacagaccuuuaugcgaauggccuggggagggucuuacaucgcucucgacagcgguaagggcaacugggauuguauuaugacauccuaccaguaucugaucauccagaauacuaccugggaagaccacugccaauucucacguccgagucccauuggguaccuuggacuguugagccagagaacaagggauauauauaucucucggcgccuccugggcaccuuuacguggacuuuauccgacucagaggguagagaaacaccugggggauacugucugaccagguggaugcucauugaggcagagcuuaagugcuucggcaacacugccguggcuaaauguaaugaaaagcaugaugaggaauuuugcgacaugcugcgguuguucgauuucaacaaacaggccauccagcgccuaaagacagaggcgcaaaugagcauacagcugauuaauaaagcaguaaacgcccucaucaaugaccagcugaucaugaagaaccaccuucgagauauuaugggcaucccauauugcaauuacaguaaguauugguaccugaaccacaccacgaccgggaaaacaucuuugcccaaguguuggcucguuacuaauggauccuaccugaacgaaacccauuuuagcgacgacauugagcaacaggcugauaauaugauaacagagauguuacagaaagaauauaucgacagacaggguaagacuccucugggccuaguggaucucuucgucuuuucgaccucuuucuaccugauuuccaucuuucuucacuugaucaaaauuccaaaccauaggcacauaguggggaagcccugcccuaaaccacaucggcugaaucacaugggaaucuguucaugcggcuucuauaagcaaccgggugugcccguccguuggaagcgcuga

SEQ ID NO: 1116 - RNA, 1473 nt, Artificial Sequence
  derived and/or modified protein sequence (opt3) from LASV(Lassa virus/H.sapiens-wt/NGA/2016/ISTH_1546;Clade II)__AVO03537__GPC
augggccagaucgugaccuucuuucaagagauuccccacgucguugaagagauaaugaacaucgugcugauuacacucagccuucuggccaucuugaagggguuauacaauuucgcuacuugcggacugauuggucuaaucacguuucucuuccuguguggcagauccugcucuaccauauauaaagggucauaccagcuucaggcacuggaauugaacauggagacacucaauaugacuaugccucugaguuguaccaagaacaauagccaucacuauaucaggguaggaaacgaaacaggccuggagcucaccuuaacuaauacauccauuaucaaccauaaauuuugcaaucugucugacgcccacaagaaaaaccuuuacgaucauaccuugaugucgauuaucucaacguuccaccugagcauaccaaauuuuaaccaguaugaggcgaugaguugugacuucaauggugggaagauuuccgugcaauacaaccuaucucacagcuaugcuggagaugccgcacggcauugcggcacugucgccaauggcgugcuccagaccuuuaugcgcauggcuuggggaggguccuacaucgcacuggacucagguaagggcaacugggauuguauuaugacaaguuaccaguaucuuaucauccagaacacuaccugggaagaccacugccaauucagccgaccgucucccauuggguaccugggauugcucucccagcguacaagagauauauauaucucaaggcggcuguuaggcaccuuuacguggacucugagcgacagugaggguaaagaaacaccugggggauacugucucacccgcuggaugcuuauugaggccgagcugaagugcuucggcaauacugcuguugccaaauguaacgaaaagcaugaugaggaauuuugcgacauguugagacuauucgauuucaauaaacaggcgauccagaggcugaagacagaggcacaaaugucuauacagcucauuaacaaggccgugaaugcucugaucaacgaccagcuuaucaugaaaaaucaucugcgggauauuaugggcaucccauauugcaacuacuccaaguauugguacuugaaucacaccacgaccgggaaaacaagccucccccgcuguuggcuggucucgaacggaucuuacuuaaaugaaacucacuuuuccgacgacauugagcaacaggccgauaacaugauaaccgagaugcugcagaaggaauauaucgaccgacaggguaaaacaccucuaggccucguggaucuguucguauuuucaaccaguuucuaccuuauuagcaucuuuuugcaccugaucaagauuccaacucauagacacauaguugggaaauccugccccaagccucauaggcucaaucacaugggaaucuguucuugcggccuguauaagcaaccaggugugccggucaaauggaagcgguga

SEQ ID NO: 1117 - RNA, 1473 nt, Artificial Sequence
  derived and/or modified protein sequence (opt3) from LASV(Lassa virus/H.sapiens-wt/NGA/2016/ISTH_1591;Clade II)__AVO03647__GPC
augggccagaucauuaccuucuuucaagaggugccccacgucauagaagagguuaugaacaucgugcugauugcccucagccuucuggcuaucuugaaggggauuuacaauguagcaacaugcggauuauucggucugguguccuuucuacuccuguguggcagaucuugcucaacuacguauaaaggggucuacgaacuucagacccuggaguuggacauggccagucucaacaugacaaugccucugagcuguacuaagaauaacucccaucacuauaucauggugggaaaugaaaccggccuggagcucacauuaaccaacacuucuauaauccagcauaaauucugcaaucugucggaugcgcacaagaaaaaccuuuacgaccaugcuuugaugucaauuguuagcacauuucaccugaguaucccaaauuucaaccaguaugaggccauguccugugauuuuaauggugggaagauuaccgugcaauacaaccuaucucacagcuaugcaaucgacgccgcuaaucauugcggaacggucgcaaacggcgugcuccagacuuucaugaggauggccuggggcggguccuacauagcucuggauucaggacgggguaguugggacuguauuaugaccagcuaccaguaucuuaucauucagaauacaacuugggaagaucacugccaauuuucucgcccgucccccaucggcuaccugggguugcucucacagcgaacccgugacaucuauauuagcagaaggcuguuaggaacauucaccuggacgcugagugauucugagggcaacgaaacuccugguggguacugucucacacgguggaugcuuauagaggccgagcugaagugcuuuggaaacaccgcgguagcaaaauguaaugaaaagcaugacgaggaguucugcgauauguugcgccuauuugacuucaacaaacaggccaucagaaggcugaaggcugaagcccagauguccauucaacucaucaauaaagcaguuaacgcucugauaaaugaucagcuuauuaugaagaaccaucugcgggacaucaugggcaucccauauugcaauuacagcaaguauugguacuugaaccacacugugacaggccgcaccucgcucccccgauguuggcuggucucuaauggguccuacuuaaacgaaacgcacuucucagacgauauugagcagcaagccgacaauaugaucaccgagcugcuacagaaagaauauauggauagacagggaaagacaccucucggucugguggaccuuuuuguguucaguacuagcuuuuacuugauuuccauauuccugcaccucgucaaaaucccaacccauaggcacauuaucggcaagcccugcccuaaaccacaucggcugaaccacauggggguuuguucuugcggacuuuauaagcacccgggcgugcccguaaaauggaagcguuga

SEQ ID NO: 1118 - RNA, 1473 nt, Artificial Sequence
  derived and/or modified protein sequence (opt3) from LASV(Lassa virus/H.sapiens-wt/NGA/2016/ISTH_1604;Clade II)__AVO03541__GPC
augggccagaucgugaccuucuuucaagaggucccccacguuauugaagagauaaugaacaucgugcugauuacacucagccuucuggccaucuugaaggggguauacaauuuagcuacuugcggacugauuggucuaaucacguuccucuuucuguguggcagauccugcucuaugaccuauaaagggucauaccagcuugaaacacuggaguugaacauggaaacucucaauaugaccaugccucugaguuguacaaagaacaccagccaucacuauauaagggugggaaaugagacuggccuggagcucacauuaaccaacacguccaucauuaaucauaaauucugcaaccugucugacgcacacaagaaaaaucuuuacgaucauucguugaugucaaucgucagcacuuuucaccugaguauuccaaacuucaaucaguaugaagccauguccugugacuuuaacggugggaagaucucuauacaguacaaucuaagccacgcguaugcuggagaugccgcaaagcauugcggcacccucgccaacggcgugcugcaaacauucaugcggauggcuuggggaggguccuacauugcacuugacucaggucgcggcaauugggauuguaucaugaccaguuaccaguaucugauuauccagaacacuacaugggaggaccacugccaguuuagccgaccgucucccaucggguacuugggacuccugucccaacguaccagagaaauuuauauaucaaggcgguuacugggcacguucacuuggacacucagcgauagugaggguaacgaggccccugggggauacugucuuacccgcuggaugcugaucgaagcugaguugaaaugcuuuggcaaugccgcgguugcaaaguguaacgaaaaacaugacgaggaguucugcgauaugcuaagacuguuugacuucaauaagcaggccauucagaggcucaaaacugaagcucagaugucuauccaacugauaaacaaggccgugaaugcacuuauuaacgaucagcugaucaugaagaaucacuugcgggacaucaugggcauuccauauugcaacuacuccaaauauugguaccucaaucacacaaccacggggcgcaccagccugccccgauguugguuagucucgaacggaucuuaccugaaugagacacauuucuccgaugacaucgaacagcaagcugacaacaugauuacugagaugcuacagaaggaauauauagauagacaggguaaaaccccucucggccugguggaccuuuuuguauucucaacaaguuuuuacuugaucagcauuuuccugcaccucguuaagaucccaacucauaggcacaucguggggaaauccugccccaagccucaucggcugaaucacaugggaauuuguucuugcggccuuuauaaacagccaggugucccggugcguuggaagcgcuga

SEQ ID NO: 1119 - RNA, 1473 nt, Artificial Sequence
  derived and/or modified protein sequence (opt3) from LASV(Lassa virus/H.sapiens-wt/NGA/2016/ISTH_1609;Clade II)__AVO03661__GPC
augggccagaucgugaccuucuuucaagagauuccccacgucauagaagagguuaugaacaucgugcugauuacacucagccuucuggccguauugaaggggaucuacaauuucgcuacuugcggauuaauuggucugaucacguuucuauuccucuguggcagauccugcucuaccauauauaaagggucauaccagcugcagaagcuggaacugaacauggagacauugaauaugacuaugccucucaguuguaccaaaaacagcucccaucacuauaucagggugggaaaugaaacaggccuggagcugacccucacuaacacaucuauuaucucgcauaaguuuugcaauuuaucagacgcacacaaaaagaaccuguacgaucaugcccuuaugagcauuaucaguaccuuccacuuguccauaccaaauuuuaaccaguaugaggcgaugucuugugacuucaauggugggaagauuagcguccaauacaaccugucccacucauaugcuggagaugccgcacggcauugcggcacgcuagccaauggcgugcuccagacuuuuaugcgcauggcuuggggagggaguuacaucgcacuggacagcgguaaaggcaacugggauuguauuaugaccucuuaccaguuccuuaucauccagaauacaacuugggaagaccacugccaauuuucccgaccgucacccaugggguaucugggauugcucagccagcguaccagagauauuuacauaaguaggcggcuguuaggcacauucaccuggacgcugucugacuccgaggguaaggaaacuccugggggauauugucucacacgcuggaugcuuaucgaggccgagcugaaaugcuuuggcaacaccgcuguugccaaguguaacgaaaaacaugaugaggaguucugcgacauguugagacuauucgauuuuaauaagcaggcgauucagaggcugaagacugaagcacaaaugagcauccagcucauaaacaaagccgugaaugcucugauuaacgaccagcuuaucaugaagaaucaccuucgggauaucaugggcauuccauacugcaacuauucgcaauacugguauuugaaucacacaaucaccgggaaaacgucucuccccaaguguuggcuggucuccaacggaucauacuuaaaugaaacccauuucagugacgacauugagcagcaggccgauaacaugauaacagagaugcugcagaaagaauacaucgaccgccaagguaagacuccucuaggccucguggaucuguuuguauucagcaccuccuuuuaucuuauuucuaucuucuugcaccugaucaaaauuccaacacaucgacacauaguuggaaagagcugccccaagccucauagacucaauaggauggggaucuguucaugcggccuguacaaacagccaggugugccggucaaguggaaacgguga

SEQ ID NO: 1120 - RNA, 1473 nt, Artificial Sequence
  derived and/or modified protein sequence (opt3) from LASV(Lassa virus/H.sapiens-wt/NGA/2016/ISTH_1610;Clade II)__AVO03603__GPC
augggccagaucauuaccuucuuucaagaggugccccacgucauagaagagguuaugaacaucgugcugauugcccucagccuucuggcuaucuugaaggggauuuacaauguagcaacaugcggauuauucggucugguguccuuucuauuccucuguggcagaucuugcucaacuacguauaaaggggucuacgaacugcagacccuugagcuggacauggccaguuugaacaugacaaugccucucagcuguacuaagaauaacucccaucacuauaucauggugggaaaugaaaccggccuggagcugacacucaccaacacuucuauaaucaaucauaaauuuugcaacuuaucggaugcgcacaagaaaaaucuguacgaccaugcucuuaugucaauuaucagcacauuccacuugaguauuccaaacuuuaaucaguaugaggccauguccugugauuucaacggugggaagaucucuguucaguacaaucugagccacaccuaugcaauagacgccgcuaaccauugcggaacgauugcaaauggcgugcuacaaacuuuuaugaggauggccuggggcggguccuacaucgcucucgauucaggacgggguaguugggacuguauuaugaccagcuaccaguaucugaucauccagaacacaacuugggaagaucacugccaguucucucgcccgucccccauuggcuaccuugggcuguugucacaacgaacccgugacauauauaucagcagaaggcuccugggaacauuuaccuggacguuaagugauucugagggcaacgaaacuccugguggguacugucugacacgguggaugcucauugaggccgagcuuaagugcuucggaaauaccgcggucgcaaaauguaacgaaaagcaugacgaggaauuuugcgauaugcugcgcuuguucgacuucaauaaacaggccaucagaaggcuaaaggcugaggcccagaugaacauacagcugauuaauaaagcagugaacgcucucaucaaugaucaacugaucaugaagaaccaccuucgggacauuaugggcaucccauauugcaauuacuccaaguauugguaccugaaccacacuguaacaggccgcaccagcuugccccgauguuggcucguuucgaaugggucuuaccugaacgaaacgcauuuuuccgacgauauugagcagcaggccgacaauaugauaaccgaguuacugcaaaaagaauauauggauagacagggaaagacaccucuaggucucguggaccuguucgucuuuucaaccaguuucuaccuuaucagcaucuuuuugcaccugauuaaaaucccaacucauaggcacauugugggcaagcccugcccuaaaccacaucggcucaaccacauggggauauguuccugcggacuguauaagcacccgggcgugcccgucaaauggaagcguuga

SEQ ID NO: 1121 - RNA, 1473 nt, Artificial Sequence
  derived and/or modified protein sequence (opt3) from LASV(Lassa virus/H.sapiens-wt/NGA/2018/ISTH_0959;Clade II)__AVV65099__GPC
augggccagaucauuaccuucuuucaagaggugccccacgucauagaagagguuaugaacaucgugcugauugcccucagccuucuggcuaucuugaaggggauuuacaauguagugacaugcggauuauucggucuggucuccuuucuacuccuguguggcagaucuugcucaacuacguauaaagggguguacgaacuucagacccuggaguuggacauggcaagucucaacaugacaaugccucugagcuguacuaagaauaacucccaucacuauaucaugguuggaaaugaaaccggccuggagcucacauuaaccaacacuucuauaaucaaucauaaauucugcaaccugucggaugcccacaagaaaaaucuuuacgaccaugcguugaugucaauuaucagcacauuucaccugaguauuccaaacuucaaucaguaugaggcuauguccugugauuuuaacggugggaagaucucugugcaguacaaucuaagccacgccuaugcaauagacgccgcuaaccauugcggaaccauugcaaauggcguccuccaaacguucaugaggauggccuggggcggguccuacaucgcucuggauucaggaaaggguaguugggacuguauuaugacuagcuaccaguaucuuaucauccagaacaccacaugggaagaucacugccaguuuucucggccgucccccauuggcuaccugggguugcucucacaacgcacucgagacauauauaucagccguagacuguuaggaaccuucacauggacccugagugauucugagggcaacgaaacgccugguggguacugucucacuagguggaugcuuauugaggccgagcugaaaugcuuuggaaauacagcgguggcaaaguguaacgaaaaacaugacgaggaguucugcgauauguugcggcuauuugacuucaauaagcaggccauccgcagacugaaaaccgaagcucagauguccauacagcucauuaacaaggccguaaaugcacugaucaacgaucaacuuaucaugaagaaucaccugagggacauuaugggcaucccauauugcaacuacagcaaauauugguacuugaaucacacuguuacaggcaagaccucgcucccccgguguuggcuggugucuaacggguccuacuuaaaugaaacgcauuucucagacgauauugagcagcaggcugacaacaugauaaccgagcugcuacaaaaagaauauaucgaucgccagggaaagacaccucucggucuggucgaccuuuuuguguucaguacuagcuuuuacuugauuuccaucuuccugcaccucgugaaaaucccaacccaucgacacgucauuggcaagcccugcccuaaaccacauagacugaaucacauggggauauguucuugcggacuuuauaagcacccgggcguucccgugaaguggaaaagguga

SEQ ID NO: 1122 - RNA, 1473 nt, Artificial Sequence
  derived and/or modified protein sequence (opt3) from LASV(Lassa virus/H.sapiens-wt/NGA/2018/ISTH_1024;Clade II)__AVV65105__GPC
augggccagaucauuaccuucuuucaagaggugccccacgucauagaagagguuaugaacaucgugcugauugcccucagccuucuggcuaucuugaaggggguauacaauguggcaacaugcggauuauucggucuggucuccuuucuacuccuguguggcagaucuugcucaacuacguauaaagggguguacgaacuucagacccuggaguuggacauggccaaccucaauaugacaaugccucugaguuguacuaagaacaauagccaucacuauauuaggguuggaaacgaaaccggccuggagcucacauuaaccaauacuuccaucauaaaccauaaauucugcaaucugucugaugcgcacaagaacaaucuuuacgaccaugcuuugaugucgaucauuucaacauuucaccugagcaucccaaacuucaaucaguaugaggccaugaguugugauuuuaacggugggaaaauuuccgugcaguacaaucuaucucacgcauaugccgucgacgcugcaaaccauugcggaaccaucgccaacggcgugcuccaaacguucaugcggauggcuuggggcgggagcuacauagcccuggauuccggacgcgguucaugggacuguauuaugaccaguuaccaguaucuuaucauucagaauacuacaugggaagaucacugccaguuuagccgaccgucucccaucggcuaccugggguugcucucccaacguacuagagacaucuauauuucaaggcggcuguuaggaaccuucacauggacccugagcgauagugagggcaacgaaacgccugguggguacugucucacucgcuggaugcuuauagaggcggagcugaagugcuuuggaaauacagcaguagccaaguguaacgaaaaacaugacgaggaguucugcgauauguugagacuauuugacuucaauaagcaggcuaucaggcggcugaaaaccgaagcccagaugucuauucagcucaucaacaaggcaguuaaugcucugauaaacgaucaacuuauuaugaaaaaucaucugcgcgacaucaugggcaucccauauugcaacuacuccaaguauugguacuugaaucacacugugacaggcaagaccagccucccccgauguuggcuggucucgaacgggacguacuuaaaugaaacccacuucucugacgauauugagcagcaggccgacaacaugaucacagagcugcuacaaaaagaauauauggauagacagggaaagacuccucucggucugguggaccuuuuuguguucuccaccucauuuuacuugauuaguauauuccugcaccucgucaaaaucccaacacauaggcacguuauuggcaagcccugcccuaaaccacaucggcugaaucacauggggaucuguagcugcggacuuuauaagcacccgggcgugcccguaaaauggaagcguuga

SEQ ID NO: 1123 - RNA, 1473 nt, Artificial Sequence
  derived and/or modified protein sequence (opt3) from LASV(Lassa virus/H.sapiens-wt/NGA/2018/ISTH_1079;Clade II)__AVV65107__GPC
augggccagaucauuaccuucuuucaagaggugccccacgucauagaagagguuaugaacaucgugcugauugcccucagccuucuggcuaucuugaaggggauuuacaauguagcaacaugcggauuauucggucugguggccuuucuacuccuguguggcagauccugcucuacuacguauaaaggggucuacgaacuucagacccuggaguuggacauggcgucacucaacaugacaaugccucugaguuguacuaagaauaacagccaucacuauaucauggugggaaaugaaaccggccuggagcucacauuaaccaacacuuccauaaucaaucauaaauucugcaaccugucugaugcucacaagaaaaaucuuuacgaccaugccuugaugucgauuaucucaacauuucaccugagcauuccaaacuucaaucaguaugaggcaaugaguugugauuuuaacggugggaagaucuccguucaguacaaucuaucucacaccuaugccguggacgcugcaaaccauugcggaacgauagccaauggcguccuccaaacuuucaugaggauggcuuggggcgggagcuacauugcccuggauuccggaaaggguucaugggacuguaucaugaccaguuaccaguaucuuauuauccagaacacaacuugggaagaucacugccaguuuagccggccgucucccaucggcuaccugggguugcucucccaacgcacccgagacauuuauauaucacguagacuguuaggaacauucaccuggacgcugagcgauagugagggcaacgaaacuccugguggguacugucucacaagguggaugcuuaucgaggcggagcugaaaugcuuuggaaauaccgcaguggccaaguguaacgaaaaacaugacgaggaguucugcgauauguugcggcuauuugacuucaauaagcaggcuauucgcagacugaaaacugaagcccagaugucuauccagcucauaaacaaggcaguaaaugcucugauuaacgaucaacuuaucaugaagaaucaccugagggacaucaugggcauuccauauugcaacuacuccaaauauugguacuugaaucacacaguuaccggccggacgagccucccccgcuguuggcuggugucgaacgggucuuacuuaaaugaaacccauuucuccgacgauaucgagcagcaggccgacaacaugauuacagagcugcuacaaaaggaauauauggaucgacagggaaaaacuccucucggucuggucgaccuuuuuguguucucaaccaguuuuuacuugauaagcaucuuccugcaccucauuaagaucccaacacauagacacgugaucggcaaacccugcccuaagccacauaggcugaaucacauggggauuuguuccugcggacuuuauaaacacccgggcguccccguuaaguggaagcgguga

SEQ ID NO: 1124 - RNA, 1473 nt, Artificial Sequence
  derived and/or modified protein sequence (opt3) from LASV(Lassa virus/H.sapiens-wt/NGA/2018/ISTH_1177;Clade II)__AVV65101__GPC
augggccagaucauuaccuucuuucaagaggugccccacgucauagaagagguuaugaacaucgugcugauugcccucagccuucuggcuaucuugaaggggauuuacaauguagcaacaugcggauuauucggucugguguccuuucuacuccuguguggcagaucuugcucaacuacguauaaaggggucuacgaacuucagacccuggaguuggacauggccagucucaacaugacaaugccucugagcuguacuaagaauaacucccaucacuauaucagggugggaaaugaaaccggccuggagcucacauuaaccaacacuucuauaaucgaucauaaauucugcaaucugucggacgcgcacaagaaaaaccuuuacgaucaugcuuugaugucaauuaucagcacauuucaccugaguauuccaaauuucaaccaguaugaggccauguccugugacuuuaauggugggaagaucucuguucaguacaaccuaagccacaccuaugcaguggaugccgcuaaucauugcggaacgauagcaaacggcguccuccaaacuuucaugcggauggccuggggcggguccuacauugcucuggacucaggaaaggguaguugggauuguaucaugaccagcuaccaguaucuuauuauccagaauacaacuugggaagaccacugccaguuuucucgcccgucccccaucggcuaccugggguugcucucacaacgaacccgugauauuuauauaagcagaaggcuguuaggaacauucaccuggacgcugagugacucugagggcaacgaaacuccugguggguacugucucacacgguggaugcuuaucgaggccgagcugaaaugcuuuggaaacaccgcgguggcaaaguguaaugaaaaacaugaugaggaguucugcgacauguugcgccuauuugauuucaacaagcaggccauuagaaggcugaaaacugaagcucagauguccauccagcucauaaauaaggccguaaacgcacugauuaaugaccaacuuaucaugaagaaccaucugcgggacaucaugggcauuccauauugcaauuacagcaaauauugguacuugaaccacacaaucaccggccgcacgucgcucccccgauguuggcugguuucuaauggguccuacuuaaacgaaacccacuucucagaugacauugagcagcaggcugauaauaugauaacagagcugcuacaaaaggaauauauggacagacagggaaaaacuccucucggucugguggaucuuuuugucuucaguaccagcuuuuacuugaucuccauuuuccugcaccucgugaagaucccaacacauaggcacgugaucggcaaacccugcccuaagccacaucggcugaaccacauggggauuuguucuugcggacuuuauaaacacccgggcguccccguuaaguggaagcguuga

SEQ ID NO: 1125 - RNA, 1473 nt, Artificial Sequence
  derived and/or modified protein sequence (opt3) from LASV(Lassa virus/H.sapiens-wt/NGA/2018/ISTH_1375;Clade II)__AVV65115__GPC
augggccagaucauuaccuucuuucaagaggugccccacgucauagaagagguuaugaacaucgugcugauugcccucagccuucuggcuaucuugaaggggauuuacaauaucgcaacaugcggauuauucggucugguauccuuucuacuccuguguggcagaucuugcucaacuacguauaaagggguguacgaacuucagacccuggaguuggacauggccagucucaacaugacaaugccucugagcuguacuaagaauaacucccaucacuauauaauggucggaaaugaaaccggccuggagcucacauuaaccaacacuucuaucauuaaucauagguucugcaaccugucggaugcgcacaaaaagaaucuuuacgaccaugcuuugaugucaaucauuagcacauuucaccugaguaucccaaacuucaaucaguaugaggccauguccugugauuuuaacggugggaaaauaucugugcaguacaaucuaagccacgcauaugccguugacgcugcaaaccauugcggaaccauugccaauggcgugcuccaaacguucaugcggauggcuuggggcggguccuacaucgcccuggauucaggaaaggguaguugggacuguauuaugacuagcuaccaguaucuuaucauccagaacaccacaugggaagaucacugccaguuuucucgcccgucccccauuggcuaccugggguugcucucacaacgaacucgugacauauauaucagcagaaggcuguuaggaaccuucacauggacccugagugauucugagggcaacgaaacgccugguggguacugucucacucgguggaugcuuauugaggcggagcugaagugcuuuggaaauacagcagucgccaaauguaacgaaaagcaugacgaggaguucugcgauauguugcgccuauuugacuucaauaaacaggcuaucagaaggcugaagaccgaagcccagauguccauacagcucauuaacaaagcagugaaugcucugaucaacgaucaacuuaucaugaagaaucaucugcgggacauuaugggcaucccauauugcaacuacagcaaguauugguacuugaaucacacuguaacaggcaaaaccucgcucccccgcuguuggcugguuucuaacggguccuacuuaaaugaaacgcacuucucagacgauauugagcagcaggccgacaacaugauaaccgagcugcuacaaaaggaauauaucgaucgacagggaaaaacaccucucggucugguggaccuuuuugucuucaguacuagcuuuuacuugauuuccaucuuccugcaccucgugaagaucccaacccauagacacgugauuggcaaacccugcccuaagccacauaggcugaaucacauggggauauguucuugcggacuuuauaaacacccgggcguccccguuaaguggaagcgguga

SEQ ID NO: 1126 - RNA, 1473 nt, Artificial Sequence
  derived and/or modified protein sequence (opt3) from LASV(Lassa virus/H.sapiens-wt/NGA/2018/ISTH_1381;Clade II)__AVV65111__GPC
augggccagaucgugaccuucuuucaagaggucccccacguuauugaagaggugaugaacauaguacugaucgcccucagccuucuggcuauuuugaaggggaucuacaauguggcaacaugcggauuauucggucuggucuccuuucuacuccuguguggcagaucuugcucaacuacguauaaagggguguacgaacuucagacccuggaguuggacauggccagucucaacaugacaaugccucugagcuguacuaagaauaacucccaucacuauauuaugguuggaaaugaaaccggccuggagcucacauuaaccaacacuucuaucauaaaucauaaauucugcaaccugucggaugcgcacaagaaaaaucuuuacgaccaugcuuugaugucaaucauuagcacauuucaccugaguaucccaaacuucaaucaguaugaggccauguccugugauuuuaacggugggaagauuucugugcaguacaaucuaagccacaccuaugcagucgacgccgcuaaccauugcggaacgaucgcaaauggcgugcuccaaacuuucaugaggauggccuggggcggguccuacauagcucuggauucaggaaaggguaguugggacuguauuaugaccagcuaccaguaucuuaucauucagaacacaacuugggaagaucacugccaguuuucucggccgucccccaucggcuaccugggguugcucucacaacgcacccgagacaucuauauuagccguagacuguuaggaacauucaccuggacgcugagugauucugagggcaacgaaacuccugguggguacugucucacaagguggaugcuuauagaggccgagcugaaaugcuuuggaaauaccgcgguagcaaaguguaacgaaaaacaugacgaggaguucugcgauauguugcggcuauuugacuucaauaagcaggccauccgcagacugaaaacugaagcucagauguccauucagcucaucaacaaggccguuaaugcacugauaaacgaucaacuuauuaugaagaaucaccugagggacaucaugggcaucccauauugcaacuacagcaaauauugguacuugaaucacacagugaccggcaagacgucgcucccccgguguuggcuggucucuaacggguccuacuuaaaugaaacccauuucucagacgauauugagcagcaggcugacaacaugaucacagagcugcuacaaaaagaauauauggaucgccagggaaagacuccucucggucugguggaccuuuuuguguucaguaccagcuuuuacuugauuuccauauuccugcaccucgucaaaaucccaacacaucgacacguugugggcaagcccugcccuaaaccacauagacugaaucacauggggauuuguucuugcggacuuuauaagcacccgggcguacccgugagguggaagcgguga

SEQ ID NO: 1127 - RNA, 1473 nt, Artificial Sequence
  derived and/or modified protein sequence (opt3) from LASV(Lassa virus/H.sapiens-wt/NGA/2018/ISTH_1643;Clade II)__AVV65119__GPC
augggccagaucauuaccuucuuucaagaggugccccacgucauagaagagguuaugaacaucgugcugauugcccucagccuucuggcuaucuugaaggggauuuacaauguagcaacaugcggauuauucggucugguguccuuucuacuccuguguggcagaucuugcucaacuacguauaaaggggucuacgaacuucagacccuggaguuggacauggccagucucaacaugacaaugccucugagcuguacuaagaauaacucccaucacuauaucauggugggaaaugaaaccggccuggagcucacauuaaccaacacuucuauaaucaaucauaaauucugcaaccugucggaugcgcacaagaaaaaucuuuacgaccaugcuuugaugucaauuaucagcacauuucaccugaguauuccaaacuucaaucaguaugaggccauguccugugauuuuaacggugggaagaucucuguucaguacaaucuaagccacaccuaugcaguggacgccgcuaaccauugcggaacgauagcaaauggcguccuccaaacuuucaugaggauggccuggggcggguccuacauugcucuggauucaggaaaggguaguugggacuguaucaugaccagcuaccaguaucuuauuauccagaacacaucuugggaagaucacugccaguuuucccggccgucacccaucggcuaccugggguugcucagccaacgcacucgagacauuuauauaagucguagacuguuaggaaccuucacauggacccugucugauuccgagggcaacgaaacgccugguggguacugucucacuagguggaugcuuaucgaggccgagcugaaaugcuuuggaaauacagcgguggcaaaguguaacgaaaaacaugacgaggaguucugcgauauguugcggcuauuugacuucaauaagcaggccauucgcagacugaaaaccgaagcucagaugagcauccagcucauaaacaaggccguaaaugcacugauuaacgaucaacuuaucaugaagaaucaccugagggacaucaugggcauuccauauugcaacuacucgaaauauugguacuugaaucacacuguuacaggcaagaccucucucccccgguguuggcugguguccaacgggacguacuuaaaugaaacccauuucucagacgauaucgagcagcaggcugacaacaugauuacagagcugcuacaaaaagaauauauagaucgccagggaaagacuccucucggucuggucgaccuuuuuguguucaguaccagcuuuuacuugaucuccauuuuccugcaccucgugaaaaucccaacacaucgacacgucaucggcaagcccugcccuaaaccacauagacugaaucacauggggauuuguucuugcggacuuuauaagcacccgggcguucccgugaaguggaaaagguga

SEQ ID NO: 1128 - RNA, 1473 nt, Artificial Sequence
  derived and/or modified protein sequence (opt3) from LASV(LASV003-NIG-2008;Clade II)__AIT17580__GPC
augggccagaucauuaccuucuuucaagaggugccccacgucauagaagagguuaugaacaucgugcugauugcccucagccuucuggcuaucuugaaggggauuuacaauguagcaacaugcggauuauucggucugguguccuuucuacuccuguguggcagaucuugcucaacuacguauaaaggggucuacgaacuucagacccuggaguuggacauggccagucucaacaugacaaugccucugagcuguacuaagaauaacucccaucacuauaucauggugggaaaugaaaccggccuggagcucacauuaaccaacacuucuauaaucaaucauaaauucugcaaccugucggaugcgcacaagaaaaaucuuuacgaccaugcuuugaugucaauuaucagcacauuucaccugaguauuccaaacuucaaucaguaugaggccauguccugugauuuuaacggugggaagaucucuguucaguacaaucuaagccacaccuaugcaguggacgccgcuaaccauugcggaacgauagcaaauggcguccuccaaacuuucaugaggauggccuggggcggguccuacauugcucuggauucaggaaaggguaguugggacuguaucaugaccagcuaccaguaucuuauuauccagaacacaacuugggaagaucacugccaguuuucucggccgucccccaucggcuaccugggguugcucucacaacgcacccgagacauuuauauaagccguagacuguuaggaacauucaccuggacgcugagugauucugaguccaacgaaacuccuggcgguuacugucucacaagguggaugcuuaucgaggccgagcugaaaugcuuugggaauaccgcgguggcaaaguguaacgaaaaacaugacgaggaguucugcgauauguugcggcuauuugacuucaauaagcaggccauucgcagacugaaagcugaagcccagaugagcauccagcucauaaacaaggcaguaaaugcucugauuaacgaucaacuuaucaugaagaaucaccugagggacaucaugggcauuccauauugcaacuacucgaaauauugguacuugaaucacacuguuacaggacggaccucucucccccgcuguuggcugguguccaacggcucauacuuaaaugaaacgcauuucagugacgauaucgagcagcaggccgacaacaugauuaccgagcugcuacaaaaggaauauauggaucgacaggggaaaacaccucucggacuggucgaccuuuuuguguucagcacuuccuuuuacuugauaucuaucuuccugcaccucgugaagauuccaacccauagacacgucaucgguaaacccugcccuaagccacauaggcugaaucacaugggcaucuguagcugcgggcuuuauaaacacccgggaguucccgugaaguggaagcgguga

SEQ ID NO: 1129 - RNA, 1473 nt, Artificial Sequence
  derived and/or modified protein sequence (opt3) from LASV(LASV006-NIG-2008;Clade II)__AIT17584__GPC
augggccagaucauuaccuucuuucaagaggugccccaggucauagaagagguuaugaacaucgugcugauugcccucagccuucuggcuaucuugaaggggauuuacaauguagcaacaugcggauuauucggucugguguccuuucuacuccuguguggcagaucuugcucaacuacguauaaaggggucuacgaacuucagacccuggaguuggacauggccagucucaacaugacaaugccucugagcuguacuaagaauaacucccaccauuauaucauggugggaaaugaaaccggccuggagcucacauuaaccaaccagucuauaaucaaucacaaauucugcaaccugucggaugcgcauaagaaaaaucuuuacgaccacgcuuugaugucaauuaucagcacuuuucaucugaguauuccaaacuucaaucaauaugaggccauguccugugauuuuaacggugggaagaucucuguucaguacaaucuaagccacuccuucgcaguggacgccgcuaaccacugcggaacaauagcaaauggcguccuccagaccuuuaugaggauggccuggggcgggucauauauugcucuggauaguggaaaggguagcugggacuguaucaugacgucuuaccaguaccuuauuauccaaaacacuaccugggaagaucauugccaguucucccggccgucacccaucggcuaucugggguugcucagccagcgcacacgagacauuuacauaagucguagacuguuaggaacuuuuaccuggacacugucugauuccgagggcaacgaaaccccugguggguauugucucacgagguggaugcuuaucgaggccgagcugaaaugcuucggaaauacugcgguggcaaaguguaacgaaaaacacgacgaggaauuuugcgauauguugcggcuauucgacuucaauaagcaggccauucgcagacugaaaacagaggcucaaaugagcauccagcucauaaacaaggccguaaaugcacugauuaacgaucagcuuaucaugaagaaucaucugagggacaucaugggcauuccauacugcaacuauucgaaauacugguauuugaaucacaccaagacuggcaaaacaucucucccccgguguuggcugguuuccaacgggucauacuuaaaugaaacccacuuuagugacgauaucgagcaacaggcugacaacaugauuacggagcugcuacagaaggaauacauggaucgccagggaaaaaccccucucggucugguggaccuuuucgucuuuagcacauccuucuauuugauaucuaucuuucugcaucucgugaagauuccaacucaccgacaugugaucggcaaacccugcccuaagccacacagacugaaucauauggggaucuguagcugcggacuuuacaagcacccgggcguccccguuaaauggaagagguga

SEQ ID NO: 1130 - RNA, 1473 nt, Artificial Sequence
  derived and/or modified protein sequence (opt3) from LASV(LASV035-NIG-2009;Clade II)__AIT17588__GPC
augggccagaucauuaccuucuuucaagaggugccccacgucauagaagagguuaugaacaucgugcugauugcccucagccuucuggcuaucuugaaggggauuuacaauguagcaacaugcggauuauucggucugguguccuuucuacuccuguguggcagaucuugcucaacuacguauaaaggggucuacgaacuucagacccuggaguuggacauggccagucucaacaugacaaugccucugagcuguacuaagaauaacucccaucacuauaucauggugggaaaugaaaccggccuggagcucacauuaaccaacacuucuauaaucaaucauaaauucugcaaccugucggaugcgcacaagaaaaaucuuuacgaccaugcuuugaugucaauuaucagcacauuucaccugaguauuccaaacuucaaucaguaugaggccauguccugugauuuuaacggugggaagaucucuguucaguacaaucuaagccacgcauaugccguggacgcugcaaaccauugcggaaccauagccaauggcguccuccaaacguucaugaggauggcuuggggcggguccuacauugcccuggauucaggaaaggguaguugggacuguaucaugacuagcuaccaguaucuuauuauccagaacaccacaugggaagaucacugccaguuuucucggccgucccccaucggcuaccugggguugcucucacaacgcacucgagacauuuauauaagccguagacuguuaggaaccuucacauggacccugagugauucugagggcaacgaaacgccugguggguacugucucacuagguggaugcuuaucgaggcggagcugaaaugcuuuggaaauacagcaguggccaaguguaacgaaaaacaugacgaggaguucugcgauauguugcggcuauuugacuucaauaagcaggcuauucgcagacugaaagccgaagcacagauguccauccagcucauaaacaaggcuguaaaugcccugauuaacgaucaacuuaucaugaagaaucaccugagggacaucaugggcauuccauauugcaacuacagcaaauauugguacuugaaucacaccguuacuggcaagacaucgcucccccgguguuggcuggugucuaacggguccuacuuaaaugaaacccauuucucagacgauaucgagcagcaggcggacaacaugauuacggagcugcuacaaaaagaauauauagaucgccagggaaagaccccucucggucuggucgaccuuuuuguguucaguacuagcuuuuacuugaucuccauuuuccugcaccucgugaaaaucccaacacaucgacacgucaucggcaagcccugcccuaaaccacauagacugaaucacauggggauuuguucuugcggacuuuauaagcacccgggcguucccgugaaguggaaaagguga

SEQ ID NO: 1131 - RNA, 1473 nt, Artificial Sequence
  derived and/or modified protein sequence (opt3) from LASV(LASV042-NIG-2009;Clade II)__AIT17592__GPC
augggccagaucauuaccuucuuucaagaggugccccacgucauagaagagguuaugaacaucgugcugauugcccucagccuucuggcuaucuugaaggggauuuacaauguagcaacaugcggauuauucggucugguguccuuucuacuccuguguggcagaucuugcucaacuacguauaaaggggucuacgaacuucagacccuggaguuggacauggccagucucaacaugacaaugccucugagcuguacuaagaauaacucccaucacuauaucauggugggaaaugaaaccggccuggagcucacauuaaccaacacuucuauaaucaaucauaaauucugcaaccugucggaugcgcacaagaaaaaucuuuacgaccauacauugaugucaauuaucagcaccuuucaccugaguauuccaaacuucaaucaguaugaggcuauguccugugauuuuaacggugggaggaucucuguucaguacaaucuaagccacgccuaugcaguggacgccgcuaaccauugcggaacgauagcaaauggcguccuccaaacuuucaugcggauggccuggggcggguccuacauugcucuggauucaggaaaggguaguugggacuguaucaugaccagcuaccaguaucuuauuauccagaacacaacuugggaagaucacugccaguuuucucgcccgucccccaucggcuaccugggguugcucucacaacgaacccgugacauuuauauaagcagaaggcuguuaggaacauucaccuggacgcugagugauucugagggcaacgaaacuccugguggguacugucucacacgguggaugcuuaucgaggccgagcugaagugcuuuggaaauaccgcgguggcaaaauguaacgaaaagcaugacgaggaguucugcgauauguugcgccuauuugacuucaauaaacaggccauuagaaggcugaagacugaagcucagauguccauccagcucauaaacaaagccguaaaugcacugauuaacgaucaacuuaucaugaagaaucaucugcgggacaucaugggcauuccauauugcaacuacagcaaguauugguacuugaaucacacaaucaccggcaaaacgucgcucccccgcuguuggcugguuucuaacggguccuacuuaaaugaaacccacuucucagacgauauugagcagcaggcugacaacaugauaacagagcugcuacaaaaggaauauaucgaucgacagggaaaaacuccucucggucugguggaccuuuuugucuucaguaccagcuuuuacuugauuuccaucuuccugcaccucgugaagaucccaacacauagacacguggucggcaaacccugcccuaagccacauaggcugaaucacauggggauuuguucuugcggacuuuauaaacacccgggcguucccgugaaguggaagcgguga

SEQ ID NO: 1132 - RNA, 1473 nt, Artificial Sequence
  derived and/or modified protein sequence (opt3) from LASV(LASV045-NIG-2009;Clade II)__AIT17596__GPC
augggccagaucauuaccuucuuucaagaggugccccacgucauagaagagguuaugaacaucgugcugauugcccucagccuucuggcuaucuugaaggggauuuacaauguagcaacaugcggauuauucggucugguguccuuucuacuccuguguggcagaucuugcucaacuacguauaaaggggucuacgaacuucagacccuggaguuggacauggccagucucaacaugacaaugccucugagcuguacuaagaauaacucccaucacuauaucauggugggaaaugaaaccggccuggagcucacauuaaccaacacuucuauaaucaaucauaaauucugcaaccugucggaugcgcacaagaaaaaucuuuacgaccaugcuuugaugucaauuaucagcacauuucaccugaguauuccaaacuucaaucaguaugaggccauguccugugauuuuaacggugggaagaucucuguucaguacaaucuaagccacaccuaugcaguggacgccgcuaaccauugcggaacgauagcaaauggcguccuccaaacuuucaugaggauggccuggggcggguccuacauugcucuggauucaggaaaggguaguugggacuguaucaugaccagcuaccaguaucuuauuauccagaacacaucuugggaagaucacugccaguuuucccggccgucacccaucggcuaccugggguugcucagccaacgcacucgagacauuuauauaagucguagacuguuaggaaccuucacauggacccugucugauuccgagggcaacgaaacgccugguggguacugucucacuagguggaugcuuaucgaggccgagcugaaaugcuuuggaaauacagcgguggcaaaguguaacgaaaaacaugacgaggaguucugcgauauguugcggcuauuugacuucaauaagcaggccauucgcagacugaaaaccgaagcucagaugagcauccagcucauaaacaaggccguaaaugcacugauuaacgaucaacuuaucaugaagaaucaccugagggacaucaugggcauuccauauugcaacuacucgaaauauugguacuugaaucacacuguuacaggcaagaccucucucccccgguguuggcugguguccaacgggucauacuuaaaugaaacgcauuucagugacgauaucgagcagcaggcugacaacaugauuaccgagcugcuacaaaaagaauauauagaucgccagggaaagacaccucucggucuggucgaccuuuuuguguucagcacuuccuuuuacuugaucucuauuuuccugcaccucgugaaaaucccaacccaucgacacgucaucggcaagcccugcccuaaaccacauagacugaaucacauggggauuuguagcugcggacuuuauaagcacccgggcguucccgugaaguggaaaagguga

SEQ ID NO: 1133 - RNA, 1473 nt, Artificial Sequence
  derived and/or modified protein sequence (opt3) from LASV(LASV046-NIG-2009;Clade II)__AIT17600__GPC
augggccagaucauuaccuucuuucaagaggugccccacgucauagaagagguuaugaacaucgugcugauugcccucagccuucuggcuaucuugaaggggauuuacaauguagcaacaugcggauuauucggucugguguccuuucuacuccuguguggcagaucuugcucaacuacguauaaaggggucuacgaacuucagacccuggaguuggacauggccagucucaacaugacaaugccucugagcuguacuaagaauaacucccaucacuauaucauggugggaaaugaaaccggccuggagcucacauuaaccaacacuucuauaaucaaucauaaauucugcaaccugucggaugcgcacaagaaaaaucuuuacgaccaugcuuugaugucaauuaucagcacauuucaccugaguauuccaaacuucaaucaguaugaggccauguccugugauuuuaacggugggaagaucucuguucaguacaaucuaagccacgcauaugccggagacgcugcaaaccauugcggcaccauagccaauggcgugcuccaaacguucaugaggauggcuuggggaggguccuacauugcccuggauucagguaagggcaguugggacuguaucaugacuagcuaccaguaucuuauuauccagaacaccacaugggaagaucacugccaguuuucucggccgucccccaucggguaccugggauugcucucacaacgcacucgagacauuuauauaagccguagacuguuaggcaccuucacauggacccugagugauucugaggguaacgaaacgccugggggauacugucucacuagguggaugcuuaucgaggcggagcugaaaugcuuuggcaauacagcagucgccaaguguaacgaaaaacaugacgaggaguucugcgauauguugcggcuauuugacuucaauaagcaggcuauucgcagacugaaaaccgaagcccagauguccauccagcucauaaacaaggcagugaaugcucugauuaacgaucaacuuaucaugaagaaucaccugagggacaucaugggcauuccauauugcaacuacagcaaauauugguacuugaaucacacuguaacagggaagaccucgcucccccgguguuggcugguuucuaacggauccuacuuaaaugaaacgcauuucucagacgauaucgagcagcaggccgacaacaugauuaccgagcugcuacaaaaagaauauauagaucgccaggguaagacaccucucggccugguggaccuuuuugucuucaguacuagcuuuuacuugaucuccauuuuccugcaccucgugaaaaucccaacccaucgacacgugaucgggaagcccugcccuaaaccacauagacugaaucacaugggaauuuguucuugcggccuuuauaagcacccggguguccccguuaaguggaaaagguga

SEQ ID NO: 1134 - RNA, 1473 nt, Artificial Sequence
  derived and/or modified protein sequence (opt3) from LASV(LASV049-NIG-2009;Clade II)__AIT17604__GPC
augggccagaucauuaccuucuuucaagaggugccccacgucauagaagagguuaugaacaucgugcugauugcccucagccuucuggcuaucuugaaggggauuuacaauguagcaacaugcggauuauucggucugguguccuuucuacuccuguguggcagaucuugcucaacuacguauaaaggggucuacgaacuucagacccuggaguuggacaugacaagucucaacaugacuaugccucugagcuguaccaagaauaacucccaucacuauaucauggugggaaaugaaacaggccuggagcucaccuuaacuaacacaucuauaaucaaucauaaauucugcaaccugucggaugcccacaagaaagaccuuuacgaucaugcguugaugucaauuaucagcaccuuucaccugaguauuccaaauuucaaccaguaugaggcuauguccugugacuuuaauggugggaagaucucuguucaguacaaccuaagccacacguaugccguggaugcagccaagcauugcggaacuauagcuaauggcguccuccaaaccuucaugaggauggcauggggcggguccuacauugcccuggacucaggaaaagguaguugggauuguaucaugacaagcuaccaguaucuuauuauccagaacacuaccugggaagaccacugccaguuuucucggccgucccccgugggcuaccugggguugcucucacaacgcacacgagauaucuauauuagccguagacuguuaggaaccuucacguggacucugagugacucugagggcaaugaaacaccugguggguacugucucaccagguggaugcuuauagaggcugagcugaagugcuuuggaaacacugccguagcgaaauguaacgaaaagcaugaugaggaguucugcgacauguugcggcuauuugauuucaauaaacaggcaauccgcagacugaagacagaagcccagauguccauucagcucaucaacaaggcuguuaaugcccugauaaacgaccaacuuauuaugaaaaaucaccugagggacaucaugggcaucccauauugcaacuacagcaaguauugguacuugaaucacaccgugacgggcaaaaccucgcucccccgguguuggcuggucucuaacggguccuacuuaaaugaaacacauuucucagaugacauugagcagcaggcagauaacaugaucacugagcugcuacaaaaggaauaucucgaccgccagggaaaaaccccucugggucuuguggauuuguuuguguucaguacuagcuuuuaccugauuuccauauuccuccaccuggucaagaucccaacacaucgacacguuauuggcaaacccugcccuaagccacauagacuuaaucacauggggaucuguucuugcggacuguauaagcacccgggcgugcccguaaaauggaagagguga

SEQ ID NO: 1135 - RNA, 1473 nt, Artificial Sequence
  derived and/or modified protein sequence (opt3) from LASV(LASV052-NIG-2008;Clade II)__AIT17608__GPC
augggccagaucauuaccuucuuucaagaggugccccacgucauagaagagguuaugaacaucgugcugauugcccucagccuucuggcuaucuugaaggggauuuacaauguagcaacaugcggauuauucggucugguguccuuucuacuccuguguggcagaucuugcucaacuacguauaaaggggucuacgaacuucagacccuggaguuggacauggccagucucaacaugacaaugccucugagcuguacuaagaauaacucccaucacuauaucauggugggaaaugaaaccggccuggagcucacauuaaccaacacuucuauaaucaaucauaaauucugcaaccugucggaugcgcacaagaggaaucuuuacaaccaugcuuugaugucaauuaucagcacauuucaccugaguauuccaaauuucaaccaguaugaggccauguccugugacuuuaauggugggaaaaucucuguucaguacaaccuaagccacaccuaugcaguggaugccgcuaaucauugcggaacgauagcaaacggcguccuccaaacuuucaugcggauggccuggggcggguccuacauugcucuggacucaggaaaggguaguugggauuguaucaugaccagcuaccaguaucuuauuauccagaacacaacuugggaagaccacugccaguuuucucgcccgucccccaucggcuaccugggguugcucucacaacgaacccgugauauuuauauaagcagaaggcuguuaggaacauucaccuggacgcugagugacucugagggcaaugaaacuccugguggguacugucucacacgguggaugcuuaucgaggccgagcugaagugcuuuggaaacaccgcgguggcaaaauguaaugaaaagcaugaugaggaguucugcgacauguugcgccuauuugauuucaacaaacaggccauuagaaggcugaagacugaagcucagauguccauccagcucauaaauaaagccguaaacgcacugauuaaugaccaacuuaucaugaagaaccaucugcgggauaucaugggcauuccauauugcaauuacagcaaguauugguacuugaaccacacaguuaccggcaaaacgucgcucccccgcuguuggcuggugucuaauggguccuacuuaaacgaaacccacuucucagacgacaucgagcagcaggcugauaauaugauuacagagcugcuacaaaaggaauauauagaccgacagggaaaaacuccucucggucuggucgaucuuuuuguguucaguaccagcuuuuacuugaucuccauuuuccugcaccucgugaagaucccaacacauagacacaucauuggcaaacccugcccuaagccacauaggcugaaccacauggggauauguucuugcggacuuuauaaacacccgggcguccccguuaaguggcggcguuga

SEQ ID NO: 1136 - RNA, 1473 nt, Artificial Sequence
  derived and/or modified protein sequence (opt3) from LASV(LASV056-NIG-2008;Clade II)__AIT17612__GPC
augggccagaucauuaccuucuuucaagaggugccccacgucauagaagagguuaugaacaucgugcugauugcccucagccuucuggcuaucuugaaggggauuuacaauguagcaacaugcggauuauucggucugguguccuuucuacuccuguguggcagaucuugcucaacuacguauaaaggggucuacgaacuucagacccuggaguuggacauggccagucucaacaugacaaugccucugagcuguacuaagaauaacucccaucacuauaucagggugggaaaugaaaccggccuggagcucacauuaaccaacacuucuauaaucaaucauaaauucugcaaccugucggaugcgcacaagaaaaaucuuuacgaccauucauugaugagcauuaucaguacauuucaccuguccauuccaaacuucaaucaguaugaggcuaugucuugugauuuuaacggugggaagaucagcguucaguacaaucuaucccacaccuaugccguggacgcagccaaccauugcggaacgauagcuaauggcguccuccaaacuuucaugcggauggcauggggcgggucauacauugcccuggauaguggaaaggguaacugggacuguaucaugaccagcuaccaguaucuuauuauccagaacacaacuugggaagaucacugccaguuuucucgcccgucccccaucggcuaccugggguugcucucacaacgaacccgugacauuuauauaagcagaaggcuguuaggaacauucaccuggacgcugagugauucugagggcaaugaaacuccugguggguacugucucacacgguggaugcuuaucgaggcugagcugaaaugcuuuggaaacaccgccguggcgaaguguaaugaaaaacaugacgaggaguucugcgauauguugcgccuauuugacuucaacaagcaggcaauuagaaggcugaaaacugaagcccagauguccauccagcucauaaauaaggcuguaaacgcccugauuaaugaucaacuuaucaugaagaaccaucugcgggacaucaugggcauuccauauugcaauuacagcaaauauugguacuugaaccacacaguuaccggcaagacgucgcucccccgcuguuggcuggugucuaauggguccuacuuaaacgaaacccacuucucagacgauaucgagcagcaggcagacaauaugauuacagagcugcuacaaaaagaauauauagaucgacagggaaagacuccucucggucuggucgaccuuuuuguguucaguaccagcuuuuacuugaucuccauuuuccugcaccucgugaaaaucccaacacauagacacgucguuggcaagcccugcccuaaaccacauaggcugaaccacauggggaucuguucuugcggacuuuauaagcacccgggcgugcccguaaaguggaaacgguga

SEQ ID NO: 1137 - RNA, 1473 nt, Artificial Sequence
  derived and/or modified protein sequence (opt3) from LASV(LASV058-NIG-2008;Clade II)__AIT17616__GPC
augggccagaucauuaccuucuuucaagaggugccccacgucauagaagagguuaugaacaucgugcugauugcccucagccuucuggcuaucuugaaggggauuuacaauguagcaacaugcggauuauucggucugguguccuuucuacuccuguguggcagaucuugcucaacuacguauaaaggggucuacgaacuucagacccuggaguuggacauggccagucucaacaugacaaugccucugagcuguacuaagaauaacucccaucacuauaucauggugggaaaugaaaccggccuggagcucacauuaaccaacacuucuauaaucaaucauaaauucugcaaccugucggaugcgcacaagaaaaaucuuuacgaccaugcuuugaugucaauuaucagcacauuucaccugaguauuccaaacuucaaucaguaugaggccauguccugugauuuuaacggugggaagaucucuguucaguacaaucuaagccacgcauaugccguggacgcugcaaaccauugcggaaccauagccaauggcguccuccaaacguucaugaggauggcuuggggcggguccuacauugcccuggauucaggaaaggguaguugggacuguaucaugacuagcuaccaguaucuuauuauccagaacaccacaugggaagaucacugccaguuuucucggccgucccccaucggcuaccugggguugcucucacaacgcacucgagacauuuauauaagccguagacuguuaggaaccuucacauggacccugagugauucugagggcaacgaaacgccugguggguacugucucacuagguggaugcuuaucgaggcggagcugaaaugcuuuggaaauacagcaguggccaaguguaacgaaaaacaugacgaggaguucugcgauauguugcggcuauuugacuucaauaagcaggcuauucgcagacugaaaaccgaagcccagauguccauccagcucauaaacaaggcaguaaaugcucugauuaacgaucaacuuaucaugaagaaucaccugagggacaucaugggcauuccauauugcaacuacagcaaauauugguacuugaaucacacuguuacaggcaagaccucgcucccccgguguuggcuggugucuaacggguccuacuuaaaugaaacgcauuucucagacgauaucgagcagcaggccgacaacaugauuaccgagcugcuacaaaaagaauauauagaucgccagggaaagacaccucucggucuggucgaccuuuuuguguucaguacuagcuuuuacuugaucuccauuuuccugcaccucgugaaaaucccaacccaucgacacgucaucggcaagcccugcccuaaaccacauagacugaaucacauggggauuuguucuugcggacuuuauaagcacccgggcguucccgugaaguggaaaagguga

SEQ ID NO: 1138 - RNA, 1473 nt, Artificial Sequence
  derived and/or modified protein sequence (opt3) from LASV(LASV063-NIG-2009;Clade II)__AIT17620__GPC
augggccagaucauuaccuucuuucaagaggugccccacgucauagaagagguuaugaacaucgugcugauugcccucagccuucuggcuaucuugaaggggauuuacaauguagcaacaugcggauuauucggucugguguccuuucuacuccuguguggcagaucuugcucaacuacguauaaaggggucuacgaacuucagacccuggaguuggacauggccagucucaacaugacaaugccucugagcuguacuaagaauaacucccaucacuauaucauggugggaaaugaaaccggccuggagcucacauuaaccaacacuucuauaaucucgcauaaauucugcaaucugucagaugcgcacaagaaaaaccuuuacgaccaugcuuugaugagcauuaucaguacauuucaccuguccauuccaaauuucaaccaguaugaggccaugucuugugauuuuaauggugggaagaucagcguucaguacaaccuaucccacgcauaugccauagacgcugcaaaucauugcggaaccguggccaacggcguccuccaaacguucaugaggauggcuuggggcgggucauacauugcccuggauaguggaaaggguagcugggacuguaucaugacuucuuaccaguaucuuauuauccagaauaccacaugggaagaucacugccaguuuucccggccgucacccaucggcuaccugggguugcucagccaacgcacucgagacauuuauauaagucguagacuguuaggaaccuucacauggacccugucugauuccgagggcaacgaaacgccugguggguacugucucacuagguggaugcuuaucgaggcggagcugaaaugcuuuggaaacacagcaguggccaaguguaaugaaaaacaugacgaggaguucugcgauauguugcggcuauuugacuucaacaagcaggcuauucgcagacugaaagccgaagcacagaugagcauccagcucauaaauaaggcuguaaacgcccugauuaaugaucaacuuaucaugaagaaccaccugagggacaucaugggcauuccauauugcaauuacucgaaauauugguacuugaaccacaccguuacuggcaagacaucucucccccgguguuggcugguguccaaugggucauacuuaaacgaaacccauuucagugacgauaucgagcagcaggcggacaauaugauuacggagcugcuacaaaaagaauauauggaucgccagggaaagaccccucucggucuggucgaccuuuuuguguucagcacauccuuuuacuugauaucuaucuuccugcaccucgugaaaauuccaacucaucgacacgucaucggcaagcccugcccuaaaccacauagacugaaccacauggggaucuguagcugcggacuuuauaagcacccgggcguucccgugaaguggaaaagguga

SEQ ID NO: 1139 - RNA, 1473 nt, Artificial Sequence
  derived and/or modified protein sequence (opt3) from LASV(LASV1000-NIG-2009;Clade II)__AIT17782__GPC
augggccagaucauuaccuucuuucaagaggugccccacgucauagaagagguuaugaacaucgugcugauugcccucagccuucuggcuaucuugaaggggauuuacaauguagcaacaugcggauuauucggucugguguccuuucuacuccuguguggcagaucuugcucaacuacguauaaaggggucuacgaacuucagacccuggaguuggacauggccagucucaacaugacaaugccucugagcuguacuaagaauaacucccaucacuauaucauggugggaaaugaaaccggccuggagcucacauuaaccaacacuucuauaaucaaucauaaauucugcaaccugucggaugcgcacaagaaaaaucuuuacgaccaugcuuugaugucaauuaucagcacauuucaccugaguauuccaaacuucaaucaguaugaggccauguccugugauuuuaacggugggaagaucucuguucaguacaaucuaagccacaccuaugcaguggacgccgcuaaccauugcggaacgauagcaaauggcguccuccaaacuuucaugaggauggccuggggcggguccuacauugcucuggauucaggaaaggguaguugggacuguaucaugaccagcuaccaguaucuuauuauccagaacacaacuugggaagaucacugccaguuuucucggccgucccccaucggcuaccugggguugcucucacaacgcacccgagacauuuauauaagccguagacuguuaggaacauucaccuggacgcugagugauucugagggcaacgaaacuccugguggguacugucucacaagguggaugcuuaucgaggccgagcugaaaugcuuuggaaauaccgcgguggcaaaguguaacgaaaaacaugacgaggaguucugcgauauguugcggcuauuugacuucaauaagcaggccauuaaacgccugaagacugaagcucagauguccauccagcucauaaacaaggccguaaaugcacugauuaacgaucaacuuaucaugaaaaaucaccugagagacaucaugggcauuccauauugcaacuacagcaaguauugguacuugaaucacacaguuaccggcaaaacgucgcuccccagguguuggcuggugucuaacggguccuacuuaaaugaaacccauuucucagacgauaucgagcagcaggcugacaacaugauuacagagcugcuacaaaaggaauauauagaucggcagggaaaaacuccucucggucuggucgaccuuuuuguguucaguaccagcuuuuacuugaucuccauuuuccugcaccucgugaagaucccaacacaucgccacgucguuggcaaacccugcccuaagccacaucgacugaaucacauggggaucuguucuugcggacuuuauaagcacccgggcgugcccguaaaauggaagagauga

SEQ ID NO: 1140 - RNA, 1473 nt, Artificial Sequence
  derived and/or modified protein sequence (opt3) from LASV(LASV1008-NIG-2009;Clade II)__AIT17786__GPC
augggccagaucauuaccuucuuucaagaggugccccacgucauagaagagguuaugaacaucgugcugauugcccucagccuucuggcuaucuugaaggggauuuacaauguagcaacaugcggauuauucggucugguguccuuucuacuccuguguggcagaucuugcucaacuacguauaaaggggucuacgaacuucagacccuggaguuggacauggccagucucaacaugacaaugccucugagcuguacuaagaauaacucccaucacuauaucauggugggaaaugaaaccggccuggagcucacauuaaccaacacuucuauaaucaaucauaaauucugcaaccugucggaugcgcacaagaaaaaucuuuacgaccaugcuuugaugucaauuaucagcacauuucaccugaguauuccaaacuucaaucaguaugaggccauguccugugauuuuaacggugggaagaucucuguucaguacaaucuaagccacgcauaugccauagacgcugcagaucauugcggaaccauugccaacggcgugcuccaaacguucaugaggauggcuuggggcggguccuacaucgcccuggacucaggaaaggguaguugggauuguauuaugacuagcuaccaguaucuuaucauccagaauaccacaugggaagaccacugccaguuuucucggccgucccccauuggcuaccugggguugcucucacaacgcacucgagauauauauaucagccguagacuguuaggaaccuucacauggacccugagugacucugagggcaacgaaacgccugguggguacugucucacuagguggaugcuuauugaggcggagcugaaaugcuuuggaaacacagcagucgccaaguguaaugaaaaacaugaugaggaguucugcgacauguugcggcuauuugauuucaacaagcaggcuauccgcagacugaaaaccgaagcccagauguccauacagcucauuaauaaggcagugaacgcucugaucaaugaccaacuuaucaugaagaaccaccugagggacauuaugggcaucccauauugcaauuacagcaaauauugguacuugaaccacacuguaacaggcaagaccucgcucccccgguguuggcugguuucuaauggguccuacuuaaacgaaacgcauuucucagaugacauugagcagcaggccgauaauaugauaaccgagcugcuacaaaaagaauauauggaccgccagggaaagacaccucucggucugguggaucuuuuugucuucaguacuagcuuuuacuugaucuccauuuuccugcaccucgugaaaaucccaacccaucgacacaucacaggcaagcccugcccuaaaccacauagacugaaccacauggggauuuguucuugcggacuuuauaagcacccgggcgugcccgucaaguggaaaagguga

SEQ ID NO: 1141 - RNA, 1473 nt, Artificial Sequence
  derived and/or modified protein sequence (opt3) from LASV(LASV1011-NIG-2009;Clade II)__AIT17790__GPC
augggccagaucauuaccuucuuucaagaggugccccacgucauagaagagguuaugaacaucgugcugauugcccucagccuucuggcuaucuugaaggggauuuacaauguagcaacaugcggauuauucggucugguguccuuucuacuccuguguggcagaucuugcucaacuacguauaaaggggucuacgaacuucagacccuggaguuggacauggccagucucaacaugacaaugccucugagcuguacuaagaauaacucccaucacuauaucauggugggaaaugaaaccggccuggagcucacauuaaccaacacuucuauaaucaaucauaaauucugcaaccugucggaugcgcacaagaaaaaucuuuacgaccaugcuuugaugucaauuaucagcacauuucaccugaguauuccaaacuucaaucaguaugaggccauguccugugauuuuaacggugggaagaucucuguucaguacaaucuaagccacaccuaugcaguggacgccgcuaaccauugcggaacgauagcaaauggcguccuccaaacuuucaugaggauggccuggggcggguccuacauugcucuggauucaggaaaggguaguugggacuguaucaugaccagcuaccaguaucuuauuauccagaacacaacuugggaagaucacugccaguuuucucggccgucccccaucggcuaccugggguugcucucacaacgcacccgagacauuuauauaagccguagacuguuaggaacauucaccuggacgcugagugauucugagggcaacgaaacuccugguggguacugucucacaagguggaugcuuaucgaggccgagcugaaaugcuuuggaaauaccgcgguggcaaaguguaacgaaaaacaugacgaggaguucugcgauauguugcggcuauuugacuucaauaagcaggccauucgcagacugaaaacugaagcucagauguccauccagcucauaaacaaggccguaaaugcacugauuaacgaucaacuuaucaugaagaaucaccugagggacaucaugggcauuccauauugcaacuacagcaaauauugguacuugaaucacacaguuaccggcaagacgucgcucccccgguguuggcuggugucuaacggguccuacuuaaaugaaacccauuucucagacgauaucgagcagcaggcugacaacaugauuacagagcugcuacaaaaagaauauauggaucgccagggaaagacuccucucggucuggucgaccuuuuuguguucaguaccagcuuuuacuugauauccaucuuccugcaccucgugaaaauuccaacacaucgacacaucacuggcaagcccugcccuaaaccacauagacugaaucacauggggaucuguucuugcggacuuuauaagcacccgggcguccccguuaaguggaaaagguga

SEQ ID NO: 1142 - RNA, 1473 nt, Artificial Sequence
  derived and/or modified protein sequence (opt3) from LASV(LASV1016-NIG-2009;Clade II)__AIT17798__GPC
augggccagaucauuaccuucuuucaagaggugccccacgucauagaagagguuaugaacaucgugcugauugcccucagccuucuggcuaucuugaaggggauuuacaauguagcaacaugcggauuauucggucugguguccuuucuacuccuguguggcagaucuugcucaacuacguauaaaggggucuacgaacuucagacccuggaguuggacauggccagucucaacaugacaaugccucugagcuguacuaagaauaacucccaucacuauaucauggugggaaaugaaaccggccuggagcucacauuaaccaacacuucuauaaucaaucauaaauucugcaaccugucggaugcgcacaagaaaaaucuuuacgaccaugcuuugaugucaauuaucagcacauuucaccugaguauuccaaacuucaaucaguaugaggccauguccugugauuuuaacggugggaagaucucuguucaguacaaucuaagccacaccuaugcaguggacgccgcuaaccauugcggaacgauagcaaauggcguccuccaaacuuucaugaggauggccuggggcggguccuacauugcucuggauucaggaaaggguaguugggacuguaucaugaccagcuaccaguaucuuauuauccagaacacaacuugggaagaucacugccaguuuucucggccgucccccaucggcuaccugggguugcucucacaacgcacccgagacauuuauauaagccguagacuguuaggaacauucaccuggacgcugagugauucugagggcaacgaaacuccugguggguacugucucacaagguggaugcuuaucgaggccgagcugaaaugcuuuggaaauaccgcgguggcaaaguguaacgaaaaacaugacgaggaguucugcgauauguugcggcuauuugacuucaauaagcaggccauuaugcgccugaaaacugaagcucagauguccauccagcucauaaacaaggccguaaaugcacugauuaacgaucaacuuaucaugaagaaucaccugagagacaucaugggcauuccauauugcaacuacagcaaauauugguacuugaaucacacaguuaccggcaagacgucgcuccccagguguuggcuggugucuaacggguccuacuuaaaugaaacccauuucucagacgauaucgagcagcaggcugacaacaugauuacagagaugcugcaaaaagaauaucuagaucggcagggaaagacuccucucggucuggucgaccuuuuuguguucaguaccagcuuuuacuugauauccaucuuccugcaccucgugaaaauuccaacacaucgccacaucaucggcaagcccugcccuaaaccacaucgacugaaucacauggggauuuguucuugcggacuuuauaagcacccgggcguccccguuaaguggaaaagauga

SEQ ID NO: 1143 - RNA, 1473 nt, Artificial Sequence; identical to SEQ ID NO: 1055
  derived and/or modified protein sequence (opt3) from LASV(LASV221-NIG-2010;Clade II)__AIT17624__GPC

SEQ ID NO: 1144 - RNA, 1473 nt, Artificial Sequence
  derived and/or modified protein sequence (opt3) from LASV(LASV224-NIG-2010;Clade II)__AIT17626__GPC
augggccagaucauuaccuucuuucaagaggugccccacgucauagaagagguuaugaacaucgugcugauugcccucagccuucuggcuaucuugaaggggguauacaauguggcaacaugcggauuauucggucuggucuccuuucuacuccuguguggcagaucuugcucaacuacguauaaagggguguacgaacuucagacccuggaguuggacauggccagucucaacaugacaaugccucugagcuguacuaagaauaacucccaucacuauauuaugguuggaaaugaaaccggccuggagcucacauuaaccaacacuucuaucauacagcauaaauucugcaaucugucggaugcgcacaagaaaaaccuuuacgaccaugcuuugaugucaaucauuagcacauuucaccugaguaucccaaauuucaaccaguaugaggccauguccugugauuuuaauggugggaagauuaccgugcaauacaaccuaucucacagcuaugcaaucgacgccgcuaaucauugcggaacgauagcaaacggcguccuccagacuuucaugaggauggccuggggcggguccuacauugcucuggauucaggaaaggguaguugggacuguaucaugaccagcuaccaguaucuuauuauccagaauacaacuugggaagaucacugccaauuuucucggccgucccccaucggcuaccugggguugcucucacagcgcacccgagacauuuauauaagccguagacuguuaggaacauucaccuggacgcugagugauucugagggcaacgaaacuccugguggguacugucucacaagguggaugcuuaucgaggccgagcugaaaugcuuuggaaacaccgcgguggcaaaguguaaugaaaaacaugacgaggaguucugcgauauguugcggcuauuugacuucaacaagcaggccauucgcagacugaaaacugaagcucagauguccauccaacucauaaauaaggccguaaacgcacugauuaaugaucagcuuaucaugaagaaccaccugagggacaucaugggcauuccauauugcaauuacagcaaauauugguacuugaaccacacaguuaccggccggacgucgcucccccgcuguuggcuggugucuaauggguccuacuuaaacgaaacccauuucucagacgauaucgagcagcaagcugacaauaugauuacagagcugcuacagaaggaauauauggaucgacagggaaaaacuccucucggucuggucgaccuuuuuguguucaguaccagcuuuuacuugauauccaucuuccugcaccucgugaagauuccaacacauagacacaucaucggcaaacccugcccuaagccacauaggcugaaccacaugggggucuguucuugcggacuuuauaaacacccgggcguucccgugaaguggaagcgguga

SEQ ID NO: 1145 - RNA, 1473 nt, Artificial Sequence
  derived and/or modified protein sequence (opt3) from LASV(LASV225-NIG-2010;Clade II)__AIT17630__GPC
augggccagaucauuaccuucuuucaagaggugccccacgucauagaagagguuaugaacaucgugcugauugcccucagccuucuggcuaucuugaaggggauuuacaauguagcaacaugcggauuauucggucugcuauccuuucuccugcuuuguggcagaucuugcucaacuacguauaaagggguguacgaacugcagaccuuggagcucgacauggccagucugaacaugacaaugccucugagcuguacuaagaauaacucccaucacuauaucauggucggaaaugaaaccggccucgaguuaacacugaccaacacuucuauaaucaaucauaaauucugcaaccuuucggaugcgcacaagaaaaauuuguacgaccaugcucugaugucaauuaucagcacauuucaccuaaguauuccaaacuucaaucaguaugaggccauguccugugauuuuaacggugggaagaucucugugcaguacaaucucagccacgcauaugccguugacgcugcagaacauugcggaaccauagccaacggcgugcugcaaacguucaugaggauggcuuggggcggguccuacauugcccuugauucaggaaaggguaguugggacugugucaugacuagcuaccaguaucugaucauucagaauaccucuugggaggaucacugccaguuuucccggccgucacccaucggcuacuuggggcuccugagccaacgcacacgagacaucuauauuagucguagauuacugggaacuuucaccuggacacucucugauuccgaaggcaacgagaccccugguggguacugucuuacgagguggaugcugauagaggcggaauugaaaugcuuuggaaacacugcaguggccaaguguaaugagaaacaugacgaagaguucugcgauaugcuacggcuguuugacuucaacaagcaggcuauccgcagacucaaaacagaagcccagaugagcauucagcugaucaauaaggcaguaaacgcucuuauaaaugaucaacugauuaugaagaaccacuugagggacaucaugggcaucccauauugcaauuacucgaaauauugguaccucaaccacaccguuacuggcaagacaucucugccccgguguugguuaguguccaaugggucauaccugaacgagacccauuucagugacgauauugagcagcaggccgacaauaugaucacggaacuacuccaaaaagaguauauugaucgccagggaaagaccccucugggucuugucgacuuguuuguguucagcacauccuuuuaccugauaucuaucuuccuccaccuggugaaaauuccaacucaucgacacgucaucggcaagcccugcccuaaaccacauagacuuaaccacauggggaucuguagcugcggacuguauaagcacccgggcguucccgugaaguggaaaagguga

SEQ ID NO: 1146 - RNA, 1473 nt, Artificial Sequence
  derived and/or modified protein sequence (opt3) from LASV(LASV229-NIG-2010;Clade II)__AIT17634__GPC
augggccagaucauuaccuucuuucaagaggugccccacgucauagaagagguuaugaacaucgugcugauugcccucagccuucuggcuaucuugaaggggauuuacaauguagcaacaugcggauuauucggucugguguccuuucuacuccuguguggcagaucuugcucaacuaucuauaaagacgucuacgaacuucagacgcuggaguuggauauggccagucucaacaugaccaugccucugagcuguacaaagaauaacucccaucacuauauaaugguggggaaugaaacuggacuggagcucaccuuaacaaacaccucuaucauuaaucauaaauucugcaaccugucggacgcgcacaagaaaaaucuuuacgaucaugcuuugaugucaaucauuagcacuuuucaccugaguaucccaaacuucaaucaguaugaggccauguccugugacuuuaacggcgguaagauaucuguucaguacaaucuaagccacacauaugcaauugaugccgcuaaccauugcgggaccaucgcaaauggagugcuccaaacguucaugaggauggccuggggcggcuccuacauugcucuggacucagggaagggaaguugggauuguaucaugacuagcuaccaguaucuuaucauucagaacaccacaugggaagaccacugccaguuuucucggccgucccccauagguuaccugggcuugcucucacaacgcacucgagauaucuauauuagccguagacuguuagggaccuucacauggacccugagugacucugagggaaacgaaacgccuggcgguuacugucucacuagguggaugcuuaucgaggccgagcugaaaugcuuugggaauacagcggucgcaaaguguaacgaaaaacaugaugaggaguucugcgacauguugcggcuauuugauuucaauaagcaggccauacgcagacugaaaaccgaagcucagauguccauucagcucaucaacaaggccgugaaugcacugaucaacgaccaacuuauuaugaagaaucaccugagggacaucaugggcauuccauauugcaacuacagccgguauugguacuugaaucacacuguaacaggacgcaccucgcucccccgauguuggcugguuucuaacggcuccuacuuaaaugaaacgcauuucucagaugacauagagcagcaggcugauaacaugaucaccgagcugcuacaaaaagaauauauggacagacaggggaagacaccucucggacugguggaucuuuuugucuucaguacuagcuuuuacuugauuuccaucuuccugcaccucgugaaaaucccaacccauaggcacgugauugguaagcccugcccuaaaccacaucggcugaaucacaugggcauauguucuugcgggcuuuauaaccacccgggaguccccguuaaguggaaacguuga

SEQ ID NO: 1147 - RNA, 1473 nt, Artificial Sequence
  derived and/or modified protein sequence (opt3) from LASV(LASV237-NIG-2010;Clade II)__AIT17638__GPC
augggccagaucauuaccuucuuucaagaggugccccacgucauagaagagguuaugaacaucgugcugauugcccucagccuucuggcuaucuugaaggggauuuacaauguagcaacaugcggauuauucggucugguguccuuucuacuccuguguggcagaucuugcucaacuacguauaaaggggucuacgaacuucagacccuggaguuggacauggccagucucaacaugacaaugccucugagcuguacuaagaauaacucccaucacuauaucauggugggaaaugaaaccggccuggagcucacauuaaccaacacuucuauaaucaaucauaaauucugcaaccugucggaugcgcacaagaaagaccuuuacgaucaugcuuugaugucaauuaucagcacauuucaccugaguauuccaaauuucaaccaguaugaggccauguccugugacuuuaauggugggaagaucucuguucaguacaaccuaagccacaccuaugcaguggaugccgcuaaucauugcggaacgauagcaaacggcguccuccaaacuuucaugaggauggccuggggcggguccuacauugcucuggacucaggaaaggguaguugggauuguaucaugaccagcuaccaguaucuuauuauccagaauacaacuugggaagaccacugccaguuuucucggccgucccccaucggcuaccugggguugcucucacaacgcacccgagauauuuauauaagccguagacuguuaggaacauucaccuggacgcugagugacucugagggcaacgaaacuccugguggguacugucucacaagguggaugcuuaucgaggccgagcugaaaugcuuuggaaacaccgcgguggcaaaguguaaugaaaaacaugaugaggaguucugcgacauguugcggcuauuugauuucaacaagcaggccauucgcagacugaaaacugaagcucagauguccauccagcucauaaauaaggccguaaacgcacugauuaaugaccaacuuaucaugaagaaccaccugagggacaucaugggcauuccauauugcaauuacagcaaauauugguacuugaaccacacaguuaccggcaagacgucgcucccccgguguuggcuggugucuaauggguccuacuuaaacgaaacccauuucucagaugacaucgagcagcaggcugauaauaugauuacagagcugcuacaaaaagaauauauggaccgccagggaaagacuccucucggucuggucgaucuuuuuguguucaguaccagcuuuuacuugauauccaucuuccugcaccucauuaaaaucccaacacaucgacacaucacuggcaagcccugcccuaaaccacauagacugaaccacauggggauuuguucuugcggacuuuauaagcacccgggcgugcccgucaaguggaaaagguga

SEQ ID NO: 1148 - RNA, 1473 nt, Artificial Sequence
  derived and/or modified protein sequence (opt3) from LASV(LASV239-NIG-2010;Clade II)__AIT17642__GPC
augggccagaucauuaccuucuuucaagaggugccccacgucauagaagagguuaugaacaucgugcugauugcccucagccuucuggcuaucuugaaggggguauacaauguggcaacaugcggauuauucggucuggucuccuuucuacuccuguguggcagaucuugcucaacuacguauaaagggguguacgaacuucagacccuggaguuggacauggccagucucaacaugacaaugccucugagcuguacuaagaauaacucccaucacuauauuaugguuggaaaugauaccggccuggaacucacauuaaccaacacuucuaucauaaaucauaaauucugcaaccugucggacgcgcacaagaaaaaucuuuacgaucaugcuuugaugucaaucauuagcacauuucaccugaguaucccaaacuucaaucaguaugaggccauguccugugacuuuaacggugggaagauuucugugcaguacaaucuaagccacgcauaugccgucgaugcugcaucccauugcggaaccaucgccaacggcgugcuccaaacguucaugaggauggcuuggggcgggucauacauagcccuggacaguggaaaggguagcugggauuguauuaugacuucuuaccaguaucuuaucauucagaauaccacaugggaggaccacugccaguuuucccggccgucacccaucggcuaccugggguugcucagccaacgcacucgagauaucuauauuagucguagacuguuaggaaccuucacauggacccugucugacuccgaaggcaacgagacgccugguggguacugucucacuagguggaugcuuauagaagcggagcugaaaugcuuuggaaacacagcaguagccaaguguaaugagaaacaugaugaagaguucugcgacauguugcggcuauuugauuucaacaagcaggcuauccgcagacugaaaaccgaagcccagaugagcauucagcucaucaauaaggcaguuaacgcucugauaaaugaccaacuuauuaugaagaaccaccugagggacaucaugggcaucccauauugcaauuacucgaaauauugguacuugaaccacacugugacaggcaagaccucucucccccgguguuggcuggucuccaaugggucauacuuaaacgagacgcauuucagugaugacauugaacagcaggccgauaauaugaucaccgagcugcuacaaaaagaguauauggaccgccagggaaagacaccucucggucugguggaucuuuuuguguucagcacuuccuuuuacuugauuucuauauuccugcaccucgucaaaaucccaacccaucgacacauuaucggcaagcccugcccuaaaccacauagacugaaccacauggggaucuguagcugcggacuuuauaagcacccgggcguucccgugaaguggaaaagguga

SEQ ID NO: 1149 - RNA, 1473 nt, Artificial Sequence
  derived and/or modified protein sequence (opt3) from LASV(LASV241-NIG-2011;Clade II)__AIT17646__GPC
augggccagaucauuaccuucuuucaagaggugccccacgucauagaagagguuaugaacaucgugcugauugcccucagccuucuggcuaucuugaaggggauuuacaauguagcaacaugcggauuauucggucugguguccuuucuacuccuguguggcagaucuugcucaacuacguauaaaggggucuacgaacuucagacccuggaguuggacauggccagucucaacaugacaaugccucugagcuguacuaagaauaacucccaucacuauaucauggugggaaaugaaaccggccuggagcucacauuaaccaacacuucuauaaucaaucauaaauucugcaaccugucggaugcgcacaagaaaaaucuuuacgaccaugcuuugaugucaauuaucagcacauuucaccugaguauuccaaacuucaaucaguaugaggccauguccugugauuuuaacggugggaagaucucuguucaguacaaucuaagccacgcauaugccguggacgcugcaucccauugcggaaccgucgccaacggcgugcuccaaacguucaugaggauggcuuggggcgggucauacauagcccuggauaguggaaaggguagcugggacuguauuaugacuucuuaccaguaucuuaucauucagaauaccacaugggaagaucacugccaguuuucccggccgucacccaucggcuaccugggguugcucagccaacgcacucgagacaucuauauuagucguagacuguuaggaaccuucacauggacccugucugauuccgagggcaacgaaacgccugguggguacugucucacuagguggaugcuuauagaggcggagcugaaaugcuuuggaaacacagcaguagccaaguguaaugaaaaacaugacgaggaguucugcgauauguugcggcuauuugacuucaacaagcaggcuauccgcagacugaaaaccgaagcccagaugagcauucagcucaucaauaaggcaguuaacgcucugauaaaugaucaacuuauuaugaagaaccaccugagggacaucaugggcaucccauauugcaauuacucgaaauauugguacuugaaccacacugugacaggcaagaccucucucccccgguguuggcuggucuccaaugggucauacuuaaacgaaacgcauuucagugacgauauugagcagcaggccgacaauaugaucaccgagcugcuacaaaaagaauauauggaucgccagggaaagacaccucucggucugguggaccuuuuuguguucagcacuuccuuuuacuugauuucuauauuccugcaccucgucaaaaucccaacccaucgacacguuauuggcaagcccugcccuaaaccacauagacugaaccacauggggaucuguagcugcggacuuuauaagcacccgggcgugcccguaaaguggaaaagguga

SEQ ID NO: 1150 - RNA, 1473 nt, Artificial Sequence
  derived and/or modified protein sequence (opt3) from LASV(LASV242-NIG-2010;Clade II)__AIT17650__GPC
augggccagaucauuaccuucuuucaagaggugccccacgucauagaagagguuaugaacaucgugcugauugcccucagccuucuggcuaucuugaaggggauuuacaauguagcaacaugcggauuauucggucugguguccuuucuacuccuguguggcagaucuugcucaacuacguauaaaggggucuacgaacuucagacccuggaguuggacauggccagucucaacaugacaaugccucugagcuguacuaagaauaacucccaucacuauaucauggugggaaaugaaaccggccuggagcucacauuaaccaacauaucuaucauuaaucauaaauucugcaaccugucggaugcgcacaagaaaaaucuuuacgaccaugcuuugaugucaaucauuagcacuuuucaccugaguaucccaaacuucaaucaguaugaggccauguccugugauuuuaacggugggaagauaucuguucaguacaaucuaagccacacauaugcaguggacgccgcuaaccauugcggaaccauugcaaauggcguccuccaaacguucaugaggauggccuggggcggguccuacaucgcucuggauucaggaaaggguaguugggacuguauuaugacuagcuaccaguaucuuaucauccagaacaccacaugggaagaucacugccaguuuucucggccgucccccauuggcuaccugggguugcucucacaacgcacucgagacauauauaucagccguagacuguuaggaaccuucacauggacccugagugauucugagggcaacgaaacgccugguggguacugucucacuagguggaugcuuauugaggccgagcugaaaugcuuuggaaauacagcgguggcaaaguguaacgaaaaacaugacgaggaguucugcgauauguugcggcuauuugacuucaauaagcaggccauccgcagacugaaagcugaagcccagauguccauacagcucauuaacaaggcaguaaaugcucugaucaacgaucaacuuaucaugaagaaucaccugagggacauuaugggcaucccauauugcaacuacagcaaauauugguacuugaaucacaccguuacuggccggacaucgcucccccgcuguuggcuggugucuaacggguccuacuuaaaugaaacccauuucucagacgauauugagcagcaggccgacaacaugauaacggagcugcuacaaaaggaauauaucgaucgacagggaaaaaccccucucggucuggucgaccuuuuuguguucaguacuagcuuuuacuugauuuccaucuuccugcaccucgugaagaucccaacacauagacacauuauaggcaaacccugcccuaagccacauaggcugaaucacauggggaucuguucuugcggacuuuauaaacacccgggcguccccguuaaguggaagcgguga

SEQ ID NO: 1151 - RNA, 1473 nt, Artificial Sequence
  derived and/or modified protein sequence (opt3) from LASV(LASV246-NIG-2010;Clade II)__AIT17658__GPC
augggccagaucauuaccuucuuucaagaggugccccacgucauagaagagguuaugaacaucgugcugauugcccucagccuucuggcuaucuugaaggggguauacaauguggcaacaugcggauuauucggucuggucuccuuucuacuccuguguggcagaucuugcucaauuacuuauaaagggguguacgaacuucagacgcuggaguuggacauggccaaccucaauaugaccaugccucugaguuguacaaagaacaauagccaucacuauaucaugguuggaaacgaaacuggccuggagcucaccuuaacaaauaccuccauaaucaaccauaaauucugcaaucugucugaugcgcacaagaaaaaccuuuacgaccaugcuuugaugucgauuaucucaacuuuucaccugagcauuccaaauuucaaccaguaugaggccaugaguugugauuuuaauggugggaagaucuccgugcaguacaaccuaucucacacauaugcaggagacgccgcugaucauugcggcaccauagcaaauggcguccuccaaacguucaugaggauggccuggggagggagcuacauugcucuggacuccgguaagggcucaugggauuguaucaugaccaguuaccaguaucuuauuauccagaacacuacaugggaagaccacugccaguuuagccggccgucucccaugggguaccugggauugcucucccaacgcacucgagauaucuauauuucacguagacuguuaggcaccuucacauggacccugagcgacagugaggguaacgaaacgccugggggauacugucucacuagguggaugcuuauagaggccgagcugaaaugcuuuggcaauacagcgguggcaaaguguaacgaaaaacaugaugaggaguucugcgacauguugcggcuauuugauuucaauaagcaggccauccgcagacugaaaaccgaagcucagaugucuauucagcucaucaacaaggccguaaaugcacugauaaacgaccaacuuauuaugaagaaucaccugagggacaucaugggcaucccauauugcaacuacuccaaauauugguacuugaaucacacuauuacagggaagaccagccucccccgguguuggcugguuucgaacggaucuuacuuaaaugaaacgcauuucuccgaugacaucgagcagcaggcugauaacaugauuaccgagcugcuacaaaaagaauauauagaccgccaggguaagacaccucucggccugguggaucuuuuugucuucucaaccaguuuuuacuugaucagcauuuuccugcaccucgugaaaaucccaacucaucgacacaucacagggaagcccugcccuaaaccacauagacugaaucacaugggaauuuguuccugcggccuuuauaagcacccgggugugcccgucagguggaagcgguga

SEQ ID NO: 1152 - RNA, 1473 nt, Artificial Sequence
  derived and/or modified protein sequence (opt3) from LASV(LASV251-NIG-2010;Clade II)__AIT17666__GPC
augggccagaucgugaccuucuuucaagaggucccccacguuauugaagaggugaugaacauaguacugaucgcccucagccuucuggcuauuuugaaggggaucuacaauguggcaacaugcggauuauucggucuggucuccuuucuacuccuguguggcagaucuugcucaacuacguauaaagggguguacgaacuucagacccuggaguuggacauggccagucucaacaugacaaugccucugagcuguacuaagaauaacucccaucacuauauuaugguuggaaaugaaaccggccuggagcucacauuaaccaacacuucuaucauaaaucauaaauucugcaaccugucggaugcgcacaagaaaaaucuuuacgaccaugcuuugaugucaaucauuagcacauuucaccugaguaucccaaacuucaaucaguaugaggccauguccugugauuuuaacggugggaagauuucugugcaguacaaucuaagccacaccuaugcagucgacgccgcuaaccauugcggaacgaucgcaaauggcgugcuccaaacuuucaugaggauggccuggggcggguccuacauagcucuggauucaggaaaggguaguugggacuguauuaugaccagcuaccaguaucuuaucauucagaacacaacuugggaagaucacugccaguuuucucggccgucccccaucggcuaccugggguugcucucacaacgcacccgagacaucuauauuagccguagacuguuaggaacauucaccuggacgcugagugauucugagggcaacgaaacuccugguggguacugucucacaagguggaugcuuauagaggccgagcugaaaugcuuuggaaauaccgcgguagcaaaguguaacgaaaaacaugacgaggaguucugcgauauguugcggcuauuugacuucaauaagcaggccauccgcagacugaaaacugaagcucagauguccauucagcucaucaacaaggccguuaaugcacugauaaacgaucaacuuauuaugaagaaucaccugagggacaucaugggcaucccauauugcaacuacagcaaauauugguacuugaaucacacagugaccggcaagacgucgcucccccgguguuggcuggucucuaacggguccuacuuaaaugaaacccauuucucagacgauauugagcagcaggcugacaacaugaucacagagcugcuacaaaaagaauauauggaucgccagggaaagacuccucucggucugguggaccuuuuuguguucaguaccagcuuuuacuugauuuccauauuccugcaccucgucaaaaucccaacacaucgacacauuacuggcaagcccugcccuaaaccacauagacugaaucacauggggaucuguucuugcggacuuuauaagcacccgggcguucccgugaaguggaaaagguga

SEQ ID NO: 1153 - RNA, 1473 nt, Artificial Sequence
  derived and/or modified protein sequence (opt3) from LASV(LASV253-NIG-2011;Clade II)__AIT17670__GPC
augggccagaucauuaccuucuuucaagaggugccccacgucauagaagagguuaugaacaucgugcugauugcccucagccuucuggcuaucuugaaggggauuuacaauguagcaacaugcggauuauucggucugguguccuuucuacuccuguguggcagaucuugcucaacuacguauaaaggggucuacgaacuucagacccuggaguuggacauggccagucucaacaugacaaugccucugagcuguacuaagaauaacucccaucacuauaucauggugggaaaugaaaccggccuggagcucacauuaaccaacacuucuauaaucaaucauaaauucugcaaccugucggaugcgcacaagaaaaaucuuuacgaccaugcuuugaugucaauuaucagcacauuucaccugaguauuccaaacuucaaucaguaugaggccauguccugugauuuuaacggugggaagaucucuguucaguacaaucuaagccacaccuaugcaguggacgccgcuaaccauugcggaacgauagcaaauggcguccuccaaacuuucaugaggauggccuggggcggguccuacauugcucuggauucaggaaaggguaguugggacuguaucaugaccagcuaccaguaucuuauuauccagaacacaacuugggaagaucacugccaguuuucucggccgucccccaucggcuaccugggguugcucucacaacgcacccgagacauuuauauaagccguagacuguuaggaacauucaccuggacgcugagugauucugagggcaacgaaacuccugguggguacugucucacaagguggaugcuuaucgaggccgagcugaaaugcuuuggaaauaccgcgguggcaaaguguaacgaaaaacaugacgaggaguucugcgauauguugcggcuauuugacuucaauaagcaggccauucgcagacugaaagcugaagcccagauguccauccagcucauaaacaaggcaguaaaugcucugauuaacgaucaacuuaucaugaagaaucaccugagggacaucaugggcauuccauauugcaacuacagcaaauauugguacuugaaucacacuguuacaggccggaccucgcucccccgcuguuggcuggugucuaacggguccuacuuaaaugaaacgcauuucucagacgauaucgagcagcaggccgacaacaugauuaccgagcugcuacaaaaggaauauauagaucgacagggaaaaacaccucucggucuggucgaccuuuuuguguucaguacuagcuuuuacuugaucuccauuuuccugcaccucgugaagaucccaacccauagacacaucauuggcaaacccugcccuaagccacauaggcugaaucacauggggauauguucuugcggacuuuauaaacacccgggcguccccguuaaguggaagcgguga

SEQ ID NO: 1154 - RNA, 1473 nt, Artificial Sequence
  derived and/or modified protein sequence (opt3) from LASV(LASV254-NIG-2011;Clade II)__AIT17674__GPC
augggccagaucauuaccuucuuucaagaggugccccacgucauagaagagguuaugaacaucgugcugauugcccucagccuucuggcuaucuugaaggggauuuacaauguagcaacaugcggauuauucggucugguguccuuucuacuccuguguggcagaucuugcucaacuacguauaaaggggucuacgaacuucagacccuggaguuggacaugacaaaccucaauaugacuaugccucugaguuguaccaagaacaauagccaucacuauaucauggugggaaacgaaacaggccuggagcucaccuuaacuaauacauccauaaucaaccauaaauucugcaaucugucugaugcccacaagaaaaaccuuuacaaucaugcguugaugucgauuaucucaaccuuucaccugagcauuccaaacuucaaucaguaugaggcuaugaguugugacuuuaacggugggaagaucuccguucaguacaaucuaucucacagcuaugccguggaugcagccaaccauugcggaacgauagcuaacggcguccuccaaacuuucaugaggauggcauggggcggguccuacauugcccuggacucaggaaaggguaauugggauuguaucaugaccaguuaccaguaucuuauuauccagaacacaacuugggaagaccacugccaguuuagccggccgucucccaucggcuaccugggguugcucucccaacgcacccgagauauuuauauaucacguagacuguuaggaacauucaccuggacgcugagcgacagugagggcaaugaaacuccugguggguacugucucacaagguggaugcuuaucgaggcugagcugaaaugcuuuggaaacaccgccguggcgaaguguaaugaaaaacaugaugaggaguucugcgacauguugcggcuauuugauuucaacaagcaggcaauucgcagacugaaaacugaagcccaggcuaauauccagcucauaaacaaggccguaaaugcacugauuaacgaccaacuuaucaugaagaaucaccugagggauaucaugggcauuccauauugcaacuacucuaaauauugguacuugaaucacacaguuaccggcaagacgucccucccccgguguuggcuggugagcaacgggucguacuuaaaugaaacccauuucucugacgacaucgagcagcaggcugauaacaugauuacagagcugcuacaaaaagaauauauggaccgccagggaaagacuccucucggucuggucgaucuuuuuguguucuccaccucauuuuacuugauaaguaucuuccugcaccucgugaaaauuccaacacaucgacacgucaucggcaagcccugcccuaaaccacauagacugaaccacauggggaucuguagcugcggacuuuauaagcacccgggcguucccgugaaguggaaaagguga

SEQ ID NO: 1155 - RNA, 1473 nt, Artificial Sequence
  derived and/or modified protein sequence (opt3) from LASV(LASV256-NIG-2010;Clade II)__AIT17678__GPC
augggccagaucauuaccuucuuucaagaggugccccacgucauagaagagguuaugaacaucgugcugauuacacucagccuucuggccaucuugaaggggauuuacaauaucgcuacuugcggauuauucggucugguauccuuucuacuccuguguggcagaucuugcucaacgaccuauaaagggguguacgaacuucagacacuggaguuggacaugaccagucucaacaugacuaugccucugagcuguacaaagaauaacucccaucacuauauaauggucggaaaugaaaccggccuggagcucacuuuaacaaacaccucuaucauuaaucauaaauucugcaaccugucggaugcacacaagaaaaaucuuuacgaccaugccuugaugucaaucauuagcacguuucaccugaguaucccaaacuucaaucaguaugaggcgauguccugugauuuuaacggugggaagauaucugugcaguacaaucuaagccacacuuaugcuguugacgccgcaaaccauugcggaaccauugccaauggcgugcuccaaacauucaugaggauggcuuggggcggguccuacaucgcacuggauucaggaaaggguaguugggacuguauuaugacuagcuaccaguaucuuaucauccagaacaccacaugggaagaucacugccaguuuucucggccgucccccauuggcuaccugggguugcucucacaacgcacccgagacauauauaucagccguagacuguuaggaacguucacuuggacacugagugauucugagggcaacgaaaccccugguggguacugucucacuagguggaugcuuauugaggccgagcugaaaugcuuuggaaauacagcugucgccaaguguaacgaaaaacaugacgaggaguucugcgauauguugcggcuauuugacuucaauaagcaggcgauccgcagacugaaaaccgaagcacagauguccauacagcucauuaacaaggccgugaaugcucugaucaacgaucaacuuaucaugaagaaucaccugagggacauuaugggcaucccauauugcaacuacagcaaauauugguacuugaaucacacgguaaccggcaagacaucgcucccccgguguuggcugguuucuaacggguccuacuuaaaugaaacucauuucucagacgauauugagcagcaggccgacaacaugauaaccgagcugcuacaaaaagaauauaucgaucgccagggaaagacaccucucggucugguggaccuuuuugucuucaguacuagcuuuuacuugauuuccaucuuccugcaccucgugaaaaucccaacccaucgacacauuauaggcaagcccugcccuaaaccacauagacugaaucacauggggaucuguucuugcggacuuuauaagcacccgggcauucccgugaaguggaaaagguga

SEQ ID NO: 1156 - RNA, 1473 nt, Artificial Sequence
  derived and/or modified protein sequence (opt3) from LASV(LASV267-NIG-2010;Clade II)__AIT17686__GPC
augggccagaucauuaccuucuuucaagaggugccccacgucauagaagagguuaugaacaucgugcugauugcccucagccuucuggcuaucuugaaggggauuuacaauguagcaacaugcggauuauucggucugguguccuuucuacuccuguguggcagaucuugcucaacuacguauaaaggggucuacgaacuucagacccuggaguuggacauggccagucucaacaugacaaugccucugagcuguacuaagaauaacucccaucacuauaucauggugggaaaugaaaccggccuggagcucacauuaaccaacacuucuauaaucaaucauaaauucugcaaccugucggaugcgcacaagaaaaaucuuuacgaccaugcuuugaugucaauuaucagcacauuucaccugaguauuccaaacuucaaucaguaugaggccauguccugugauuuuaacggugggaagaucucuguucaguacaaucuaagccacaccuaugcaguggacgccgcuaaccauugcggaacgauagcaaauggcguccuccaaacuuucaugaggauggccuggggcggguccuacauugcucuggauucacggaagggaaguugggacuguaucaugaccagcuaccaguaucuuauuauccagaacacaacuugggaagaucacugccaguuuucucgcccgucccccaucgguuaccugggcuugcucucacaacgaacccgugacauuuauauaagcagaaggcuguuagggacauucaccuggacgcugagugauucugagggaaacgaaacuccuggcgguuacugucucacacgguggaugcuuaucgaggccgagcugaaaugcuuugggaauaccgcgguggcaaaguguaacgaaaaacaugacgaggaguucugcgauauguugcgccuauuugacuucaauaagcaggccauuagaaggcugaaaacugaagcucagauguccauccagcucauaaacaaggccguaaaugcacugauuaacgaucaacuuaucaugaagaaucaucugcgggacaucaugggcauuccauauugcaacuacagcaaauauugguacuugaaucacacaguuaccggaaagacgucgcucccccgcuguuggcuggugucuaacggcuccuacuuaaaugaaacccacuucucagacgauaucgagcagcaggcugacaacaugauuacagagcugcuacaaaaagaauauauggaucgacaggggaagacuccucucggacuggucgaccuuuuuguguucaguaccagcuuuuacuugauauccaucuuccugcaccucauuaaaaucccaacacauagacacgugaucgguaagcccugcccuaaaccacauaggcugaaucacaugggcauuuguucuugcgggcuuuauaagcacccgggaguccccguuaaguggaaacgguga

SEQ ID NO: 1157 - RNA, 1473 nt, Artificial Sequence
  derived and/or modified protein sequence (opt3) from LASV(LASV271-NIG-2010;Clade II)__AIT17690__GPC
augggccagaucauuaccuucuuucaagaggugccccacgucauagaagagguuaugaacaucgugcugauugcccucagccuucuggcuaucuugaaggggauuuacaauguagcaacaugcggauuauucggucugguguccuuucuacuccuguguggcagaucuugcucaacuacguauaaaggggucuacgaacuucagacccuggaguuggacauggccagucucaacaugacaaugccucugagcuguacuaagaauaacucccaucacuauaucauggugggaaaugaaaccggccuggagcucacauuaaccaacacuucuauaaucaaucauaaauucugcaaccugucggaugcgcacaagaaaaaucuuuacgaccaugcuuugaugucaauuaucagcacauuucaccugaguauuccaaacuucaaucaguaugaggccauguccugugauuuuaacggugggaagaucucuguucaguacaaucuaagccacgcauaugccguggacgcugcaucccauugcggaaccgucgccaacggcgugcuccaaacguucaugaggauggcuuggggcgggucauacauagcccuggauaguggaaaggguagcugggacuguauuaugacuucuuaccaguaucuuaucauucagaauaccacaugggaagaucacugccaguuuucccggccgucacccaucggcuaccugggguugcucagccaacgcacucgagacaucuauauuagucguagacuguuaggaaccuucacauggacccugucugauuccgagggcaacgaaacgccugguggguacugucucacuagguggaugcuuauagaggcggagcugaaaugcuuuggaaacacagcaguagccaaguguaaugaaaaacaugacgaggaguucugcgauauguugcggcuauuugacuucaacaagcaggcuauccgcagacugaaaaccgaagcccagaugagcauucagcucaucaauaaggcaguuaacgcucugauaaaugaucaacuuauuaugaagaaccaccugagggacaucaugggcaucccauauugcaauuacucgaaauauugguacuugaaccacacugugacaggccggaccucucucccccgcuguuggcuggucuccaaugggucauacuuaaacgaaacgcauuucagugacgauauugagcagcaggccgacaauaugaucaccgagcugcuacaaaaggaauauauggaucgacagggaaaaacaccucucggucugguggaccuuuuuguguucagcacuuccuuuuacuugauuucuauauuccugcaccucgucaagaucccaacccauagacacguuauuggcaaacccugcccuaagccacauaggcugaaccacauggggaucuguagcugcggacuuuauaaacacccgggcgugcccguaaaguggaagcgguga

SEQ ID NO: 1158 - RNA, 1473 nt, Artificial Sequence
  derived and/or modified protein sequence (opt3) from LASV(LASV274-NIG-2010;Clade II)__AIT17694__GPC
augggccagaucauuaccuucuuucaagaggugccccacgucauagaagagguuaugaacaucgugcugauugcccucagccuucuggcuaucuugaaggggauuuacaauguagcaacaugcggauuauucggucugguguccuuucuacuccuguguggcagaucuugcucaacuaucuauaaaggggucuacgaacuucagacgcuggaguuggacauggccagucucaacaugaccaugccucugagcuguacaaagaauaacucccaucacuauauaauggugggaaaugaaacuggccuggagcucaccuuaacaaacaccucuaucauuaaucauaaauucugcaaccugucggaugcgcacaagaaaaaucuuuacgaccaugcuuugaugucaaucauuagcacuuuucaccugaguaucccaaacuucaaucaguaugaggccauguccugugauuuuaacggugggaagauaucuguucaguacaaucuaagccacacauaugcaguggacgccgcuaaccauugcggaaccauugcaaauggcguccuccaaacguucaugaggauggccuggggcggguccuacaucgcucuggauucaggaaaggguaguugggacuguauuaugacuagcuaccaguaucuuaucauccagaacaccacaugggaagaucacugccaguuuucucggccgucccccauuggcuaccugggguugcucucacaacgcacucgagacauauauaucagccguagacuguuaggaaccuucacauggacccugagugauucugagggcaacgaaacgccugguggguacugucucacuagguggaugcuuauugaggccgagcugaaaugcuuuggaaauacagcgguggcaaaguguaacgaaaaacaugacgaggaguucugcgauauguugcggcuauuugacuucaauaagcaggccauccgcagacugaaaaccgaagcucagauguccauacagcucauuaacaaggccguaaaugcacugaucaacgaucaacuuaucaugaagaaucaccugagggacauuaugggcaucccauauugcaacuacagcaaauauugguacuugaaucacacuguuacaggcaagaccucgcucccccgguguuggcuggugucuaacggguccuacuuaaaugaaacgcauuucucagacgauauugagcagcaggcugacaacaugauaaccgagcugcuacaaaaagaauauaucgaucgccagggaaagacaccucucggucuggucgaccuuuuuguguucaguacuagcuuuuacuugauuuccaucuuccugcaccucgugaaaaucccaacccaucgacacgucguuggcaagcccugcccuaaaccacauagacugaaucacauggggauuuguucuugcggacuuuauaagcacccgggcgugcccguaaaguggaaaagguga

SEQ ID NO: 1159 - RNA, 1473 nt, Artificial Sequence
  derived and/or modified protein sequence (opt3) from LASV(LASV719-NIG-2009;Clade II)__AIT17704__GPC
augggccagaucauuaccuucuuucaagaggugccccacgucauagaagagguuaugaacaucgugcugauugcccucagccuucuggcuaucuugaaggggauuuacaauguagcaacaugcggauuauucggucugguguccuuucuacuccuguguggcagaucuugcucaacuacguauaaaggggucuacgaacuucagacccuggaguuggacauggccagucucaacaugacaaugccucugagcuguacuaagaauaacucccaucacuauaucauggugggaaaugaaaccggccuggagcucacauuaaccaacacuucuauaaucaaucauaaauucugcaaccugucggaugcgcacaagaaaaaucuuuacgaccaugcuuugaugucaauuaucagcacauuucaccugaguauuccaaacuucaaucaguaugaggccauguccugugauuuuaacggugggaagaucucuguucaguacaaucuaagccacaccuaugcaguggacgccgcuaaccauugcggaacgauagcaaauggcguccuccaaacuuucaugaggauggccuggggcggguccuacauugcucuggauucaggaaaggguaguugggacuguaucaugaccagcuaccaguaucuuauuauccagaacacaacuugggaagaucacugccaguuuucucggccgucccccaucggcuaccugggguugcucucacaacgcacccgagacauuuauauaagccguagacuguuaggaacauucaccuggacgcugagugauucugagggcaacgaaacuccugguggguacugucucacaagguggaugcuuaucgaggccgagcugaaaugcuuuggaaauaccgcgguggcaaaguguaacgaaaaacaugacgaggaguucugcgauauguugcggcuauuugacuucaauaagcaggccauucgcagacugaaaacugaagcucagauguccauccagcucauaaacaaggccguaaaugcacugauuaacgaucaacuuaucaugaagaaucaccugagggacaucaugggcauuccauauugcaacuacagcaaauauugguacuugaaucacacaguuaccggcaagacgucgcucccccgguguuggcuggugucuaacggguccuacuuaaaugaaacccauuucucagacgauaucgagcagcaggcugacaacaugauuacagagcugcuacaaaaagaauauauagaucgccagggaaagacuccucucggucuggucgaccuuuuuguguucaguaccagcuuuuacuugaucuccauuuuccugcaccucgugaaaaucccaacacaucgacacgucaucggcaagcccugcccuaaaccacauagacugaaucacauggggauuuguucuugcggacuuuauaagcacccgggcguucccgugaaguggaaaagguga

SEQ ID NO: 1160 - RNA, 1473 nt, Artificial Sequence
  derived and/or modified protein sequence (opt3) from LASV(LASV738-NIG-2009;Clade II)__AIT17712__GPC
augggccagaucauuaccuucuuucaagaggugccccacgucauagaagagguuaugaacaucgugcugauugcccucagccuucuggcuaucuugaaggggauuuacaauguagcaacaugcggauuauucggucugguguccuuucuacuccuguguggcagaucuugcucaacuacguauaaaggggucuacgaacuucagacccuggaguuggacauggccagucucaacaugacaaugccucugagcuguacuaagaauaacucccaucacuauaucauggugggaaaugaaaccggccuggagcucacauuaaccaacacuucuauaaucaaucauaaauucugcaaccugucggaugcgcacaagaaaaaucuuuacgaccaugcuuugaugucaauuaucagcacauuucaccugaguauuccaaacuucaaucaguaugaggccauguccugugauuuuaacggugggaagaucucuguucaguacaaucuaagccacaccuaugcaguggacgccgcuaaccauugcggaacgauagcaaauggcguccuccaaacuuucaugaggauggccuggggcggguccuacauugcucuggauucaggaaagggugccugggacuguaucaugaccaguuaccaguaucuuauuauccagaacacaacuugggaagaucacugccaguuuagccggccgucucccaucggcuaccugggguugcucucccaacgcacccgagacauuuauauaucacguagacuguuaggaacauucaccuggacgcugagcgauagugagggcaacgaaacuccugguggguacugucucacaagguggaugcuuaucgaggcggagcugaaaugcuuuggaaauaccgcaguggccaaguguaacgaaaaacaugacgaggaguucugcgauauguugcggcuauuugacuucaauaagcaggcuauuaugcgccugaaaacugaagcccagaugucuauccagcucauaaacaaggcaguaaaugcucugauuaacgaucaacuuaucaugaagaaucaccugagagacaucaugggcauuccauauugcaacuacuccaaauauugguacuugaaucacacaguuaccggcaagacgagccuccccagguguuggcuggugucgaacgggucuuacuuaaaugaaacccauuucuccgacgauaucgagcagcaggccgacaacaugauuacagagaugcugcaaaaagaauauauagaucggcagggaaagacuccucuaggucucgucgaccuguuuguguucucaaccaguuuuuaccuuaucagcauuuucuugcaccuggugaaaaucccaacacaucgccacgucaucggcaagcccugcccuaaaccacaucgacucaaucacauggggauuuguuccugcggacuguauaagcacccgggcguucccgugagauggaagagguga

SEQ ID NO: 1161 - RNA, 1473 nt, Artificial Sequence
  derived and/or modified protein sequence (opt3) from LASV(LASV966-NIG-2009;Clade II)__AIT17718__GPC
augggccagaucauuaccuucuuucaagaggugccccacgucauagaagagguuaugaacaucgugcugauugcccucagccuucuggcuaucuugaaggggauuuacaauguagcaacaugcggauuauucggucugguguccuuucuacuccuguguggcagaucuugcucaacuacguauaaaggggucuacgaacuucagacccuggaguuggacauggccagucucaacaugacaaugccucugagcuguacuaagaauaacucccaucacuauaucagggugggaaaugaaaccggccuggagcucacauuaaccaacgcgucuauaaucaaucauaaauucugcaaccugucggaugcucacaagaaaaaucuuuacgaccaugccuugaugucaauuaucagcacuuuucaccugaguauuccaaacuucaaucaguaugaggcaauguccugugauuuuaacggugggaagaucucuguucaguacaaucuaagccacgccuaugcuauagacgcagccaaccauugcggaacaguggcuaauggcguccuccaaaccuucaugcggauggccuggggcggguccuacauugcgcuggauucaggacgcgguaacugggacuguaucaugacgaguuaccaguaucuuauuauccagaacacuaccugggaagaucacugccaguuuagccgaccgucucccaucggcuaccugggguugcucucccaacguacaagagacauuuauauaucaaggcggcuguuaggaacuuucaccuggacacugagcgauagugagggcaaugaaaccccugguggguacugucucacgcgcuggaugcuuaucgaggcagagcugaagugcuuuggaaacacugccguggcuaaauguaaugaaaagcaugacgaggaguucugcgauauguugagacuauuugacuucaacaaacaggccauuaggcggcugaagacagaagcacagaugucuauccagcucauaaauaaagcuguaaacgcccugauuaaugaucaacuuaucaugaagaaccaucugcgcgacaucaugggcauuccauauugcaauuacuccaaguauugguacuugaaccacaccguuacuggcaaaacaagccucccccgauguuggcuggugucgaaugggucuuacuuaaacgaaacccacuucuccgacgauaucgagcagcaggcggacaauaugauuacggagcugcuacaaaaggaauauauggauagacagggaaaaaccccucucggucuggucgaccuuuuuguguucucaacaaguuuuuacuugauaagcaucuuccugcaccucgugaagauuccaacucauaggcacgucaucggcaaacccugcccuaagccacaucggcugaaccacauggggaucuguuccugcggauuuuauaaacacccgggcguucccgugaaguggaagcguuga

SEQ ID NO: 1162 - RNA, 1473 nt, Artificial Sequence
  derived and/or modified protein sequence (opt3) from LASV(LASV969-NIG-2009;Clade II)__AIT17724__GPC
augggccagaucauuaccuucuuucaagaggugccccacgucauagaagagguuaugaacaucgugcugauugcccucagccuucuggcuaucuugaaggggauuuacaauguagcaacaugcggauuauucggucugguguccuuucuacuccuguguggcagaucuugcucaacuacguauaaaggggucuacgaacuucagacccuggaguuggacauggccaaccucaauaugacaaugccucugaguuguacuaagaacaauagccaucacuauaucauggugggaaacgaaaccggccuggagcucacauuaaccaauacuuccauaaucaaccauaaauucugcaaucugucugaugcgcacaagaaaaaccuuuacgaccaugcuuugaugucgauuaucucaacauuucaccugagcauuccaaauuucaaccaguaugaggccaugaguugugauuuuaauggugggaagaucuccguucaguacaaccuaucucacaccuaugcaguggacgccgcuaaucauugcggaacggucgcaaacggcgugcuccaaacuuucaugaggauggccuggggcgggagcuacauagcucuggauuccggaaaggguucaugggacuguauuaugaccaguuaccaguaucuuaucauucagaacacaacuugggaagaucacugccaguuuagccggccgucucccaucggcuaccugggguugcucucccaacgcacccgagacaucuauauuucacguagacuguuaggaacauucaccuggacgcugagcgauagugagggcaaugaaacuccugguggguacugucucacaagguggaugcuuauagaggccgagcugaaaugcuuuggaaacaccgcgguagcaaaguguaaugaaaaacaugacgaggaguucugcgauauguugcggcuauuugacuucaacaagcaggccauccgcagacugaaaacugaagcucagaugucuauucagcucaucaauaaggccguuaacgcacugauaaaugaucaacuuauuaugaagaaccaccugagggacaucaugggcaucccauauugcaauuacuccaaauauugguacuugaaccacacagugaccggcaagacgagccucccccgguguuggcuggucucgaaugggucuuacuuaaacgaaacccauuucuccgacgauauugagcagcaggcugacaauaugaucacagagcugcuacaaaaagaauauauggaucgccagggaaagacuccucucggucugguggaccuuuuuguguucucaaccaguuuuuacuugauuagcauauuccugcaccucgucaaaaucccaacacaucgacacauuaugggcaagcccugcccuaaaccacauagacugaaccacauggggaucuguuccugcggacuuuauaagcacccgggcguucccgugaaguggaaaagguga

SEQ ID NO: 1163 - RNA, 1473 nt, Artificial Sequence
  derived and/or modified protein sequence (opt3) from LASV(LASV971-NIG-2009;Clade II)__AIT17728__GPC
augggccagaucauuaccuucuuucaagaggugccccacgucauagaagagguuaugaacaucgugcugauugcccucagccuucuggcuaucuugaaggggauuuacaauguagcaacaugcggauuauucggucugguguccuuucuacuccuguguggcagaucuugcucaacuacguauaaaggggucuacgaacuucagacccuggaguuggacaugggaagucucaacaugacaaugccucugagcuguacuaagaauaacucccaucacuauaucauggugggcaaugaaaccggucuggagcucacauuaaccaacacuucuauaaucaaucauaaauucugcaaccugucggaugcccacaagaaaaaucuuuacgaccaugcguugaugucaauuaucagcacauuucaccugaguauuccaaacuucaaucaguaugaggcuauguccugugauuuuaacgggggaaagaucucuguucaguacaaucuaagccacaccuaugccguggacgcagccaaccauugcggcacgauagcuaauggcguccuccaaacuuucaugaggauggcauggggaggguccuacauugcccuggauucagguaagggcaguugggacuguaucaugaccagcuaccaguaucuuauuauccagaacacaacuugggaagaucacugccaguuuucucggccgucccccaucggguaccugggauugcucucacaacgcacccgagacauuuauauaagccguagacuguuaggcacauucaccuggacgcugagugauucugaggguaacgaaacuccugggggauacugucucacaagguggaugcuuaucgaggcugagcugaaaugcuuuggcaauaccgccguggcgaaguguaacgaaaaacaugacgaggaguucugcgauauguugcggcuauuugacuucaauaagcaggcaauucgcagacugaaaacugaagcccagauguccauccagcucauaaacaaggcuguaaaugcccugauuaacgaucaacuuaucaugaagaaucaccugagggacaucaugggcauuccauauugcaacuacagcaaauauugguacuugaaucacacaguuaccgggaagacgucgcucccccgguguuggcuggugucuaacggauccuacuuaaaugaaacccauuucucagacgauaucgagcagcaggcagacaacaugauuacagagcugcuacaaaaagaauauauggaucgccaggguaagacuccucucggccuggucgaccuuuuuguguucaguaccagcuuuuacuugauauccaucuuccugcaccucgugaaaauuccaacacaucgacacgucaucgggaagcccugcccuaaaccacauagacugaaucacaugggaaucuguucuugcggccuuuauaagcacccggguguucccgugaaguggaaaagguga

SEQ ID NO: 1164 - RNA, 1473 nt, Artificial Sequence
  derived and/or modified protein sequence (opt3) from LASV(LASV975-NIG-2009;Clade II)__AIT17732__GPC
augggccagaucauuaccuucuuucaagaggugccccacgucauagaagagguuaugaacaucgugcugauugcccucagccuucuggcuaucuugaaggggauuuacaauguagcaacaugcggauuauucggucugguguccuuucuacuccuguguggcagaucuugcucaacuacguauaaaggggucuacgaacuucagacccuggaguuggacauggccagucucaacaugacaaugccucugagcuguacuaagaauaacucccaucacuauaucauggugggaaaugaaaccggccuggagcucacauuaaccaacacuucuauaaucaaucauaaauucugcaaccugucggaugcgcacaagaaaaaucuuuacgaccaugcuuugaugucaauuaucagcacauuucaccugaguauuccaaacuucaaucaguaugaggccauguccugugauuuuaacggugggaagaucucuguucaguacaaucuaagccacaccuaugcaguggacgccgcuaaccauugcggaacgauagcaaauggcguccuccaaacuuucaugaggauggccuggggcggguccuacauugcucuggauucaggaaaggguaguugggacuguaucaugaccagcuaccaguaucuuauuauccagaacacaacuugggaagaucacugccaguuuucucggccgucccccaucggcuaccugggguugcucucacaacgcacccgagacauuuauauaagccguagacuguuaggaacauucaccuggacgcugagugauucugagggcaacgaaacuccugguggguacugucucacaagguggaugcuuaucgaggccgagcugaaaugcuuuggaaauaccgcgguggcaaaguguaacgaaaaacaugacgaggaguucugcgauauguugcggcuauuugacuucaauaagcaggccauucgcagacugaaaacugaagcucagauguccauccagcucauaaacaaggccguaaaugcacugauuaacgaucaacuuaucaugaagaaucaccugagggacaucaugggcauuccauauugcaacuacagcaaauauugguacuugaaucacacaguuaccggcaagacgucgcucccccgguguuggcuggugucuaacggguccuacuuaaaugaaacccauuucucagacgauaucgagcagcaggcugacaacaugauuacagagcugcuacaaaaagaauauauagaucgccagggaaagacuccucucggucuggucgaccuuuuuguguucaguaccagcuuuuacuugaucuccauuuuccugcaccucgugaaaaucccaacacaucgacacaucgucggcaagcccugcccuaaaccacauagacugaaucacauggggauuuguucuugcggacuuuauaagcacccgggcguucccgugaaguggaaaagguga

SEQ ID NO: 1165 - RNA, 1473 nt, Artificial Sequence
  derived and/or modified protein sequence (opt3) from LASV(LASV976-NIG-2009;Clade II)__AIT17736__GPC
augggccagaucgugaccuucuuucaagaggucccccacguuauugaagaggugaugaacauaguacugaucgcccucagccuucuggcuauuuugaaggggaucuacaauguggcaacaugcggauuauucggucuggucuccuuucuacuccuguguggcagaucuugcucaacuacguauaaagggguguacgaacuucagacccuggaguuggacauggccagucucaacaugacaaugccucugagcuguacuaagaauaacucccaucacuauauuaugguuggaaaugaaaccggccuggagcucacauuaaccaacacuucuaucauaaaucauaaauucugcaaccugucggaugcgcacaagaaagaccuuuacgaucaugcuuugaugucaaucauuagcacauuucaccugaguaucccaaauuucaaccaguaugaggccauguccugugacuuuaauggugggaagauuucugugcaguacaaccuaagccacaccuaugcagucgaugccgcuaaucauugcggaacgaucgcaaacggcgugcuccaaacuuucaugaggauggccuggggcggguccuacauagcucuggacucaggaaaggguaguugggauuguauuaugaccagcuaccaguaucuuaucauucagaauacaacuugggaagaccacugccaguuuucucggccgucccccaucggcuaccugggguugcucucacaacgcacccgagauaucuauauuagccguagacuguuaggaacauucaccuggacgcugagugacucugagggcaacgaaacuccugguggguacugucucacaagguggaugcuuauagaggccgagcugaaaugcuuuggaaacaccgcgguagcaaaguguaaugaaaaacaugaugaggaguucugcgacauguugcggcuauuugauuucaacaagcaggccaucaugcgccugaaaacugaagcucagauguccauucagcucaucaauaaggccguuaacgcacugauaaaugaccaacuuauuaugaagaaccaccugagagacaucaugggcaucccauauugcaauuacagcaaauauugguacuugaaccacacagugaccggcaagacgucgcuccccagguguuggcuggucucuaauggguccuacuuaaacgaaacccgguucucagaugacauugagcagcaggcugauaauaugaucacagagaugcugcaaaaagaauaucuagaccgccagggaaagacuccucucggucugguggaucuuuuuguguucaguaccagcuuuuacuugauuuccauauuccugcaucucgucaaaaucccaacacaccgacauauuaucggcaagcccugcccuaaaccacacagacugaaccauauggggaucuguucuugcggacuuuauaagcacccgggcguucccgugaaguggaaaagguga

SEQ ID NO: 1166 - RNA, 1473 nt, Artificial Sequence
  derived and/or modified protein sequence (opt3) from LASV(LASV978-NIG-2009;Clade II)__AIT17744__GPC
augggccagaucauuaccuucuuucaagaggugccccacgucauagaagagguuaugaacaucgugcugauugcccucagccuucuggcuaucuugaaggggauuuacaauguagcaacaugcggauuauucggucugauguccuuucuacuccuguguggcagaucuugcucaacuacguauaaagggguguacgaacuucagacccuggaguuggacauggccaaccucaauaugacaaugccucugaguuguacuaagaacaauagccaucacuauaucauggucggaaacgaaaccggccuggagcucacauuaaccaauacuuccauaaucaaccauaaauucugcaaucugucugaugcgcacaagaaaaaccuuuacgaccaugcuuugaugucgauuaucucaacauuucaccugagcauuccaaauuucaaccaguaugaggccaugaguugugauuuuaauggugggaagaucuccgugcaguacaaccuaucucacgcauaugccguugacgcugcaaaucauugcggaaccauagccaacggcgugcuccaaacguucaugaggauggcuuggggcgggagcuacauugcccuggauuccggaaaggguucaugggacuguaucaugacaaguuaccaguaucuuauuauccagaacaccagcugggaagaucacugccaguuuucucggccgucccccaucggcuaccugggguugcucucacaacgcacacgagacauuuauauaagccguagacuguuaggaacuuucaccuggacacugagugauucugagggcaaugaaaccccugguggguacugucucacgagguggaugcuuaucgaggcggagcugaaaugcuuuggaaacacugcagucgccaaguguaaugaaaaacaugacgaggaguucugcgauauguugcggcuauuugacuucaacaagcaggcuauucgcagacugaaaacagaagcccagauguccauccagcucauaaauaaggcagugaacgcucugauuaaugaucaacuuaucaugaagaaccaccugagggacaucaugggcauuccauauugcaauuacagcaaauauugguacuugaaccacaccguaacuggcaagacaucgcucccccgguguuggcugguuucuaauggguccuacuuaaacgaaacccauuucucagacgauaucgagcagcaggccgacaauaugauuacggagcugcuacaaaaagaauauauagaucgccagggaaagaccccucucggucugguggaccuuuuugucuucaguacuagcuuuuacuugaucuccauuuuccugcaccucgugaaaaucccaacucaucgacacgugaucggcaagcccugcccuaaaccacauagacugaaccacauggggauuuguucuugcggacuuuauaagcacccgggcguccccguuaaguggaaaagguga

SEQ ID NO: 1167 - RNA, 1473 nt, Artificial Sequence
  derived and/or modified protein sequence (opt3) from LASV(LASV981-NIG-2009;Clade II)__AIT17752__GPC
augggccagaucauuaccuucuuucacgaggugccccaugucauagaagagguuaugaacaucgugcugauugcccucagccuucuggcuaucuugaaggggauuuacaauguagcaacaugcggauuauucggucugguguccuuucuacuccuguguggcagaucuugcucaacuacguauaaaggggucuacgaacuucaaacccuggaguuggacauggccagucucaacaugacaaugccucugagcuguacuaagaauaacucccaccauuauaucauggugggaaaugaaaccggccuggagcucacauuaaccaacacuucuauaaucaaucacaaauucugcaaccugucggaugcgcauaagaaaaaucuuuacgaccacgcuuugaugucaauuaucagcacauuucaccugaguauuccaaacuucaaucaguaugaggccauguccugugauuuuaacggugggaagaucucuguucaguacaaucuaagccauaccuaugcaauagacgccgcuaaccacugcggaacgauugcaaauggcgugcuccagacuuucaugaggauggccuggggcggguccuacaucgcucuggauucaggacgggguaguugggacuguauuaugaccagcuaccaauaucuuaucauccagaacacaacuugggaagaucauugccaguuuucucgcccgucccccauuggcuaccugggguugcucucacagcgaacccgugacauauauaucagcagaaggcuguuaggaacauucaccuggacgcugagugauucugagggcaacgaaacuccugguggguacugucucacacgguggaugcuuauugaggccgagcugaagugcuuuggaaauaccgcggucgcaaaauguaacgaaaagcacgacgaggaguucugcgauauguugcgccuauuugacuucaauaaacaagccaucagaaggcugaagacugaagcucagauguccauacagcucauuaacaaagccgugaaugcacugaucaacgaucagcuuaucaugaagaaucaucugcgggacauuaugggcaucccauauugcaacuacagcaaguauugguacuugaaucacacaguaaccggcaaaacgucgcucccccgcuguuggcugguuucuaacggguccuacuuaaaugaaacccacuucucagacgauauugagcaacaggcugacaacaugauaacagagcugcuacagaaggaauauaucgaucgacaaggaaaaacuccucucggucugguggaccuuuuugucuucaguaccagcuuuuacuugauuuccaucuuccugcaucucgugaagaucccaacacacagacaugugauuggcaaacccugcccuaagccacacaggcugaaucacauggggauauguucuugcggacuuuauaaacauccgggcguccccguuaaguggaagcgguga

SEQ ID NO: 1168 - RNA, 1473 nt, Artificial Sequence
  derived and/or modified protein sequence (opt3) from LASV(LASV982-NIG-2009;Clade II)__AIT17756__GPC
augggccagaucauuaccuucuuucaagaggugccccacgucauagaagagguuaugaacaucgugcugauugcccucagccuucuggcuaucuugaaggggauuuacaauguagcaacaugcggauuauucggucugguguccuuucuacuccuguguggcagaucuugcucaaucacuuauaaaggggucuacgaacuucagacgcuggaguuggacauggccagucucaacaugaccaugccucugagcuguacaaagaauaacucccaucacuauauaauggugggaaaugaaacuggccuggagcucaccuuaacaaacaccucuaucauuaaucauaaauucugcaaccugucggaugcgcacaagaaaaaucuuuacgaccaugcuuugaugucaaucauuagcacuuuucaccugaguaucccaaacuucaaucaguaugaggccauguccugugauuuuaacggugggaagauaucuguucaguacaaucuaagccacacauaugcaguggacgccgcuaaccauugcggaaccauugcaaauggcguccuccaaacguucaugaggauggccuggggcggguccuacaucgcucuggauucaggacgggguaguugggacuguauuaugacuagcuaccaguaucuuaucauccagaacaccacaugggaagaucacugccaguuuucucgcccgucccccauuggcuaccugggguugcucucacaacgaacucgugacauauauaucagcagaaggcuguuaggaaccuucacauggacccugagugauucugagggcaacgaaacgccugguggguacugucucacucgguggaugcuuauugaggccgagcugaagugcuuuggaaauacagcgguggcaaaauguaacgaaaagcaugacgaggaguucugcgauauguugcgccuauuugacuucaauaaacaggccaucagaaggcugaaggcugaagcccagauguccauacagcucauuaacaaagcaguaaaugcucugaucaacgaucaacuuaucaugaagaaucaucugcgggacauuaugggcaucccauauugcaacuacagcaaguauugguacuugaaucacaccguuacuggccgcacaucgcucccccgauguuggcuggugucuaacggguccuacuuaaaugaaacccacuucucagacgauauugagcagcaggccgacaacaugauaacggagcugcuacaaaaagaauauaucgauagacagggaaagaccccucucggucuggucgaccuuuuuguguucaguacuagcuuuuacuugauuuccaucuuccugcaccucgugaaaaucccaacacauaggcacauuauaggcaagcccugcccuaaaccacaucggcugaaucacauggggaucuguucuugcggacuuuauaagcacccgggcguccccguuaaauggaagcguuga

SEQ ID NO: 1169 - RNA, 1473 nt, Artificial Sequence
  derived and/or modified protein sequence (opt3) from LASV(LASV988-NIG-2009;Clade II)__AIT17758__GPC
augggccagaucauuaccuucuuucaagaggugccccacgucauagaagagguuaugaacaucgugcugauugcccucagccuucuggcuaucuugaaggggauuuacaauguagcaacaugcggauuauucggucugguguccuuucuacuccuguguggcagaucuugcucaacuacguauaaaggggucuacgaacuucagacccuggaguugaacauggccagucucaauaugacaaugccucugagcuguacuaagaacaauucccaucacuauaucauggugggaaacgaaaccggccuggagcucacauuaaccaauacuucuauaaucaaccauaaauucugcaaucugucggacgcgcacaagaggaaccuuuacgaucaugcuuugaugucaauuaucagcacauuucaccugaguauuccaaauuucaaccaguaugaggccauguccugugacuuuaauggugggaaaaucucuguucaguacaaccuaagccacaccuaugcaguggaugccgcuaagcauugcggaacgauagcaaauggcguccuccaaacuuucaugcggauggccuggggcggguccuacauugcucuggacucaggaaaggguaguugggauuguaucaugaccagcuaccaguaucuuauuauccagaacacaacuugggaagaccacugcgaguuuucucgcccgucccccaucggcuaccugggguugcucucacagcgaacccgugauauuuauauaagcagaaggcuguuaggaacauucaccuggacgcugagugacucugaaggcaacgagacuccugguggguacugucucacacgguggaugcuuaucgaggccgaacugaaaugcuuuggaaauaccgcgguggcaaaguguaacgagaaacaugaugaagaguucugcgacauguugcgccuauuugauuucaauaagcaagccauuagaaggcugaaagcugaagcccagauguccauccagcucauaaacaaggcaguaaaugcucugauuaacgaccagcuuaucaugaagaaucaucugcgggauaucaugggcauuccauauugcaacuacagcaaauauugguacuugaaucacacuguuacaggcaagaccucgcucccccgcuguuggcuggugucuaacggguccuacuuaaaugagacgcacuucucagacgacaucgagcaacaggccgauaacaugauuaccgaacugcuacagaaagaguauauagaccgacaaggaaagacaccucucggucuggucgaucuuuuuguguucaguacuagcuuuuacuugaucuccauuuuccugcaccucgugaaaaucccaacccauagacacgucaucggcaagcccugcccuaaaccacauaggcugaaucacauggggauuuguucuugcggacuuuauaagcacccgggcguucccgugaaguggaaacgguga

SEQ ID NO: 1170 - RNA, 1473 nt, Artificial Sequence
  derived and/or modified protein sequence (opt3) from LASV(LASV989-NIG-2009;Clade II)__AIT17762__GPC
augggccagaucauuaccuucuuucaagaggugccccacgucauagaagagguuaugaacaucgugcugauugcccucagccuucuggcuaucuugaaggggauuuacaauguagcaacaugcggauuauucggucugguguccuuucuacuccuguguggcagaucuugcucaacuacguauaaaggggucuacgaacuucagacccuggaguuggacauggccagucucaacaugacaaugccucugagcuguacuaagaauaacucccaucacuauaucauggugggaaaugaaaccggccuggagcucacauuaaccaacacuucuauaaucucgcauaaauucugcaaucugucagaugcgcacaagaaaaaccuuuacgaccaugcuuugaugagcauuaucaguacauuucaccuguccauuccaaauuucaaccaguaugaggccaugucuugugauuuuaauggugggaagaucagcguucaguacaaccuaucccacaccuaugcaguggacgccgcuaaucauugcggaacgauagcaaacggcguccuccaaacuuucaugaggauggccuggggcgggucauacauugcucuggauaguggaaaggguagcugggacuguaucaugaccucuuaccaguaucuuauuauccagaauacaacuugggaagaucacugccaguuuucccggccgucacccaucggcuaccugggguugcucagccaacgcacccgagacauuuauauaagucguagacuguuaggaacauucaccuggacgcugucugauuccgagggcaacgaagccccugguggguacugucucacuagguggaugcuuaucgaggcggagcugaaaugcuuuggaaacacagcaguggccaaguguaaugaaaaacaugacgaggaguucugcgauauguugcggcuauuugacuucaacaagcaggcuauucgcagacugaaaaccgaagcccagaugagcauccagcucauaaauaaggcaguaaacgcucugauuaaugaucaacuuaucaugaagaaccaccugagggacaucaugggcauuccauauugcaauuacucgcgguauugguacuugaaccacacuguuacaggcaaaaccucucucccccgcuguuggcugguguccaaugggucauacuuaaacgaaacgcauuucagugacgauaucgagcagcaggccgacaauaugauuaccgagcugcuacaaaaggaauauauggaucgacagggaaaaacaccucucggucuggucgaccuuuuuguguucagcacuuccuuuuacuugauaucuaucuuccugcaccucgugaagauuccaacccauagacacgucaucggcaaacccugcccuaagccacauaggcugaaccacauggggaucuguagcugcggacuuuauaaacacccgggcguucccgugaaguggaagcgguga

SEQ ID NO: 1171 - RNA, 1473 nt, Artificial Sequence
  derived and/or modified protein sequence (opt3) from LASV(LASV991-NIG-2009;Clade II)__AIT17770__GPC
augggccagaucgugaccuucuuucaagaggucccccacguuauugaagaggugaugaacauaguacugaucgcccucagccuucuggcuauuuugaaggggaucuacaauguggcaacaugcggauuauucggucuggucuccuuucuacuccuguguggcagaucuugcucaacuacguauaaagggguguacgaacuucaggcccuggaguuggacaugaguagccucaacaugaccaugccucuguccuguacaaagaauaacucucaucacuauauuaugguuggaaaugaaacuggccuggagcucaccuuaacaaacaccucgaucauacaucacaaauucugcaaucugucagaugcgcauaagaaagaccuuuacgaucacgcuuugaugagcaucauuaguacuuuucaccuguccaucccaaacuucaaucaguaugaggccaugucuugugacuuuaacggugggaagauuagcgugcaguacaaucuaucccauacauaugcagucgaugccgcuaaccacugcggaaccaucgcaaauggcgugcuccaaacguucaugaggauggccuggggcgggucauacauagcucuggacaguggaaaggguggcugggauuguauuaugacuagcuaccaguuucuuaucauucagaacaccacaugggaagaccauugccaguucucucggccgucccccaucggguaucugggauugcucucacaacgcacucgagauaucuacauuagccguagacuguuaggcaccuuuacauggacccugagugacucugaggguaaugaaacgccugggggauauugucucacuagguggaugcuuauagaggccgagcugaaaugcuucggcaacacagcgguagcaaaguguaacgaaaaacacgaugaggaauuuugcgacauguugcggcuauucgauuucaauaagcaggccaucaaacgccugaagaccgaggcucagauguccauucaccucaucaacaaggccguuaaugcacugauaaacgaccagcuuauuaugaaaaaucaucugagagacaucaugggcaucccauacugcaacuauagcaaguacugguauuugaaucacacugugacagggaaaaccucgcuccccagguguuggcuggucucuaacggauccuacuuaaaugaaacgcauuuuucagaugacauugagcaacaggcugauaacaugaucaccgagcugcuacagaaggaauacauugaccggcaagguaaaacaccucucggccugguggaucuuuucguguuuaguacuagcuucuauuugauauccaucuuucugcaccucgucaagauuccaacccaucgccacguuaucgggaaacccugcccuaagccacaccgacugaaucauaugggaaucuguucuugcggccuuuacaagcacccgggugugcccguaagauggaaaagguga

SEQ ID NO: 1172 - RNA, 1473 nt, Artificial Sequence
  derived and/or modified protein sequence (opt3) from LASV(LASV993-NIG-2009;Clade II)__AIT17778__GPC
augggccagaucauuaccuucuuucaagaggugccccacgucauagaagagguuaugaacaucgugcugauugcccucagccuucuggcuaucuugaaggggauuuacaauguagcaacaugcggauuauucggucugguguccuuucuacuccuguguggcagaucuugcucaacuacguauaaaggggucuacgaacuucagacccuggaguuggacauggccaaccucaauaugacaaugccucugaguuguacuaagaacaauagccaucacuauaucauggugggaaacgaaaccggccuggagcucacauuaaccaauacuuccauaaucaaccauaaauucugcaaucugucugaugcgcacaagaaaaaccuuuacgaccaugcuuugaugucgauuaucucaacauuucaccugagcauuccaaauuucaaccaguaugaggccaugaguugugauuuuaauggugggaagaucuccguucaguacaaccuaucucacaccuaugcaagggacgccgcuaaucauugcggaacgauagcaaacggcgugcuccaaacuuucaugcggauggccuggggcgggagcuacauugcucuggauuccggaaaggguucaugggacuguaucaugaccaguuaccaguaucuuauuauccagaacacaacuugggaagaucacugccaguuuagccgcccgucucccaucggcuaccugggguugcucucccaacgaacccgugacauuuauauaucaagaaggcuguuaggaacauucaccuggacgcugagcgauagugagggcaaugaaacuccugguggguacugucucacacgguggaugcuuaucgaggccgagcugaaaugcuuuggaaacaccgcggucgcaaaguguaaugaaaaacaugacgaggaguucugcgauauguugcgccuauuugacuucaacaagcaggccauuagaaggcugaaaacugaagcucagaugaauauccagcucauaaacaaggccgugaaugcacugauuaacgaucaacuuaucaugaagaaucaucugcgggacaucaugggcauuccauauugcaacuacucuaaauauugguacuugaaucacacaguaaccggcaagacgucccucccccgcuguuggcugguuagcaacgggucguacuuaaaugaaacccacuucucugacgauaucgagcagcaggcugacaacaugauuacagagcugcuacaaaaagaauauauggaucgacagggaaagacuccucucggucugguggaccuuuuugucuucuccaccucauuuuacuugauaaguaucuuccugcaccucgugaaaauuccaacacauagacacgugaucggcaagcccugcccuaaaccacauaggcugaaucacauggggaucuguagcugcggacuuuauaagcacccgggcguccccguuaaguggaaacgguga

SEQ ID NO: 1173 - RNA, 1473 nt, Artificial Sequence
  derived and/or modified protein sequence (opt3) from LASV(Nig08-04;Clade II)__ADU56610__GPC
augggccagaucgugaccuucuuucaagaggucccccacguuauugaagaggugaugaacauaguacugaucgcccucagccuucuggcuauuuugaaggggaucuacaauguggcaacaugcggauuauucggucugauuuccuuucuacuccuguguggcagaucuugcucaacuacguauaaaggggucuacgaacuucagacccuggaguuggacauggccaaccucaauaugacaaugccucugaguuguacuaagaacagcucccaucacuauaucauggugggaaaugaaaccggccuggagcucacauuaaccaacacuucuauaaucaaucauaaauucugcaaccugucggaugcgcacaagaaaaaucuuuacgaccaugcuuugaugucaauuaucagcacauuucaccugaguauuccaaacuucaaucaguaugaggccauguccugugauuuuaacggugggaagaucucuguucaguacaaucuaagccacgcauaugccguggacgcugcaaaccauugcggaaccauagccaauggcguccuccaaacguucaugaggauggcuuggggcggguccuacauugcccuggauucaggaaaggguaacugggacuguaucaugaccaguuaccaguaucuuauuauccagaacacuacaugggaagaucacugccaguuuagccggccgucucccaucggcuaccugggguugcucucccaacgcacucgagacauuuauauaucacguagacuguuaggaaccuucacauggacccugagcgauagugagggcaaugaagcgccugguggguacugucucacgagguggaugcuuaucgaggcagagcugaaaugcuuuggaaacacugccauugcuaaguguaaugaaaaacaugacgaggaguucugcgauauguugcggcuauuugacuucaacaagcaggccaucaaacgccugaaggcagaagcucagaugucuauacagcucauuaauaaggccgugaacgcgcugaucaaugaucaacuuaucaugaaaaaccaccugagagacauuaugggcaucccauauugcaauuacuccaaguauugguacuugaaccacacaguaaccggcaaaacuagccuccccagguguuggcugauuucgaaugggucuuacuuaaacgaaacacauuucuccgacgauauagagcagcaggccgacaauaugaucaccgagcugcuacaaaaggaauauauggaucggcagggaaaaacgccucucggucugguugaccuuuuuguguucucaaccaguuuuuacuugauuagcaucuuccugcaccucgucaagaucccaacacaucgccacauugugggccgacccugcccuaaaccacauagacugaaccacauggggauauguuccugcggacuuuauaagcacccgggcgugcccgucaaguggaaaagguga

SEQ ID NO: 1174 - RNA, 1473 nt, Artificial Sequence
  derived and/or modified protein sequence (opt3) from LASV(Nig08-A41;Clade II)__ADU56626__GPC
augggccagaucauuaccuucuuucaagaggugccccacgucauagaagagguuaugaacaucgugcugauugcccucagccuucuggcuaucuugaaggggauuuacaauguagcaacaugcggauuauucggucugguguccuuucuacuccuguguggcagaucuugcucaacuacguauaaaggggucuacgaacuucagacccuggaguugaacauggccagucucaauaugacaaugccucugagcuguacuaagaacaauucccaucacuauaucauggugggaaacgaaaccggccuggagcucacauuaaccaauacuucuauaaucaaccauaaauucugcaaucugucggacgcgcacaagaggaaccuuuacgaucaugcuuugaugucaauuaucagcacauuucaccugaguauuccaaauuucaaccaguaugaggccauguccugugacuuuaauggugggaaaaucucuguucaguacaaccuaagccacaccuaugcaguggaugccgcuaagcauugcggaacgauagcaaauggcguccuccaaacuuucaugcggauggccuggggcggguccuacauugcucuggacucaggaaaggguaguugggauuguaucaugaccagcuaccaguaucuuauuauccagaacacaacuugggaagaccacugccaguuuucucgcccgucccccaucggcuaccugggguugcucucacaacgaacccgugauauuuauauaagcagaaggcuguuaggaacauucaccuggacgcugagugacucugagggcaacgaaacuccugguggguacugucucacacgguggaugcuuaucgaggccgagcugaaaugcuuuggaaauaccgcgguggcaaaguguaacgaaaaacaugaugaggaguucugcgacauguugcgccuauuugauuucaauaagcaggccauuagaaggcugaaagcugaagcccagauguccauccagcucauaaacaaggcaguaaaugcucugauuaacgaccaacuuaucaugaagaaucaucugcgggauaucaugggcauuccauauugcaacuacagcaaauauugguacuugaaucacacuguuacaggcaagaccucgcucccccgcuguuggcuggugucuaacggguccuacuuaaaugaaacgcacuucucagacgacaucgagcagcaggccgauaacaugauuaccgagcugcuacaaaaagaauauauagaccgacagggaaagacaccucucggucuggucgaucuuuuuguguucaguacuagcuuuuacuugaucuccauuuuccugcaccucgugaaaaucccaacccauagacacgucaucggcaagcccugcccuaaaccacauaggcugaaucacauggggauuuguucuugcggacuuuauaagcacccgggcguucccgugaaguggaaacgguga

SEQ ID NO: 1175 - RNA, 1473 nt, Artificial Sequence
  derived and/or modified protein sequence (opt3) from LASV(Nig08-A47;Clade II)__ADU56630__GPC
augggccagaucauuaccuucuuucaagaggugccccacgucauagaagagguuaugaacaucgugcugauugcccucagccuucuggcuaucuugaaggggauuuacaauguagcaacaugcggauuauucggucugguguccuuucuacuccuguguggcagaucuugcucaacuacguauaaaggggucuacgaacuucagacccuggaguuggacauggccagucucaacaugacaaugccucugagcuguacuaagaauaacucccaucacuauaucauggugggaaaugaaaccggccuggagcucacauuaaccaacacuucuauaaucaaucauaaauucugcaaccugucggaugcgcacaagaaaaaucuuuacgaccaugcuuugaugucaauuaucagcacauuucaccugaguauuccaaacuucaaucaguaugaggccauguccugugauuuuaacggugggaagaucucuguucaguacaaucuaagccacgcauaugccguggacgcugcaaaccauugcggaaccauagccaauggcguccuccaaacguucaugaggauggcuuggggcggguccuacauugcccuggauucaggaaaggguaguugggacuguaucaugacuagcuaccaguaucuuauuauccagaacaccacaugggaagaucacugccaguuuucucggccgucccccaucggcuaccugggguugcucucacaacgcacucgagacauuuauauaagccguagacuguuaggaaccuucacauggacccugagugauucugagggcaacgaaacgccugguggguacugucucacuagguggaugcuuaucgaggcggagcugaaaugcuuuggaaauacagcaguggccaaguguaacgaaaaacaugacgaggaguucugcgauauguugcggcuauuugacuucaauaagcaggcuauucgcagacugaaaaccgaagcccagauguccauccagcucauaaacaaggcaguaaaugcucugauuaacgaucaacuuaucaugaagaaucaccugagggacaucaugggcauuccauauugcaacuacagcaaauauugguacuugaaucacacuguuacaggcaagaccucgcucccccgguguuggcuggugucuaacggguccuacuuaaaugaaacgcauuucucagacgauaucgagcagcaggccgacaacaugauuaccgagcugcuacaaaaagaauauauggaucgccagggaaagacaccucucggucuggucgaccuuuuuguguucaguacuagcuuuuacuugauauccaucuuccugcaccucgugcgaaucccaacccauagacacgucauuggcaaacccugcccuaagccacauaggcugaaucacauggggaucuguucuugcggacuuuauaaacacccgggcguucccgugaaguggaagcgguga

SEQ ID NO: 1176 - RNA, 1473 nt, Artificial Sequence
  derived and/or modified protein sequence (opt3) from LASV(CSF;Clade III)__AAL13212__GPC
augggccagaucgugaccuucuuucaagaggucccccacguuauugaagagauaaugaacaucgugcugauuacacucagccuucuggccaucuugaaggggguauacaauuuagcuacuugcggacugauuggucuaaucacguuccucuuucuguguggcagauccugcucuaugaccuauaaagggucauaccagcuugaaacacuggaguugaacauggaaacucucaauaugaccaugccucugaguuguacaaagaacaccagccaucacuauauaagggugggaaaugagacuggccuggagcucacauuaaccaacacguccaucauuaaucauaaauucugcaaccugucugacgcacacaagaaaaaucuuuacgaucauucguugaugucaaucauuagcacuuuucaccugaguaucccaaacuucaaucaguaugaagccauguccugugacuuuaacggugggaagauaucuauucaguacaaucuaagccacaccuaugcgggagaugcugccaagcauugcggcacacucgcaaacggcauccugcaaacuuucaugcggauggccuggggaggguccuacauugcucuugacucaggucgcggcaauugggauuguaucaugaccaguuaccaguaucugaucauucagaacacaaccugggaggaccacugccaguuuagccgaccgucucccauaggguacuugggacuccugucccaacguacgagagaaaucuauauuucaaggcgguuacugggcacuuucacauggacccucagcgauagugaggguaacgagaauccugggggauacugucuuacucgcuggaugcugaucgaagcagaguugaaaugcuuuggcaacacagccgucgcuaaguguaaugaaaaacaugacgaggaguucugcgauaugcuaagacuguuugacuucaacaagcaggccauacagaggcucaaagcggaagcacagaugucuauucaacugaucaauaaggccgugaacgcucuuaucaaugaucagcugauuaugaagaaccacuugcgggacaucaugggcauuccauauugcaauuacuccaaauauugguaccucaaccacaccacgaccgggcgcacaagccugccccgauguugguuaguuucgaauggaucuuaccugaacgagacuagauucuccgaugacauagaacagcaagccgacaauaugaucaccgagaugcuacagaaggaauauauugauaggcaggguaaaacaccucucggccugguggaccuuuuugucuucucaaccaguuuuuacuugaucagcaucuuccugcaucucauuaagauaccaacucaccggcauaucguagggggacccugcccuaaaccacaccgucugaaccauaagggcauuuguuccugcggucuuuauaaacgcccgggggugucuguuagauggaagagguga

SEQ ID NO: 1177 - RNA, 1473 nt, Artificial Sequence
  derived and/or modified protein sequence (opt3) from LASV(ISTH2121-NIG-2012;Clade III)__AIT17540__GPC
augggccagaucgugaccuucuuucaagaggucccccacguuauugaagagauaaugaacaucgugcugauuacacucagccuucuggccaucuugaaggggauuuacaauuucgcuacuugcggauuaaucggucugauaacguuucuauuccucuguggcagauccugcucuaccaucuauaaagggucauaccagcugcagacacuugaacugaacauggagacuuugaauaugaccaugccucucaguuguacaaagaacaauagccaucacuauauuaggguaggaaacgaaaccggccuggagcugacucucacaaauaccuccaucauuaaccauaaauuuugcaauuuaucugaggcacacaagaaaaaccuguacgaccaugcccuuaugucgaucauaucaacguuccacuugagcauuccaaauuuuaaccaguaugaagcgaugaguugugauuucaauggugggaagaucuccgugcaauacaaccugucucacagcuaugcugucgacgccgcaaaucauugcggaacuguggccaacggcguucuacagaccuuuaugcggauggcuuggggcggguccuacauugcacucgauucaggacgcgguaacugggacuguaucaugacaaguuaccaguaucugaucauucagaauacuaccugggaggaucacugccaauucagccgaccgucucccauaggcuaccuugggcuguugucccagcguacaagagacaucuauauuucaaggcggcuccugggaaccuuuacguggacuuuaagcgauagugaaggcaaggagacaccugguggguacugucugacccgcuggaugcucaucgaggccgaacuuaaaugcuucggaaacacugcuguggccaaguguaaugagaaacaugacgaagaguuuugcgauaugcugagauuguucgacuucaacaagcaggcgauacagaggcuaaaaacagaagcacaaaugucuauucagcugaucaauaaggccgucaacgcucucaucaaugaucagcugauuaugaagaaccaccuucgggacaucaugggcauuccauauugcaauuacuccaaauauugguaccugaaccacaccagcacgggccgcaccucguugcccaaguguuggcucgugucuaauggguccuaccugaacgagacacauuuuucagaugacauagagcaacaggccgacaauaugaucacugaaauguuacagaaagaguauauugaucgacagggaaagaccccucugggucuaguagaccucuucguuuuuaguacuagcuucuaccugaucuccaucuuucuucacuuggugaaaauuccaacacauagacacauagucggcaagucuugccccaaaccucauaggcugaaccacauggggaucuguagcugcggacucuauaagcaaccaggcgugccggugaaguggaaacgguga

SEQ ID NO: 1178 - RNA, 1473 nt, Artificial Sequence
  derived and/or modified protein sequence (opt3) from LASV(Nig08-A19;Clade III)__ADU56618__GPC
augggccagaucgugaccuucuuucaagaggucccccacguuauugaagaggugaugaacauaguacugaucgcccucagcauucuugcuauccugaagggguuguacaauauugcaacaugcggauuaaucggucuggugacuuuccuacuccuguccggcagaucuuguucaaugacguauaaaggggucuacgaacuucagacccuggaguugaacaugaauacacucaacaugacuaugccucugaguugcaccaagaauaacagccaucacuauauaauggugggaaaugaaacaggccuggagcucaccuuaacuaacacaucccugcuucaucacaaauuuuguaauuugucugacgcccauaagaaaaaccuguacgaucacacccuaaugucgaucauuucaacguuccaccucagcaucccaaauuuuaaccaguaugaggcgaugaguugcgacuucaauggugggaagauuacuguucaguacaaccugucccauucuuaugcuaucgaugccgcaaaucacuguggaaccguggccaacggcguccuucaaacauuuaugaggauggcuuggggcgggagcuacauagcacuggacuccggacgggguaagugggauugcauuaugacuucauaccaguauuugaucauucagaacaccacaugggaagaccauugucaguucagucgcccgagccccaucggcuaccucgggcuguuaucucaacgaacccgugauaucuauauuuccagaaggcugcucggaacguuuacuuggacacuuucagacagcgagggcaaugaaaccccugguggguacugccugacucgguggauguugauagaggccgagcuaaaauguuucggaaacacagcuguggccaagugcaaugaaaaacacgaugaggaauuuugugacaugcugcgccucuucgauuuuaacaagcaggcgaucagaaggcugaaagcagaggcccagaugaguauucagcuuaucaauaaggcuguaaacgcccugauaaaugaccaauugauuaugaagaaccaccuccgggauaucaugggcaucccauauugcaauuacucuaaauauugguaccugaaccauaccuccacgggccgcaccagcuuaccccgaugcuggcugguuucgaaugggucuuaccuaaacgaaacacacuucuccgacgacauugagcagcaggcagauaauaugaucacugagaugcuccaaaaggaauaucuggacagacagggaaaaaccccucuugguuugguggaucuguucgucuuuucaacaaguuucuaccucauuagcauauuucugcaucuugugaagaucccaacucacaggcauauugugggcaaacccuguccuaagccacaccggcugaaccacauggggaucugcuccuguggauuguauaaacagccgggcguccccguucguuggaagcgcuga

SEQ ID NO: 1179 - RNA, 1473 nt, Artificial Sequence
  derived and/or modified protein sequence (opt3) from LASV(ONM-299;Clade III)__ANH09734__GPC
augggccagaucgugaccuucuuucaagaggucccccacguuauugaagagauaaugaacaucgugcugauuacacucagccuucuggccaucuugaagggguuauacaauuucgcuacuugcggacugauuggucuaaucacguuucucuuccuguguggcagauccugcucuaugauauauaaagggucauaccagcuugaaacccuggaguugaacauggaaacacucaauaugacuaugccucugaguuguaccaagaacaauagccaucacuauaucaggguaggaaacgagacaggccuggagcucaccuuaacuaauacauccauuaucggucauaaauuuugcaaccugucugacgcacacaagaaaaaucuuuacgaucauucguugaugucaauuaucagcaccuuccaccugaguauaccaaacuuuaaucaguaugaagccauguccugugacuucaacgggggaaagauuucuauccaguacaaucuaagccacacguaugcgggcgaugcugccaagcauugcggcacuguggcaaacgggguccuccaaaccuuuaugcggauggccuggggagguuccuacauugcucuggacucaggccgcgggaauugggauuguaucaugacaaguuaccaguaucuuaucauucagaacacuaccugggaggaccacugccaguucagccgaccgucucccauaggauaccugggcuugcucucccaacguacaagagauaucuauauuucaaggcggcuguuagguaccuuuacguggacucugagcgacagugaagggaaagagacaccuggaggcuacugucucacccgcuggaugcuuaucgaggcagaacugaagugcuucggcaacacugccguggcuaaauguaaugagaagcaugaugaagaguuuugcgacauguugagacuauucgauuucaacaaacaggccauacagaggcugaagacagaagcgcagaugucuauucaacucaucaauaaggcaguuaacgcccugaucaaugaccagcuuauuaugaaaaaccaucugcgggauaucauggggauuccauauugcaauuacuccaaguauugguacuugaaccacaccagcacgggacgcaccucgcuccccaaauguuggcuggugucuaaugguuccuacuuaaacgagacacacuuuucagacgacauagagcagcaagcugauaauaugaucacugaaaugcugcagaaggaguauauugaccgacagggcaaaaccccucuagggcucgucgauguguucguauuuaguacuagcuucuaccugaucuccaucuuucuucacuugguuaagauuccaacacauagacacauagugggaaaaucuugccccaagccucauaggcugaaccacaugggcaucuguagcugcggucucuauaagcagccaggggucccggugcgguggaaacguuga

SEQ ID NO: 1180 - RNA, 1473 nt, Artificial Sequence
  derived and/or modified protein sequence (opt3) from LASV(ONM-700;Clade III)__ANH09738__GPC
augggccagaucgugaccuucuuucaagaggucccccacguuauugaagagauaaugaacaucgugcugauuacacucagccuucuggccaucuugaagggguuauacaauuucgcuacuugcggacugauuggucuaaucacguuucucuuccuguguggcagauccugcucuaugauauauaaagggucauaccagcuugaaacccuggaguugaacauggaaacacucaauaugacuaugccucugaguuguaccaagaacaauagccaucacuauaucaggguaggaaacgagacaggccuggagcucaccuuaacuaauacauccauuaucaaccauaaauuuugcaaucugucugacgcacacaagcggaaccuuuacgaucauucguugaugucaauuaucagcaccuuccaccugaguauaccaaauuuuaaccaguaugaagccauguccugugacuucaauggugggaaaauuucuauccaguacaaccuaagccacacguaugcgggagaugcugccaagcauugcggcacuguggcaaauggcguccuccaaaccuuuaugcgcauggccuggggaggguccuacauugcucuggacucaggucgaggcaacugggauuguaucaugacaaguuaccaguaucuuaucauucagaacacuaccugggaggaccacugccaguucagccguccgucucccauaggguaccugggauugcucucccaaagaacaagggauaucuauauuucacggcgccuguuaggcaccuuuacguggacucugagcgacagugaagguaaggagacaccugggggauacugucucaccagauggaugcuuaucgaggcagaacugaaaugcuucggcaauacugccguggcuaaguguaacgagaaacaugaugaagaguuuugcgacauguugaggcuauucgauuucaauaagcaggccauacagcggcugaaaacagaagcgcagaugucuauucaacucaucaacaaggcaguuaaugcccugaucaacgaccagcuuauuaugaagaaucaucugcgcgauaucaugggcauuccauauugcaacuacuccaaauauugguacuugaaucacaccagcacggggcgaaccucgcuccccaaguguuggcuggugucuaacggauccuacuuaaaugagacacacuuuucagacgacauagagcagcaagcugauaacaugaucacugaaaugcugcagaaagaguauauugacagacaggguaagaccccucuaggccucgucgauguguucauguuuaguacuagcuucuaccugaucuccaucuuucuucacuugguaaaaauuccaacacauaggcacauaguugggaagucuugccccaaaccucaucggcugaaucacaugggaaucuguagcugcggccucuauaagcagccaggugugccgguccguuggaagcgcuga

SEQ ID NO: 1181 - RNA, 1473 nt, Artificial Sequence
  derived and/or modified protein sequence (opt3) from LASV(Weller;Clade III)__AAT49010__GPC
augggccagaucgugaccuucuuucaagaggucccccacguuauugaagaggugaugaacauaguacugaucgcccucagcgugcuugcuauucugaagggguuguacaauuucgcaacaugcggauuaaucggucuggucacuuuucuacuccuguccggcagaucuuguucaaugauuuauaaagggguguacgaacuucagacgcuggaguugaacauggaaacccucaauaugacaaugccucugaguugcacuaagaacaccagccaucacuauaucaggguuggaaaugacacaggccuggagcucaccuuaacuaacgagacacugcuucaucacaaauucuguaauuuguccgaugcccauaagcggaaccuguacgaccacgcgcuaaugucuauaaucucgaccuuucaccucucaauuccaaauuucaaccaguaugaagcuaugagcugcgauuuuaauggugggaaaaucacggugcaguacaaccugagucauuccuaugccgucgacgcagccaagcacuguggaacuguggcuaauggcguacuucaaaccuucaugcgcauggcauggggcgggucuuacauugcccuggauagccgacauggaaacugggacugcaucaugacauccuaccaguauuugauaauucagaauacuaccugggaggaucacugucaguuuucacguccgagucccaucgguuaccucggccuguuaagccaaagaacaagggacauuuauaucucucggcgccugcucgggaccuucacguggacucuuuccgauucagaaggaaacgagacaccuggcgguuacugccugaccagauggauguugaucgaggcugaacuaaaguguuuugggaacacugccguugcgaaaugcaaugagaagcacgacgaagaguucugugauaugcugaggcucuuugacuucaacaaacaggcaauucggcgccugaagacagaagcccagaugagcauacagcuuaucaauaaagcugugaacgcccugauuaaugaucaauugaucaugaagaaccaucuccgagacauaaugggcauuccauauugcaauuacaguaaguauugguaccugaaccacaccucuacgggaaaaaccuccuuacccagaugcuggcuggucagcaauggcucguaccuaaacgagacacauuucucugacgauaucgagcagcaggcagacaauaugaucacugaaaugcuccaaaaggaguaucuggauaggcaggggaaaaccccucuuggauugguggaccuguuuguguucuccacaucauuuuaccucauuaguaucuuccugcaccuuauuaagauaccaacucaucggcacaucgucgguaaacccuguccuaagccacaccgucugaaccauaugggcauuugcagcuguggguuguauaaacagccgggaguucccgugcgcuggaagagauga

SEQ ID NO: 1182 - RNA, 1476 nt, Artificial Sequence
  derived and/or modified protein sequence (opt3) from LASV(BA366;Clade IV)__ADI39451__GPC
augggccagaucgugaccuucuuucaagaggucccccacguuauugaagaggugaugaacauaguacugaucgcccucagcgugcuugcuguccugaagggguuguacaauguggcaacaugcggauuaauuggucugaucgccuuccuacuccuguguggcagauccugcacuacgacccuuuauaaagggguuuacgaacugcaggcguuggagcucaacauggaaacacugaauaugacuaugccucugucuuguaccaagaacaauucacaucacuauauuauggugggaaacgagacaggccucgaguuaacccugacuaauacaaguaucauaaaccauaaauuuugcaaucuuagcgacgcucacaagaaaaacuuguacgaucaugcccugauguccaucauuucuaccuuccaccuaucgaucccaaauuuuaaccaguaugaagcaaugucaugugacuucaauggugggaagauuagcguccaguacaaccucagucacacguaugccguggaugcugcaaaucauugcggaacuguagccaacggcguucugcaaaccuuuaugaggauggcuuggggcggguccuacaucgcccuugacucuggacgggguagcugggauuguauaaugacauccuaccaguaucugauuauccagaacacuaccugggaggaccacugccaguucucacgcccgagucccauuggcuacuuggggcuccugagccaacgaacacgugauaucuauaucucuagaagguuacugggaaccuuuacguggacucucuccgacucagaaggcaaggauacaccugguggguacugucuuacccgguggaugcugauugaggcggaguugaaaugcuucggaaauacugcaguggccaaguguaacgaaaaacaugacgaggaauuuugcgauaugcuacgccuguucgacuuuaauaagcaggcuauacagagacucaaagccgaggcacagaugagcauccaacugauuaacaaggcugucaaugcccuuaucaacgaucagcugauaaugaagaaucacuugagggacauuaugggcaucccauauugcaacuacaguaaauauugguaccucaaucacacaaucaccggccggacgucucugcccaaguguugguuaguguccaacgggagcuaccugaaugaaacccauuucucggacgauauugagcagcaagcggacaacaugaucacagagaugcuacagaaagaauauauugagcgccagggaaagacuccucucggucugguggaucuuuucgucuuuucuaccuccuucuacuugauaucaaucuuucugcaccucauuaaaaucccaacacaucgacacaucguuaauaagcccugcccuaaaccacauagacugaaccacaugggcguguguaguugcgggcuuuauaagcagccgggaguacccgugagguggaagcgguga

SEQ ID NO: 1183 - RNA, 1476 nt, Artificial Sequence
  derived and/or modified protein sequence (opt3) from LASV(G1180-SLE-2010;Clade IV)__AIT17168__GPC
augggccagaucgugaccuucuuucaagaggucccccacguuauugaagaggugaugaacauaguacugaucgcccucagcauucuugcugugcugaagggguuguacaauuucgcaacaugcggauuagucggucugcuaacuuuucuccugcuuuguggcagauccugcacggccucuagguauaaagggguguacgaacugcagaccuuggagcucaacauggaaacacugaauaugacuaugccucugucauguaccaagaacaauagucaucacuauaucaugguuggaaacgagacaggccucgaguuaacccugacuaauacaagcauuaucaaccauaaauucugcaaucuuuccgacgcgcacaagaaaaacuuguacgaucaugcucugaugucuauaaucucgaccuuucaccuaucaauuccaaauuucaaccaguaugaagccaugagcugugacuuuaauggugggaagaucagugugcaguacaaccucucccacucuuaugcaggagaugccgcuaaucauugcggcacggucgcaaacggcgugcugcaaacuuucaugcggauggccuggggagggagcuacauugcucuugacuccggucacggcucaugggauuguaucaugaccaguuaccaguaucugauaauucagaacacaacuugggaggaccauugccaguuuagccgcccgucucccaucggguacuugggacuccugucccaacgaacccgugauauuuauaucucaagaagguuacugggcacauucaccuggacgcucagcgacagugaagguaaggauacuccugggggauacugucuuacacgguggaugcugaucgaggccgaguugaaaugcuuuggcaauaccgcgguagcaaaguguaacgaaaaacacgacgaggaguucugcgauaugcuacgccuguuugacuucaauaagcaggccauucagagacucaaagcugaagcccagaugucuauacaacugaucaacaaggcaguuaaugcucuuauuaacgaucagcugaucaugaagaaucacuugagggacauaaugggcauuccauauugcaacuacuccaaauauugguaccucaaucauacuacaaccgggaagacgagccugcccaaauguugguuagugucgaacggaucuuaccugaaugaaacccacuucuccgacgauaucgagcagcaagccgacaacaugaucacagagaugcuacagaaggaauauauggagcggcaggguaaaacuccucucggccuggucgaucuuuuuguguucucaaccaguuuuuacuugauuagcaucuuccugcaucucgugaagauuccaacacaccgccauauagucgggaaauccugccccaagccucaccgacugaaucacaugggaaucuguucuugcggccuuuauaagcagccagguguuccggugaaauggaagagauga

SEQ ID NO: 1184 - RNA, 1476 nt, Artificial Sequence
  derived and/or modified protein sequence (opt3) from LASV(G1190-SLE-2010;Clade IV)__AIT17172__GPC
augggccagaucgugaccuucuuucaagaggucccccacguuauugaagaggugaugaacauaguacugaucgcccucagcauucuugcugugcugaagggguuguacaauuucgcaacaugcggauuagucggucuggugacuuuucuacuccuguguggcagauccugcacgaccucucuuuauaaagggguuuacgaacugcagacauuggagcucaacauggaaacucugaauaugaccaugccucugucauguacaaagaacaauagucaucacuauaucauggugggaaacgagaccggccucgaguuaacucugacaaauaccagcauuaucaaccauaaauucugcaaucuuuccgacgcccacaagaaaaacuuguacgaucaugcgcugaugucuauaaucucgacguuucaccuaucaauuccaaauuucaaccaguaugaagcuaugagcugugacuuuaauggugggaagaucaguguccaguacaaccucucccacucuuaugccggagaugcagccaaucauugcggcacuguggcuaacggcguacugcaaaccuucaugaggauggcauggggagggagcuacauugcccuugacuccggucggggccgcugggauuguaucaugacaucauaccaguaucugauaauucagaacacuaccugggaggaccacugccaguuuagucgaccgagccccaucggguacuugggacuccugucucaacguacaagagauauuuauaucuccaggcgguuacugggcaccuucacguggacucucucagacagcgaagguaaggauacaccugggggauacugucuuacccgcuggaugcugaucgaggcugaguugaaaugcuuuggcaauacugccguugcgaaguguaacgaaaaacaugacgaggaguucugcgauaugcuaagacuguuugacuucaauaagcaggcaauucagaggcucaaagccgaagcucagaugaguauacaacugaucaacaaggccgugaaugcacuuauuaacgaucagcugaucaugaagaaucacuugcgggacauaaugggcauuccauauugcaacuacucuaaauauugguaccucaaucacacaaccacggggaagaccucccugcccaaauguugguuagucagcaacggaucguaccugaaugaaacacauuucucugacgauaucgagcagcaagcugacaacaugaucacugagaugcuacagaaggaauauauggagcgccaggguaaaaccccucucggccugguggaucuuuuuguguucuccacaucauuuuacuugauuaguaucuuccugcaccucgucaagauuccaacucaucgacacauaguugggaaacccugcccuagaccacauaggcugaaucacaugggaaucuguagcugcggccuuuauaagcagccgggugugcccguaaaguggaaacgguga

SEQ ID NO: 1185 - RNA, 1476 nt, Artificial Sequence
  derived and/or modified protein sequence (opt3) from LASV(G1200-LIB-2010;Clade IV)__AIT17176__GPC
augggccagaucgugaccuucuuucaagaggucccccacguuauugaagaggugaugaacauaguacugaucgcccucagccuucuggcuguguugaagggguuauacaaugucgcaacaugcggacugauuggucuaaucacuuuccuccugcuuuguggcagauccugcacgaccaaccuguauaaagggguguacgaauugcaggcccucgagcugaauauggaaacacugaacaugacuaugccucucucuuguaccaagaauaacucacaucacuauauuaugguuggaaaugagacaggcuuagagcugacccuuacuaacacaaguaucauaaaucauaaauuuugcaacuugagcgacgcgcacaagaaaaaucuguacgaucaugcucuaauguccaucauuucuaccuuccaccucucgaucccaaacuuuaaucaguaugaagccaugucaugugacuucaacggugggaggauuagcgugcaguacaaucugagucacuccuaugcaggagaugccgcuucucauugcggcacgaucgcaaacggcguccuucaaacuuuuaugcggauggccuggggagggagcuacauagcucuggacuccggucacggcgggugggauuguauuaugaccucauaccaguauuugaucauucagaacacaacuugggaggaccauugccaguucagucgcccgagccccaucggauaccucggccuguuaucucaacgaacccgugauaucuauauuuccagaaggcugcucgguacauuuaccuggacgcuuucagacagcgaagggaaggauacuccuggaggcuacugucugacacgguggauguugauagaggccgagcuaaagugcuucggcaauaccgcgguggcaaaauguaacgaaaagcacgacgaggaauuuugcgauaugcugcgccucuucgacuuuaauaaacaggccauccagagacugaaggcugaggcccagaugaguauucaacuuaucaacaaagcaguaaaugcucugauaaacgaucaguugauuaugaagaaucaccucagggacaucauggggaucccauauugcaacuacucuaaguauugguaccugaaucauacuguuacaggaaaaaccuccuuacccaaguguuggcuggugagcaacgguucguaccuaaaugaaacgcacuucucugacgauauugagcagcaagccgacaacaugaucaccgagaugcuccagaaagaauauauggagcggcagggcaagacaccucuggggcuugucgauuuguucguguuuuccacuucauucuaccugauuaguauauuucuccaucuggugaaaaucccaacccaccgccaugucguuggaaagcccugcccuaaaccacaccgacuuaaucacaugggcauuuguagcugcggucuguauaagcagccgggggugcccguaagauggaagagguga

SEQ ID NO: 1186 - RNA, 1476 nt, Artificial Sequence
  derived and/or modified protein sequence (opt3) from LASV(G1442-SLE-2011;Clade IV)__AIT17180__GPC
augggccagaucgugaccuucuuucaagaggucccccacguuauugaagaggugaugaacauaguacugaucgcccucagcauucuugcugugcugaagggguuguacaaugucgcaacaugcggauuaaucggucuggugacuuuccuacuccuguguggcagauccugcacgaccacacuuuauaaagggguuuacgaacugcagacuuuggagcucaacauggaaacccugaauaugacaaugccucugucuuguaccaagaacaauucacaucacuauauuagggugggaaacgagacuggccucgaguuaacacugaccaauacgaguaucauaaaccauaaauuuugcaaucuuagcgacgcccacaagaaaaacuuguacgaucaugcgcugauguccaucauuucuacuuuccaccuaucgaucccaaauuuuaaccaguaugaagcuaugucaugugacuucaauggugggaagauuagcguccaguacaaccucagucacuccuaugccggagaugcagccaaucauugcggcaccguggcuaacggcguacugcaaacauuuaugcggauggcauggggagggucuuacaucgcccuugacagcggucgcggcaacugggauuguauaaugacuuccuaccaguaucugauuauccagaauaccacaugggacgaucacugccaguucucacgaccgagucccauuggguacuugggacuccugagccaacguaccagagacguuuauaucucuaggcgguuacugggcacguuuacuuggacacucuccgauucagaggguaaggacaccccugggggauacugucuuacucgcuggaugcugaucgaagcugaguugaaaugcuucggcaacacagccguggcgaaguguaaugagaaacaugaugaagaguuuugcgacaugcuaagacuguucgauuuuaacaagcaggcaauucagaggcucaaagccgaagcucagaugagcauacaacugaucaauaaggccgucaacgcacuuauuaaugaccagcugaucaugaagaaccacuugcgggacauaaugggcauuccauauugcaauuacaguaaauauugguaccucaacaauaccgcuacggggaagaccucucugcccaaauguugguuaaucuccaacggaagcuaccugaaugagacacacuucucggaugacaucgaacaggaggccgauaacaugauuacugagaugcuacaaaaggaauauauggagcgccaggguaaaaccccucucggccugguggaccuuuucguguuuucuacauccuucuacuugaucucaauuuuucugcaucucgucaagauaccaacucaccgacauaucguugggaaaaguugccccaagccucacagacugaaucauaugggaauuuguagcugcggccuuuauaagcagccaggugugccgguaagguggaaacgguga

SEQ ID NO: 1187 - RNA, 1476 nt, Artificial Sequence
  derived and/or modified protein sequence (opt3) from LASV(G1529-SLE-2011;Clade IV)__AIT17184__GPC
augggccagaucgugaccuucuuucaagaggucccccacguuauugaagaggugaugaacauaguacugaucgcccucagcauucuugcugugcugaagggguuguacaaugucgcaacaugcggauuaaucggucuggugacuuuccuacuccuguguggcagauccugcacgaccacacuuuauaaagggguuuacgaacugcaggccuuggagcucaacauggaaacucugaauaugaccaugccucugucuuguacaaagaacaauucacaucacuauauuagggugggaaacgagaccggccucgaguuaacucugacaaauaccaguaucauagaccauaaauuuugcaaccuuagcgaugcgcacaagaaaaauuuguacgaccaugcucugauguccaucauuucuacguuccaccuaucgaucccaaacuuuaaucaguaugaagccaugucaugugauuucaacggugggaagauuagcguccaguacaaucucagucacuccuaugcaggagacgccgcuaaccauugcggcacuguggcaaauggcguacugcaaaccuuuaugcggauggccuggggagggucuuacaucgcucuugauagcggucgcaacggcugggacuguauaaugacauccuaccaguaucugauuauccagaacacuaccugggaugaccacugccaguucucacgaccgagucccauuggguacuugggacuccugagccaacguacaagagauaucuauaucucuaggcgguuacugggcaccuuuacguggacucucuccgacucagaggguaaggauacaccugggggauacugucuuacccgcuggaugcugauugaagccgaguugaaaugcuucggcaauacugcgguugcaaaguguaacgagaaacaugacgaagaguuuugcgauaugcuaagacuguucgacuuuaauaagcaggccauaaggcggcucaaagcugaagcccagaugagcauccagcugauuaacaaggcagugaaugcucuuaucaacgaccaacugauaaugaagaaucacuugcgcgauauuaugggcaucccauauugcaacuacaguaaauauugguaccucaauaacacagccaccgggaagacgucucugccccgauguugguuagucuccaauggaagcuaccugaacgagacccacuucucggacgauaucgaacagcaggcggacaauaugauuacagagaugcuacaaagagaguauauggaaaggcaggguaaaacuccucucggccugguggaucuuuucguguuuucuaccuccuucuacuugaucucaauuuuucugcaucucgucaagauaccaacacaccggcauaucguugggaaacccugcccuaagccacaccgucugaaccauaugggaauuuguaguugcggccuuuauaaacagccgggugugcccguaaaguggaagcgcuga

SEQ ID NO: 1188 - RNA, 1476 nt, Artificial Sequence
  derived and/or modified protein sequence (opt3) from LASV(G1618-SLE-2011;Clade IV)__AIT17188__GPC
augggccagaucgugaccuucuuucaagaggucccccacguuauugaagaggugaugaacauaguacugaucgcccucagcauucuugcugugcugaagggguuguacaauuucgcaacaugcggauuugucgguuuaguguccuuccugcuacucuguggcagaucuugcacuacgucacuguauaaagggguuuacgaacuucagacccuggaguugaacauggaaacacucaauaugacuaugccucugaguuguaccaagaacaauagccaucacuauaucauggugggaaacgagacaggccuggagcucaccuuaacuaauacauccauuaucaaccauaaauuuugcaaucugucugacgcccacaagaaaaaccuuuacgaucaugcguugaugucgauaaucucaaccuuccaccugagcauuccaaauuuuaaccaguaugaagcuaugaguugugacuucaauggugggaagaucuccguccaguacaaccuaucucacagcuaugccguggaugcagccaaucauugcggaacgguagcuaacggcguucuccaaacuuuuaugaggauggcauggggcggguccuacauugcccuggacucaggacacgguaguugggauuguaucaugaccagcuaccaguaucuuauaauucagaacacaacuugggaggaccauugccaguucucucggccgucccccaucggcuaccugggguugcucucacaacgcacccgagauauuuauaucagccguagacuguuaggaacauuuaccuggacgcugagugacucugaaggcaaggauacuccugguggguacugucucacaagguggaugcuuaucgaggcugagcugaaaugcuucggaaauaccgccguggcgaaguguaacgaaaaacacgacgaggaauuuugcgauauguugcggcuauucgacuucaauaagcaggcaauucagcgccugagagccgaggcucagauguccauacaacucaucaacaaagccgucaaugcacugauuaacgaucagcuuaucaugaagaaucaccugagggacauaaugggcauuccauauugcaacuacagcaaguauugguacuugaaucauacuacaaccggccggacgucgcuccccaaauguuggcuggugucuaacggguccuacuuaaaugaaacccacuuuucagacgauaucgagcagcaagcugacaacaugaucacagagaugcugcagaaggaauauauggagcgccagggaaaaacuccucuaggucucguggaucuguucgucuuuaguaccagcuucuaccuuauuuccaucuuuuugcaucugguuaagauuccaacacaccgacauauagugggcaaaucuugccccaagccucacagacucaaucacauggggaucuguagcugcggacuguauggccagccagguguaccggugaaauggaagagguga

SEQ ID NO: 1189 - RNA, 1476 nt, Artificial Sequence
  derived and/or modified protein sequence (opt3) from LASV(G1646-SLE-2011;Clade IV)__AIT17192__GPC
augggccagaucgugaccuucuuucaagaggucccccacguuauugaagaggugaugaacauaguacugaucgcccucagcauucuugcugugcugaagggguuguacaauuucgcaacaugcggauuuaucgguuuagucuccuuccugcuacucuguggcagaucuugcacuacgucacuguauaaagggguguacgaacuucagacccuggaguugaacauggaaacacucaauaugacuaugccucugaguuguaccaagaacaauagccaucacuauauuaugguuggaaacgagacaggccuggagcucaccuuaacuaauacauccaucauaaaccauaaauuuugcaaucugucugacgcccacaagaaaaaccuuuacgaucaugcguugaugucgaucauuucaaccuuccaccugagcaucccaaauuuuaaccaguucgaagcuaugaguugugacuuuaauggugggaagauuuccgugcaguauaaccuaucucacagcuacgccgucgaugcagccaaucauugcggaacgguggcuaacggcguacuccaaacuuucaugaggauggcauggggcggguccuauaucgcccuggacucaggacacgguaguugggauuguauaaugaccagcuaccaguaccuuauuauccagaacacaacuugggaggaccauugccaguuuucucggccgucccccauuggcuaucugggguugcucucacaacgcacccgagauaucuacaucagccguagacuguuaggaacauucaccuggacgcugagugacucugaaggcaaggauacuccugguggguauugucucacaagguggaugcuuauugaggcugagcugaaaugcuuuggaaauaccgccguugcgaaguguaacgaaaaacacgacgaggaguucugcgauauguugcggcuauucgacuuuaauaagcaggcaauacagcgccugaaagccgaagcucagauguccauccaacucauuaacaaggccgugaaugcacugaucaacgaucagcuuauaaugaagaaucaccugagagacauuaugggcaucccauacugcaacuauagcaaauacugguauuugaaucauacuacaaccggcaggacgucgcuccccaaguguuggcuggucucuaacggguccuacuuaaaugaaacccacuucucagacgauaucgagcagcaagcugacaacaugauuacagagaugcugcagaaagaauacauggagcggcagggaaagacuccucuaggucucguggaucuguuuguguucaguaccagcuuuuaucuuaucuccauuuucuugcaucuggucaaaauaccaacacaccgccauaucguuggcaagucuugccccaaaccucaccgacucaaucacauggggauuuguagcugcggacuguacggccagccaggugugccgguaaaguggaagagauga

SEQ ID NO: 1190 - RNA, 1476 nt, Artificial Sequence
  derived and/or modified protein sequence (opt3) from LASV(G1647-SLE-2011;Clade IV)__AIT17196__GPC
augggccagaucgugaccuucuuucaagaggucccccacguuauugaagaggugaugaacauaguacugaucgcccucagcauucuugcugugcugaagggguuguacaauuuagcaacaugcggacuggucggucuagugacuuuccuccugcuuuguggcagauccugcacgaccucucuguauaaagggguuuacgaauugcagacacucgagcugaacauggaaacucugaauaugaccaugccucucucauguacaaagaacaauagucaucacuauaucauggugggaaacgagaccggcuuagagcugacucuuacaaauaccagcauuaucaaccauaaauuuugcaauuuguccgacgcccacaagaaaaaccuguacgaucaugcgcuaaugucuauaaucucgacguuccaccucucaauuccaaauuuuaaccaguaugaagcuaugagcugugacuucaauggugggaagaucaguguccaguacaaccugucccacucuuaugccggagaugcagccaaucauugcggcacuguggcuaacggcguacuucaaaccuuuaugaggauggcauggggagggagcuacauugcccuggacuccggucggggccgcugggauuguaucaugacaucauaccaguauuugauaauucagaacacuaccugggaggaccacugccaguucagucgaccgagccccaucggguaccucggacuguuaucucaacguacaagagauauuuauaucuccaggcggcugcucggcaccuuuacguggacucuuucagacagcgaagguaaggauacaccugggggauacugucugacccgcuggauguugaucgaggcugagcuaaaaugcuucggcaauacugccguugcgaaguguaacgaaaaacaugacgaggaauuuugcgauaugcugagacucuucgacuuuaauaagcaggcaauucagaggcugaaagccgaggcucagaugaacauacaacuuaucaauaaggccgugaacgcacugauuaaugaucaguugaucaugaagaaccaccuccgggacauaaugggcauuccauauugcaauuacaguaaauauugguaccugaaccacacaaccacggggaagaccucuuuaccccgcuguuggcuggucuccaauggaagcuaccuaaacgaaacacauuucucggacgauaucgagcagcaagcugacaauaugaucacugagaugcuccagaaagaauauauggagcgacaggguaagaccccucugggccuuguggauuuguucguguuuucuacauccuucuaccugauuucaaucuuucuccaccuggucaaaauuccaacucauagacacauaguugggaagcccugcccuaaaccacauaggcuuaaccacaugggaaucuguaguugcggcuucuauaagcagccgggugugcccguaaaguggaaacgguga

SEQ ID NO: 1191 - RNA, 1476 nt, Artificial Sequence
  derived and/or modified protein sequence (opt3) from LASV(G1774-SLE-2011;Clade IV)__AIT17204__GPC
augggccagaucgugaccuucuuucaagaggucccccacguuauugaagaggugaugaacauaguacugaucgcccucagcauucuugcugugcugaagggguuguacaauuuagcaacaugcggacuggucggucuagugacuuuccuccugcuuuguggcagauccugcacgucuucacuguauaaagggguuuacgaauugcagacccucgagcugaacauggaaacacugaauaugacuaugccucucaguuguaccaagaacagcucccaucacuauaucagggugggaaaugagacaggcuuagagcugacccuuacuaacacaucuauuaucaaucauaaauuuugcaacuugucggacgcccacaagaaaaaucuguacgaucaugcgcuaaugucaauaaucagcaccuuccaccucaguauuccaaacuuuaaucaguaugaagcuauguccugugacuucaacggugggaagaucucuguccaguacaaucugagccacuccuaugccggagaugcagccaaccauugcggcacgguggcuaauggcguacuucaaacuuuuaugcggauggcauggggagggucauacauugcccuggacaguggucacgaucgcugggacuguaucaugaccagcuaccaguauuugauaauucagaacacaacuugggaggaucauugccaguucucucgaccgucccccaucggcuaccucgggcuguuaucacaacguaccagagacauuuauaucagcaggcggcugcucggaacauuuaccuggacgcuuagugauucugaaggcaaggacacuccugguggguacugucugacacgcuggauguugaucgaggcugagcuaaaaugcuucggaaacaccgccguugcgaaguguaaugaaaaacacgaugaggaauuuugcgacaugcugagacucuucgauuuuaacaagcaggcaauucagaggcugaaagccgaggcucagauguccauacaacuuaucaauaaggccgugaacgcacugauuaaugaccaguugaucaugaagaaccaccuccgggacauaaugggcauuccauauugcaauuacagcaaauauugguaccugaaccauacuaucacaggcaagaccucguuacccaaauguuggcuggucucuaauggguccuaccuaaacaagacgcacuucucagaugacaucgaacagcaagcugauaauaugauuaccgagaugcuccagaaagaguauauggaacgccagggaaagacaccucugggucuuguggacuuguucguguuuaguacuagcuucuaccugaucuccauuuuucuccaucugauaaaaaucccaacccaccgacauauugucggcaagcccugcccuaagccacacagacuuaaccacauggggaucuguucuugcggacuguauaaacagccgggcguucccgugaaguggaaaagguga

SEQ ID NO: 1192 - RNA, 1476 nt, Artificial Sequence
  derived and/or modified protein sequence (opt3) from LASV(G1792-SLE-2011;Clade IV)__AIT17208__GPC
augggccagaucgugaccuucuuucaagaggucccccacguuauugaagaggugaugaacauaguacugaucgcccucagcauucuugcugugcugaagggguuguacaauuucgcaacaugcggauuaaucggucuggucacuuuucuacuccuguguggcagauccugcacgaccucucuuuauaaagggguguacgaacugcagacauuggagcucaacauggaaacucugaauaugaccaugccucugucauguacaaagaacaauagucaucacuauauuaugguuggaaacgagaccggccucgaguuaacucugacaaauaccagcaucauaaaccauaaauucugcaaucuuuccgacgcccacaagaaaaacuuguacgaucaugcgcugaugucuaucauuucgacguuucaccuaucaaucccaaauuucaaccaguaugaagcuaugagcugugacuuuaauggugggaagauuagugugcaguacaaccucucccacucuuaugccggagaugcagccaaucauugcggcacugucgcuaacggcgugcugcaaaccuucaugaggauggcauggggagggagcuacaucgcccuugacuccggucggggccagugggauuguauaaugacaucauaccaguaucugauuauccagaacacuaccugggaggaccacugccaauuuagucgcccgagccccauuggguacuugggacuccugucucagcgaacacgugauaucuauaucuccagaagguuacugggcaccuucacguggacucucucagacagcgaagguaaggauacaccugggggauacugucuuacccgguggaugcugauugaggcugaguugaaaugcuuuggcaauacugccguagcgaaguguaacgaaaaacaugacgaggaguucugcgauaugcuacgccuguuugacuucaauaagcaggcaauacagagacucaaagccgaagcucaaaugaguauccagcugauuaacaaggccguuaaugcacuuaucaacgaucagcugauaaugaagaaucacuugagggacauuaugggcaucccauauugcaacuacucuaaauauugguaccucaaucacacaaccacggggaagaccucccugcccaaauguugguuagugagcaacggaucguaccugaaugaaacacauuucucugacgauaucgagcaacaggcugacaacaugauuacugagaugcuacagaaggaauauauggagcggcaggguaaaaccccucucggccuggucgaucuuuuuguguucuccacaucauuuuacuugaucaguauuuuccugcaccucgugaagauaccaacucaucgccacaucgucgggaaaagcugccccaagccucaucgacugaaucacaugggaauuuguuccugcggccuuuauaagcaaccagguguuccggugaaauggaagagauga

SEQ ID NO: 1193 - RNA, 1476 nt, Artificial Sequence
  derived and/or modified protein sequence (opt3) from LASV(G1897-SLE-2011;Clade IV)__AIT17210__GPC
augggccagaucgugaccuucuuucaagaggucccccacguuauugaagaggugaugaacauaguacugaucgcccucagcauucuugcugugcugaagggguuguacaauuuagcaacaugcggacuggucggucuagugacuuuccuccugcuuuguggcagauccugcacgaccucucuguauaaagggguuuacgaauugcagacacucgagcugaacauggaaacucugaauaugaccaugccucucucauguacaaagaacaauagucaucacuauaucauggugggaaacgagaccggcuuagagcugacucuuacaaauaccagcauuaucaaccauaaauuuugcaauuuguccgacgcccacaagaaaaaccuguacgaucaugcgcuaaugucuauaaucucgacguuccaccucucaauuccaaauuuuaaccaguaugaagcuaugagcugugacuucaauggugggaagaucaguguccaguacaaccugucccacucuuaugccggagaugcagccaaucauugcggcacuguggcuaacggcguacuucaaaccuuuaugaggauggcauggggagggagcuacauugcccuggacuccggucgggaucgcugggacuguaucaugacaucauaccaguauuugauaauucagaacacuaccugggaggaucacugccaguucagucgaccgagccccaucggcuaccucgggcuguuaucucaacguacaagagacauuuauaucuccaggcggcugcucggaaccuuuacguggacucuuucagauagcgaaggcaaggacacaccugguggguacugucugacccgcuggauguugaucgaggcugagcuaaaaugcuucggaaauacugccguugcgaaguguaacgaaaaacaugaugaggaauuuugcgacaugcugagacucuucgauuuuaauaagcaggcaauucagaggcugaaagccgaggcucagaugaguauacaacuuaucaacaaggccgugaaugcacugauuaacgaccaguugaucaugaagaaucaccuccgggacauaaugggcauuccauauugcaacuacucuaaauauugguaccugaaucacacaaccacgggcaagaccuccuuacccaaauguuggcuggucagcaacgggucguaccuaaaugaaacacauuucucugaugacaucgagcagcaagcugauaacaugaucacugagaugcuccagaaggaauauauggagcgccagggaaaaaccccucugggucuuguggacuuguucguguuuuccacaucauucuaccugauuaguaucuuucuccgacuggucaagauuccaacucacagacauauaguuggcaaacccugcccuaagccacacaggcuuaaucauauggggaucuguagcugcggacuguauaagcagccgggcgugcccguaaaauggaagcgguga

SEQ ID NO: 1194 - RNA, 1476 nt, Artificial Sequence
  derived and/or modified protein sequence (opt3) from LASV(G1932-SLE-2011;Clade IV)__AIT17212__GPC
augggccagaucgugaccuucuuucaagaggucccccacguuauugaagaggugaugaacauaguacugaucgcccucagcauucuugcugugcugaagggguuguacaauuuagcaacaugcggacuggucggucuagugacuuuccuccugcuuuguggcagauccugcacgaccucucuguauaaagggguuuacgaauugcagacacucgagcugaacauggaaacucugaauaugaccaugccucucucauguacaaagaacaauagucaucacuauaucauggugggaaacgagaccggcuuagagcugacucuuacaaauaccagcauuaucaaccauaaauuuugcaauuuguccgacgcccacaggaagaaccuguacgaucaugcgcuaaugucuauaaucucgacguuccaccucucaauuccaaauuuuaaccaguaugaagcuaugagcugugacuucaauggugggaaaaucaguguccaguacaaccugucccacucuuaugccggagaugcagccaaucauugcggcacuguggcuaacggcguacuucaaaccuuuaugcggauggcauggggagggagcuacauugcccuggacuccggucgcggcaagugggauuguaucaugacaucauaccaguauuugauaauucagaacacuaccugggaggaccacugccaguucagucgaccgagccccaucggguaccucggacuguuaucucaacguacaagagauauuuauaucuccaggcggcugcucggcaccuuuacguggacucuuucagacagcgaagguaaggauacaccugggggauacugucugacccgcuggauguugaucgaggcugagcuaaaaugcuucggcaauacugccguugcgaaguguaacgaaaaacaugacgaggaauuuugcgauaugcugagacucuucgacuuuaauaagcaggcaauucagaggcugaaagccgaggcucagaugaguauacaacuuaucaacaaggccgugaaugcacugauuaacgaucaguugaucaugaagaaucaccuccgggacauaaugggcauuccauauugcaacuacucuaaauauugguaccugaaucacacaaccacggggaagaccuccuuaccccgcuguuggcuggucagcaacggaucguaccuaaaugaaacacauuucucugacgauaucgagcagcaagcugacaacaugaucacugagaugcuccagaaagaauauauggagcgacaggguaagaccccucugggccuuguggauuuguucguguuuuccacaucauucuaccugauuaguaucuuucuccaccuggucaaaauuccaacucauagacacauaguugggaagcccugcccuaaaccacauaggcuuaaucacaugggaaucuguagcugcggccuguauaagcagccgggugugcccguaaaguggaaacgguga

SEQ ID NO: 1195 - RNA, 1476 nt, Artificial Sequence
  derived and/or modified protein sequence (opt3) from LASV(G1959-SLE-2011;Clade IV)__AIT17216__GPC
augggccagaucgugaccuucuuucaagaggucccccacguuauugaagaggugaugaacauaguacugaucgcccucagcauucuugcugugcugaagggguuguacaauuucgcaacaugcggauuagucggucuggugacuuuucuacuccuguguggcagauccugcacgaccucucuuuauaaagggguuuacgaacugcagacauuggagcucaacauggaaacucugaauaugaccaugccucugucauguacaaagaacaauagucaucacuauaucauggugggaaacgagaccggccucgaguuaacucugacaaauaccagcauuaucaaccauaaauucugcaaucuuuccgacgcccacaagaaaaacuuguacgaucaugcgcugaugucuauaaucucgacguuucaccuaucaauuccaaauuucaaccaguaugaagcuaugagcugugacuuuaauggugggaagaucaguguccaguacaaccucucccacucuuaugccggagaugcagccaaucauugcggcacuguggcuaacggcguacugcaaaccuucaugaggauggcauggggagggagcuacauugcccuugacuccggucacggccggugggauuguaucaugacaucauaccaguaucugauaauucagaacacuaccugggaggaccauugccaguuuagucgcccgagccccaucggguacuugggacuccugucucaacgaacacgugauauuuauaucuccagaagguuacugggcaccuucacguggacucucucagacagcgaagguaaggauacaccugggggauacugucuuacccgguggaugcugaucgaggcugaguugaaaugcuuuggcaauacugccguugcgaaguguaacgaaaaacacgacgaggaguucugcgauaugcuacgccuguuugacuucaauaagcaggcaauucagagacucaaagccgaagcucagaugaguauacaacugaucaacaaggccgugaaugcacuuauuaacgaucagcugaucaugaagaaucacuugagggacauaaugggcauuccauauugcaacuacucuaaauauugguaccucaaucauacaaccacggggaagaccucccugcccaaauguugguuagucagcaacggaucguaccugaaugaaacacacuucucugacgauaucgagcagcaagcugacaacaugaucacugagaugcuacagaaggaauauauggagcggcaggguaaaaccccucucggccugguggaucuuuuuguguucuccacaucauuuuacuugauuaguaucuuccugcaucucgucaagauuccaacucaccgccauauaguugggaaacccugcccuaagccacaccgacugaauuauaugggaaucuguagcugcggccuuuacaagcagccgggugugcccguaagauggaaaagguga

SEQ ID NO: 1196 - RNA, 1476 nt, Artificial Sequence
  derived and/or modified protein sequence (opt3) from LASV(G2141-SLE-2011;Clade IV)__AIT17224__GPC
augggccagaucgugaccuucuuucaagaggucccccacguuauugaagaggugaugaacauaguacugaucgcccucagcauucuugcugugcugaagggguuguacaaugucgcaacaugcggauuaaucggucuggugacuuuccuacuccuguguggcagauccugcacgaccacacuuuauaaagggguuuacgaacugcaggccuuggagcucaacauggaaacucugaauaugaccaugccucugucuuguacaaagaacaauucacaucacuauauuagggugggaaacgacaccggccucgaguuaacucugacaaauaccaguaucauacagcauaaauuuugcaaccuuagcgaugcgcacaagaaaaauuuguacgaccauacgcugauguccaucauuucuacuuuccaccuaucgaucccaaacuuuaaucaguaugaggcuaugucaugugauuucaacggugggaagauuagcguccaauacaaucucagucacuccuaugccggagacgcagccucucauugcggcaccguggcuaacggcguacugcagacauuuaugcggauggcauggggagggagcuacaucgcccuugauuccggucgcggcaauugggacuguauaaugacuucauaccaguaucugauuauccagaacaccacaugggaagaucacugccaauucagucgaccgagccccauuggguacuugggacuccugucucagcguaccagagacaucuauaucuccaggcgguuacugggcacguuuacuuggacacucucagauagcgagggucgcgacaccccugggggauacugucuuacuagauggaugcugauugaagcugaguugaagugcuucggcaacacagccguugcgaaauguaaugagaagcaugaugaagaguuuugcgacaugcuaaggcuguucgauuuuaacaaacaggcaauacagcggcucaagaccgaagcccaaaugaguauccagcugauuaauaaagcugugaacgcccuuaucaaugaccagcugauaaugaagaaccacuugcgcgacauuaugggcaucccauauugcaauuacucuaaguauugguaccucaacaauacgaucaccgggaaauccagccugcccaaguguugguuagucucgaacggaucuuaccugaaugagacacacuucuccgaugacauugaacaagaggcagauaacaugaucacugagaugcuacagaaagaauauauggagcgacaggguaagaccccucucggccugguggaccuuuucguguuuucaacaaguuucuacuugauuagcauauuucugcaucucgucaaaaucccaacucacagacauauuguugggaagcccugcccuaaaccacacaggcugaaucauaugggaguguguuccugcggccuuuauaagcagccggguguacccgugcgguggaagcguuga

SEQ ID NO: 1197 - RNA, 1476 nt, Artificial Sequence
  derived and/or modified protein sequence (opt3) from LASV(G2147-SLE-2011;Clade IV)__AIT17228__GPC
augggccagaucgugaccuucuuucaagaggucccccacguuauugaagaggugaugaacauaguacugaucgcccucagcauucuugcugugcugaagggguuguacaauuucgcaacaugcggauuagucggucugcuaacuuuucuccugcuuuguggcagauccugcacgaccucucuguauaaagggguguacgaauugcagacacucgagcugaacauggaaacucugaauaugaccaugccucucucauguacaaagaacaauagucaucacuauaucaugguuggaaacgagaccggcuuagagcugacucuuacaaauaccagcauuaucgaccauaaauucugcaacuuguccgaugcccacaagaaaaaucuguacgaccaugcgcuaaugucuauaaucucgacguuucaccucucaauuccaaacuucaaucaguaugaagcuaugagcugugauuuuaacggugggaagaucagugugcaguacaaucugucccacucuuaugccggagacgcagccaaccauugcggcacugucgcuaauggcgugcuucaaaccuucaugaggauggcauggggagggagcuacauugcccuggauuccggucggggcgggugggacuguaucaugacaucauaccaguauuugauaauucagaacacuaccugggaggaucacugccaguuuagucgcccgagccccaucggauaccucggccuguuaucucaacgaacacgugacauuuauaucuccagaaggcugcucgguaccuucacguggacucuuucagauagcgaagggaaggacacaccuggaggcuacugucugacccgguggauguugaucgaggcugagcuaaaaugcuuuggcaacacugccguagcgaaguguaaugaaaaacaugaugaggaguucugcgacaugcugcgccucuuugauuucaacaagcaggcaauucagagacugaaagccgaagcucagaugaguauacaacuuaucaauaaggccguuaacgcacugauuaaugaccaguugaucaugaagaaccaccucagggacauaauggggauuccauauugcaauuacucuaaauauugguaccugaaccacacaaccacgggaaagaccuccuuacccaaauguuggcuggugagcaaugguucguaccuaaacgaaacacauuucucugaugacaucgagcagcaagcugauaauaugaucacugagaugcuccagaaggaauauauggagcggcagggcaaaaccccucuggggcuugucgacuuguuuguguucuccacaucauuuuaccugauuaguaucuuccuccaccuggugaagauuccaacucaucgccacauagucggaaaaagcugccccaagccucaucgacuuaaccacaugggcaucuguuccugcggucuguauaagcagccagggguuccggugaaauggaagagauga

SEQ ID NO: 1198 - RNA, 1476 nt, Artificial Sequence
  derived and/or modified protein sequence (opt3) from LASV(G2165-SLE-2011;Clade IV)__AIT17232__GPC
augggccagaucgugaccuucuuucaagaggucccccacguuauugaagaggugaugaacauaguacugaucgcccucagcauucuugcugugcugaagggguuguacaauuucgcaacaugcggauuagucggucuggugacuuuucuacuccuguguggcagauccugcacgaccucucuuuauaaagggguuuacgaacugcagacauuggagcucaacauggaaacucugaauaugaccaugccucugucauguacaaagaacaauagucaucacuauaucagggugggaaacgagaccggccucgaguuaacucugacaaauaccagcauuaucaaccauaaauucugcaaucuuuccgacgcccacaagaaaaacuuguacgaucaugcgcugaugucuauaaucucgacguuucaccuaucaauuccaaauuucaaccaguaugaagcuaugagcugugacuuuaaugaggguaagaucaguguccaguacaaccucucccacucuuaugccggggaugcagccaaucauugcggaacuguggcuaacggcguacugcaaaccuucaugcggauggcauggggcgggagcuacauugcccuugacuccggacgcgguaagugggauuguaucaugacaucauaccaguaucugauaauucagaacacuaccugggaagaccacugccaguuuagucgaccgagccccaucggcuacuuggggcuccugucucaacguacaagagauauuuauaucuccaggcgguuacugggaaccuucacguggacucucucagacagcgagggcaaagauacaccugguggguacugucuuacccgcuggaugcugaucgaggcugaauugaagugcuuuggaaauacugccguugcgaaauguaacgagaagcaugacgaagaguucugcgauaugcuaagacuguuugacuucaauaaacaggcaauugaaaggcucaaggccgaggcucagaugaguauacagcugaucaacaaggccgugaaugcacuuauuaacgaucaacugaucaugaaaaaucacuugcgggacauaaugggcauuccauauugcaacuacucuaaguauugguaccucaaucacacaaccacgggcaaaaccucccugcccaaguguugguuagucagcaacgggucguaccugaaugagacacauuucucugacgauaucgaacagcaggcugacaacaugaucacugagaugcuacaaaaagaauauauggagcgccagggaaagaccccucucggucugguggaucuuuuuguguucuccacaucauuuuacuugauuaguaucuuccugcaccucgucaaaauuccaacucaucgacacauaguuggcaagagcugccccaagccucauagacugaaucacauggggaucuguuccugcggacuuuauaaacagccaggcgugccgguaaaguggaaaagguga

SEQ ID NO: 1199 - RNA, 1476 nt, Artificial Sequence
  derived and/or modified protein sequence (opt3) from LASV(G2184-SLE-2011;Clade IV)__AIT17236__GPC
augggccagaucgugaccuucuuucaagaggucccccacguuauugaagaggugaugaacauaguacugaucgcccucagcauucuugcugugcugaagggguuguacaauuucgcaacaugcggauuagucggucuggugacuuuucuacuccuguguggcagauccugcacgaccucucuuuauaaagggguuuacgaacugcagacauuggagcucaacauggaaacucugaauaugaccaugccucugucauguacaaagaacaauagucaucacuauaucauggugggaaacgagaccggccucgaguuaacucugacaaauaccagcauuaucaaccauaaauucugcaaucuuuccgacgcccacaagaaaaacuuguacgaucaugcgcugaugucuauaaucucgacguuucaccuaucaauuccaaauuucaaccaguaugaagcuaugagcugugacuuuaauggugggaggaucaguguccaguacaaccucucccacucuuaugccggagaggcagccaaucauugcggcacuguggcuaacggcguacugcaaaccuucaugcggauggcauggggagggagcuacauugcccuugauuccggucgcggcaagugggacuguaucaugacaucauaccaguaucugauaauucagaacacuaccugggaagaucacugccaguuuagucgaccgagccccaucggguacuugggacuccugucucaacguacaagagacauuuauaucuccaggcgguuacugggcaccuucacguggacucucucagauagcgaggguaaggacacaccugggggauacugucuuacccgcuggaugcugaucgaggcugaauugaaaugcuuuggcaauacugccguugcgaaguguaacgagaaacaugaugaagaguucugcgacaugcuaagacuguuugauuucaauaagcaggcaauucagaggcucaaagccgaagcucagaugaguauacaacugaucaacaaggccgugaaugcacuuauuaacgaccagcugaucaugaagaaucacuugcgggauauaaugggcauuccauauugcaacuacucucgcuauugguaccucaaucacacaaccacggggaaaaccucccugcccaaguguugguuagucagcaacggaucguaccugaaugagacacauuucucugacgacaucgagcagcaagcugauaacaugaucacugaaaugcuacagaaagaguauauggaacgacaggguaagaccccucucggccugguggaccuuuuuguguucuccacaucauuuuacuugauuaguaucuuccugcaccucgucaaaauuccaacucauagacacauaguuggaaagagcugccccaaaccucauaggcugaaucacauggggaucuguuccugcggccuuuauaagcagccaggugugccgguaaaguggaaacgguga

SEQ ID NO: 1200 - RNA, 1476 nt, Artificial Sequence
  derived and/or modified protein sequence (opt3) from LASV(G2197-SLE-2011;Clade IV)__AIT17240__GPC
augggccagaucgugaccuucuuucaagaggucccccacguuauugaagaggugaugaacauaguacugaucgcccucagcauucuugcugugcugaagggguuguacaauuuagcaacaugcggacuggucggucuagugacuuuccuccugcuuuguggcagauccugcacgaccucucuguauaaaggguuuuacgaauugcagacacucgagcugaacauggaaacucugaauaugaccaugccucucucauguacaaagaacaauagucaucacuauaucaggguuggaaacgagaccggcuuagagcugacucuuacaaauaccagcauuaucgaccauaaauucugcaacuuguccgaugcccacaagaaaaaucuguacgaccaugcgcuaaugucuauaaucucgacguuucaccucucaauuccaaacuucaaucaguaugaagcuaugagcugugauuuuaacggugggaagaucagugugcaguacaaucugucccacucuuaugccggagacgcagccaaccauugcggcacugucgcuaauggcgugcuucaaaccuucaugcggauggcauggggagggagcuacauugcccuggauuccggucgcggccgaugggacuguaucaugacaucauaccaguauuugauaauucagaacacuaccugggaggaucacugccaguuuagucguccgagccccaucggguaccucggacuguuaucucaaaagacaagagacauuuauaucuccaggcggcugcucggcaccuucacguggacucuuucagauagcgaagguaaagacacaccugggggauacugucugacccgcuggauguugaucgaggcugagcuaaagugcuuuggcaacacugccguagcgaaauguaaugaaaagcaugaugaggaguucugcgacaugcugagacucuuugauuucaacaaacaggcaauucagaggcugaaggccgaagcucagaugaguauacaacuuaucaauaaggccguuaacgcacugauuaaugaccaguugaucaugaaaaaccaccuccgggacauaaugggcauuccauauugcaauuacucuaaguauugguaccugaaccacacaaccacggggaaaaccuccuuacccaaguguuggcuggugagcaauggaucguaccuaaacgaaacacauuucucugaugacaucgagcagcaagcugauaauaugaucacugagaugcuccagaaagaauauauggagcgccaggguaagaccccucugggccuugucgacuuguuuguguucuccacaucauuuuaccugauuaguaucuuccuccaccuggugaaaauuccaacucaucgacacauagucggaaagagcugccccaagccucauagacuuaaccacauggggaucuguuccugcggccuguauaaacagccagguguuccggugaaguggaaaagguga

SEQ ID NO: 1201 - RNA, 1476 nt, Artificial Sequence
  derived and/or modified protein sequence (opt3) from LASV(G2222-SLE-2011;Clade IV)__AIT17244__GPC
augggccagaucgugaccuucuuucaagaggucccccacguuauugaagaggugaugaacauaguacugaucgcccucagcauucuugcugugcugaagggguuguacaauuuagcaacaugcggacuggucggucuagugacuuuccuccugcuuuguggcagauccugcacgaccaaccuguauaaagggguuuacgaauugcagacacucgagcugaauauggaaacucugaacaugaccaugccucucucuuguacaaagaacucaagucaucacuauaucagggugggaaaugagaccggcuuagagcugacucuuacaaauaccagcauuaucgaccauaaauuuugcaacuuguccgaugcccacaagaaaaaucuguacgaccaugcgcuaaugucuauaaucucgacguuccaccucucaauuccaaacuuuaaucaguaugaagcuaugagcugugauuucaacggugggaagaucaguguccaguacaaucugucccacucuuaugugggagacgccgcagaucauugcggcacuguagccaacggcguucuucaaaccuuuaugcggauggcuuggggagggagcuacauugcacuggacuccggucgcggcaagugggauuguaucauaacaucauaccaguauuugauuauccagaauacuaccugggaggaccacugccaguucagucgaccgagccccauuggguaccucggacuguuaucucaacguacaagagauaucuauaucuccaggcggcugcucggcaccuuuacguggacucuuucagacagcgaagguaaagauacaccugggggauacugucugacccgcuggauguugauugaggccgagcuaaagugcuucggcaacacugcuguggccaaauguaacgaaaagcaugacgaggaauuuugcgauaugcugagacucuucgacuuuaauaaacaggcgauacagaggcugaaggcagaggcccagaugaguauccaacuuauuaacaaggcugucaaugcccugaucaacgaccaguugauaaugaaaaaucaccuccgggauauuaugggcaucccauauugcaacuacucuaaguauugguaccugaaucacacaaucaccgggaaaacguccuuaccccgcuguuggcuggugagcaacggaucguaccuaaaugaaacccgauucucugacgauauugagcagcaagcagacaacaugaucacagagaugcuccagaaggaauauauggagagacaggguaaaacuccucugggccuuguggauuuguucgucuuuuccaccucauucuaccugauuaguauauuucuccaucugguuaagaucccaacacacaggcauauuguggggaaacccugcccuaagccacaccggcuuaaucauaugggaaucuguagcugcggccuguauaagcagccggguguacccgugaaauggaagcguuga

SEQ ID NO: 1202 - RNA, 1476 nt, Artificial Sequence
  derived and/or modified protein sequence (opt3) from LASV(G2230-SLE-2012;Clade IV)__AIT17246__GPC
augggccagaucgugaccuucuuucaagaggucccccacguuauugaagaggugaugaacauaguacugaucgcccucagccuucuggcuguguugaagggguuauacaaugucgcaacaugcggacugauuggucuaaucacuuuccuccugcuuuguggcagauccugcacgaccaaccuguauaaagggguguacgaauugcagacacucgagcugaauauggaaacucugaacaugaccaugccucucucuuguacaaagaacucaagucaucacuauauuaugguuggaaaugagaccggcuuagagcugacucuuacaaauaccagcaucauaaaccauaaauuuugcaauuuguccgacgcccacaagaaaaaccuguacgaucauacgcuaaugucuaucauuucgacuuuccaccucucaaucccaaauuuuaaccaguaugaagcgaugagcugugacuucaauggugggaagauuagugugcaguacaaccugucccacucuuaugcugucgaugccgcaaaucauugcggaaccguggccaacggcauccuucaaacauuuaugaggauggcuuggggcgggagcuacauagcacuggacuccggacgggguaacugggauuguauuaugacuucauaccaguauuugaucauucagaauaccacaugggaggaccacugccaguucagucgcccgagccccaucggcuaccucgggcuguuaucucaacgaacccgugauaucuauauuuccagaaggcugcucggaacguuuacuuggacacuuucagacagcgaaggcaacgauaccccugguggguacugucugacucgguggauguugauagaggccgagcuaaagugcuucggaaauacagcuguagccaaauguaacgaaaagcaugacgaggaauuuugcgauaugcugcgccucuucgacuuuaauaaacaggcgauccagagacugaaggcagaggcccagaugaguauucaacuuaucaacaaagcuguuaaugcccugauaaacgaucaguugauuaugaagaaucaccucagggacaucaugggcaucccauauugcaacuacucuaaguauugguaccugaaucacaccacgaccggcaaaacauccuuacccaaguguuggcuggugagcaacgggucguaccuaaaugaaacucauuucucugacgauauugagcagcaagcagacaacaugaucaccgagaugcuccagaaagaauauauggagcggcagggaaagacaccucugggucuugucgauuuguucguguuuuccacuucauucuaccugauuaguauauuucuccaccuggugaaaaucccaacccaucgccacauugucggcaagcccugcccuaaaccacaucgacuuaaucacauggggaucuguagcugcggacuguauaagcagccgggcguucccgugagauggaagagguga

SEQ ID NO: 1203 - RNA, 1476 nt, Artificial Sequence
  derived and/or modified protein sequence (opt3) from LASV(G2259-SLE-2012;Clade IV)__AIT17250__GPC
augggccagaucgugaccuucuuucaagaggucccccacguuauugaagaggugaugaacauaguacugaucgcccucagccuucuggcuguguugaagggguuauacaaugucgcaacaugcggacugauuggucuagugacuuuccuccugcuuuguggcagauccugcacgaccaaccuguauaaagggguuuacgaauugcagacacucgagcugaauauggaaacucugaacaugaccaugccucucucuuguacaaagaauaacucacaucacuauaucauggugggaaaugagaccggcuuagagcugacucuuacaaacaccaguauuaucaaucauaaauuuugcaacuugagcgacgcccacaagaaaaaucuguacgaucauacgcuaauguccauaaucucuacuuuccaccucucgauuccaaacuuuaaucaguaugaagcgaugucaugugacuucaacggugggaagaucagcguccaguacaaucugagucacuccuaugcuguggaugccgcaaaccauugcggaaccguagccaacggcguucuucaaacauuuaugaggauggcuuggggcgggucuuacauugcacuggacagcggacgggguaauugggauuguaucaugacuuccuaccaguauuugauaauucagaacaccacaugggaggaccacugccaguucucacgcccgagucccaucggcuaccucgggcuguuaagccaacgaacccgugauauuuauaucucuagaaggcugcucggaacguuuacuuggacacuuuccgacucagaaggcaaugauaccccugguggguacugucugacucgguggauguugaucgaggccgagcuaaagugcuucggaaacacagcuguggccaaauguaaugaaaagcaugacgaggaauuuugcgauaugcugcgccucuucgacuuuaacaaacaggcgauucagagacugaaggcagaggcccagaugagcauacaacuuaucaauaaagcugucaacgcccugauuaaugaucaguugaucaugaagaaccaccucagggacauaaugggcauuccauauugcaauuacaguaaguauugguaccugaaccacaccacgaccggcaaaacaucuuuacccaaguguuggcugguguccaaugggagcuaccuaaacgaaacucauuucucggacgauaucgagcagcaagcagacaauaugaucaccgagaugcuccagaaagaauauauggagcggcagggaaagacaccucugggucuuguggauuuguucgucuuuucuacuuccuucuaccugauuucaaucuuucuccaccugguuaaaauuccaacccaucgccacauagugggcaagcccugcccuaaaccacaucgacuuaaccacauggggaucuguaguugcggacuguauaagcagccgggcguacccgugagauggaagagguga

SEQ ID NO: 1204 - RNA, 1476 nt, Artificial Sequence
  derived and/or modified protein sequence (opt3) from LASV(G2263-SLE-2012;Clade IV)__AIT17254__GPC
augggccagaucgugaccuucuuucaagaggucccccacguuauugaagaggugaugaacauaguacugaucgcccucagcauucuugcugugcugaagggguuguacaauuucgcaacaugcggaaucgucgguuuagugacuuuucugcuacucuguggcagauccugcacgaccucucuguauaaagggguuuacgaacuucagacacuggaguugaacauggaaacucucaauaugaccaugccucugucauguacaaagaacaauagucaucacuauauuauggugggaaacgagaccggccuggagcucacuuuaacaaauaccagcaucauaaaccauaaauucugcaaucuguccgacgcccacaagaaaaaccuuuacgaucaugcguugaugucuaucauuucgacguuucaccugucaaucccaaauuucaaccaguaugaagcuaugagcugugacuuuaauggugggaagauuaguguccaguacaaccuaucccacucuuaugccggagaugcagccaaucauugcggcacuguggcuaacggcguacuccaaaccuucaugaggauggcauggggagggagcuacaucgcccuggacuccggucgggaucgcugggacuguauaaugacaucauaccaguaucuuauuauccagaacacuaccugggaggaucacugccaguuuagucgaccgagccccauuggcuaccugggguugcucucucaacguacaagagacaucuauaucuccaggcggcuguuaggaaccuucacguggacucugucagauagcgaaggcaagaauacaccugguggguacugucucacccgcuggaugcuuauugaggcugagcugaaaugcuuuggaaacacugccguugcgaaguguaaugaaaaacaugacgaggaguucugcgauauguugagacuauuugacuucaacaagcaggcaauacagaggcugaaagccgaagcucagaugaguaucucucucauuaauaaggccgugaacgcacugaucaaugaucaacuuauaaugaagaaccaucugcgggacauuaugggcaucccauauugcaauuacuccaaauauugguacuugaaccacacaaccacgggcaagaccagccucccccgcuguuggcuggucucgaaugggucuuacuuaaacgaaacacacuucuccgacgauaucgagcagcaggcugacaauaugauuacugagaugcugcaaaaagaauauauggaucgacagggaaagaccccucuaggucucguggaccuguuuguguucucaacaaguuuuuaccuuaucagcauuuucuugcaccuggucaaaauaccaacucauagacacaucguuggcaagaccugccccaaaccucauaggcucaaccacauggggauuuguuccugcggacuguauaagcagccaggcgugccgguaaaguggaaacgguga

SEQ ID NO: 1205 - RNA, 1476 nt, Artificial Sequence
  derived and/or modified protein sequence (opt3) from LASV(G2280-SLE-2012;Clade IV)__AIT17258__GPC
augggccagaucgugaccuucuuucaagaggucccccacguuauugaagaggugaugaacauaguacugaucgcccucagcauucuugcugugcugaagggguuguacaauaucgcaacaugcggauuagucggucuggugacuuuccuacuccuguguggcagauccugcacgaccucucuuuauaaagggguuuacgaacugcagacauuggagcucaacauggaaacucugaauaugaccaugccucugucauguacaaagaacaauagucaucacuauauuauggugggaaacgagaccggccucgaguuaacucugacaaauaccagcaucauaaaccauaaauuuugcaaucuuuccgacgcccacaagaaaaacuuguacgaucaugcgcugaugucuaucgucucgacguuccaccuaucaauuccaaauuuuaaccaguaugaagcuaugagcugugacuucaauggugggaagaucagugugcaguacaaccucucccacucuuaugccguagaugcagccaaucauugcggaacuguugcuaacggcgugcugcaaaccuuuaugaggauggcauggggcgggagcuacauugcccuugacuccggacgggguggcugggauuguaucaugacaucauaccaguaucugauaauucagaacgucacuugggaggaccacugccaguucagucgcccgagccccaucggguacuugggacuccugucucaacgaacccgugauguguauauuuccagaagguuacugggcacauuuaccuggacgcucucagacagcgaagguaaugauacuccugggggauacugucuuacacgguggaugcugaucgaggcugaguugaagugcuucggcaacaccgccguggcgaaauguaaugaaaagcaugacgaggaauuuugcgauaugcuacgccuguucgacuuuaacaaacaggcaauccagagacucaaggccgaggcucagaugaguauucaacugauaaauaaagccgucaacgcacuuaucaaugaucagcugauuaugaagaaccacuugagggacaucaugggcauaccauauugcaauuacucuaaguauugguaccucaaccacacuacaaccgggaaaacgucccugcccaaguguugguuaguuagcaauggaucguaccugaacgaaacccauuucucugacgauauugagcagcaagcugacaauaugaucacagagaugcuacagaaagaauauauggagcggcaggguaagacuccucucggccugguggaucuuuucguauuuuccaccucauucuacuugaucaguauuuuucugcaccucgugaaaaucccaacacaucgccacauugucgggaagcccugcccuaaaccacaucgacugaaccacaugggaauauguagcugcggccuuuauaagcagccgggugugcccguuaaguggaaaagauga

SEQ ID NO: 1206 - RNA, 1476 nt, Artificial Sequence
  derived and/or modified protein sequence (opt3) from LASV(G2295-SLE-2012;Clade IV)__AIT17262__GPC
augggccagaucgugaccuucuuucaagaggucccccacguuauugaagaggugaugaacauaguacugaucgcccucagcauucuugcugugcugaagggguuguacaauuuagcaacaugcggacuggucggucuagugacuuuccuccugcuuuguggcagauccugcacgaccucucuguauaaagggguuuacgaauugcagacacucgagcugaacauggaaacucugaauaugaccaugccucucucauguacaaagaacaauagucaucacuauaucauggugggaaacgagaccggcuuagagcugacucuuacaaauaccagcauuaucaaccauaaauuuugcaauuuguccgacgcccacaagaaaaaccuguacgaucaugcgcuaaugucuauaaucucgacguuccaccucucaauuccaaauuuuaaccaguaugaagcuaugagcugugacuucaauggugggaagaucaguguccaguacaaccugucccacucuuaugccggagaugcagccacucauugcggcaccguggcuaauggcguacuucaaacauuuaugaggauggcauggggagggagcuacauugcccuggacuccggucggggcaagugggauuguaucaugacuucauaccaguauuugauaauucagaacaccacaugggaggaccacugccaguucagucgcccgagccccaucggguaccucggacuguuaucucaacgaacccgugauauuuauaucuccagaaggcugcucggcacguuuacuuggacacuuucagacagcgaagguaaagauaccccugggggauacugucugacucgguggauguugaucgaggcugagcuaaagugcuucggcaacacagccguugcgaaauguaaugaaaagcaugacgaggaauuuugcgauaugcugcgccucuucgacuuuaacaaacaggcaauucagagacugaagaccgaggcccagaugaguauacaacuuaucaauaaggcugugaacgcccugauuaaugaucaguugaucaugaaaaaccaccucagggacauaaugggcauuccauauugcaauuacucuaaguauugguaccugaaccacacgaccacagggaaaacuuccuuaccccgguguuggcuggucagcaauggaucguaccuaaacgaaacccauuucucugacgauaucgagcagcaagcagacaauaugaucacagagaugcuccagaaggaauauauggagcgccaggguaaaacuccucugggccuuguggauuuguucguguuuuccaccucauucuaccugauuaguaucuuucuccaccuggucaagauuccaacacaucgacacauaguugggaaacccugcccuaagccacauagacuuaaccacaugggaaucuguagcugcggccuguauaagcagccgggugugcccguaaaauggaagagguga

SEQ ID NO: 1207 - RNA, 1476 nt, Artificial Sequence
  derived and/or modified protein sequence (opt3) from LASV(G2315-SLE-2012;Clade IV)__AIT17266__GPC
augggccagaucgugaccuucuuucaagaggucccccacguuauugaagaggugaugaacauaguacugaucgcccucagcauucuugcugugcugaagggguuguacaauuuagcaacaugcggacuggucggucuagugacuuuccuccugcuuuguggcagauccugcacgaccucucuguauaaagggguuuacgaauugcagacacucgagcugaacauggaaacucugaauaugaccaugccucucucauguacaaagaacaauagucaucacuauaucauggugggaaacgagaccggcuuagagcugacucuuacaaauaccagcuugauuaaccauaaauuuugcaaucuguccgacgcccacaagaaaaaccuauacgaucaugcgcucaugucuaucauaucgacguuccaccugucaaucccaaauuuuaaccaguaugaagcuaugagcugugacuucaauggugggaagauuaguguccaguacaaccuuucccacucuuaugccguggaugcagccaaucauugcggaacuguagcuaacggcguucugcaaaccuuuaugaggauggcauggggcgggagcuacaucgccuuggacuccggacgggguggcugggauuguauuaugacaucauaccaguaucucaucauacagaacacuaccugggaggaccacugccaguucagucgcccgagccccauuggguaccugggauuacugucucaacgaacacgugauaucuauauuuccagaaggcuccuuggcaccuuuacguggacucugucagacagcgaagguaaggauacaccugggggauacuguuugacccgguggaugcuaaucgaggcugagcugaaaugcuucggcaauacugccguggcgaaguguaacgaaaaacaugacgaggaauuuugcgauaugcuccgccuguucgacuuuaauaagcaggcaauccagagacuuaaagccgaggcucagaugaguauucaacugauaaacaaggccgucaaugcauugaucaacgaucagcucauuaugaagaaucaccugagggacaucaugggcauaccauauugcaacuacucuaaauauugguacuuaaaucacacaaccacggggcggaccucccugccccgcuguuggcuagugagcaacggaucguaccucaaugaaacacauuucucugacgauauugagcagcaagcugacaacaugaucacugagaugcugcagaaggaauauauggagcgacaggguaaaaccccucuuggcuugguggaucuguucgucuuuuccacaucauucuaccucaucaguauuuuucugcaccuuguuaagaucccaacucauagacacauuguggggaaaagcugccccaagccucauaggcugaaucacaugggaauauguuccugcggcuuguauaaacagccagguguaccggugaaguggaagcgguga

SEQ ID NO: 1208 - RNA, 1476 nt, Artificial Sequence
  derived and/or modified protein sequence (opt3) from LASV(G2318-SLE-2012;Clade IV)__AIT17270__GPC
augggccagaucgugaccuucuuucaagaggucccccacguuauugaagaggugaugaacauaguacugaucgcccucagcgugcuugcuguccugaagggguuguacaauuucgcaacaugcggauuagugggucugguuacuuuucuacuccuguguggcagauccugcucuacgucaguguauaaaggggucuacgaacuucagacccuggaguugaacauggaaacacucaauaugacuaugccucugaguuguaccaagaacaauagccaucacuauauuauggugggaaacgagacaggccuggagcucaccuuaacuaauacauccaucauuaaccauaaauucugcaaucugucugacgcccacaagaaaaaccuuuacgaucaugcguugaugucgaucauaucaaccuuucaccugagcaucccaaauuucaaccaguaugaagcuaugaguugugacuuuaauggugggaagauuuccguacaguacaaccuaucucacagcuaugccguugaugcagccaaucauugcggaacgguggcuaacggcguccuccaaacuuucaugaggauggcauggggcggguccuacaucgcccuggacucaggacacgguggcugggauuguauuaugaccaacuaccaguaucuuaucauacagaauacaacuugggaggaccauugccaguuuagucggccgagccccauuggguaccugggauugcucucucaacgcacccgagauaucuauauuucccguagacuguuaggcacauucaccuggacgcugucagacagcgaagguaaggauacuccugggggauacugucucacaagguggaugcuuaucgaggcugagcugaaaugcuuuggcaacaccgccguggcgaaguguaaugaaaaacacgacgaggaguucugcgauauguugcggcuauuugacuucaacaagcaggcaauccagcgccugaaagccgaagcucagaugaguauucaacucauaaauaaggccgugaacgcacugaucaaugaucagcuuauuaugaagaaccaccugagagacaucaugggcauaccauauugcaauuacucuaaauauugguacuugaaccauacuacaaccgggaggacgucccuccccaaguguuggcuggucagcaauggaucguacuuaaacgaaacccacuucucugacgauauugagcagcaagcugacaauaugaucacagagaugcugcagcgggaauauauggagcgccaggguaaaacuccucuaggccucguugaucuguuuguguucuccaccucauuuuaccuuaucaguauuuucuugcaucugguaaagaucccaacacaccgacauauuguggggaaaagcugccccaagccucacagacucaaccacaugggaauauguuccugcggccuguauaaacagccaggugucccggugaaguggaagagguga

SEQ ID NO: 1209 - RNA, 1476 nt, Artificial Sequence
  derived and/or modified protein sequence (opt3) from LASV(G2363-SLE-2012;Clade IV)__AIT17274__GPC
augggccagaucgugaccuucuuucaagaggucccccacguuauugaagaggugaugaacauaguacugaucgcccucagcauucuugcugugcugaagggguuguacaaugucgcaacaugcggauuaacuggucugguggccuuccuacuccuguguggcagauccugcacgaccacacuuuauaaagggguuuacgaacugcaggcguuggagcucaacauggaaacucugaauaugaccaugccucugucuuguacaaagaacaauucacaucacuauaucagggugggaaacgagaccggccucgaguuaacucugacaaauaccaguauuaucgaacaucgguuuugcaaccuuagcgacgcucacaaaaagaauuuguacgaucaugcccugauguccauaaucucuacguuccaccuaucgauuccaaacuuuaaucaguaugaggcaaugucaugugacuucaacggugggaaaaucagcguccaguacaaucucagucacuccuaugccguggaugcugcaaaccauugcggaacuguagccaauggcguucugcaaaccuuuaugcgcauggcuuggggcgggucuuacauugcccuugacagcggacgaaacgguugggauuguaucaugacauccuaccaguaucugauaauucagaacacuaccugggaagaccacugccaguucucacguccgagucccaucggcuacuuggggcuccugagccaaagaacaagggauauuuauaucucucggcgcuuacugggaaccuuuacguggacucucuccgacucagagggcaaggauacaccugguggguacugucuuaccagauggaugcugaucgaggcggaauugaagugcuucggaaauacugcaguggccaaauguaacgagaagcaugacgaagaguuuugcgauaugcuaaggcuguucgacuuuaauaaacaggcuauucagcggcucaaggccgaagcacagaugagcauacaacugaucaacaaagcugucaaugcccuuauuaacgaucagcugaucaugaagaaucacuugcgcgacauaaugggcauuccauauugcaacuacaguaaguauugguaccucaauaacacagcgaccggcaaaacgucucugccccgauguugguuaguguccaaugggagcuaccugaacgagacccacuucucggacgauaucgagcagcaagccgacaauaugaucacagaaaugcuacagaaggaguauauggaaagacagggaaaaacuccucucggucugguggaucuuuucgucuuuucuaccuccuucuacuugauuucaaucuuucugcaucucguuaagauuccaacacacaggcauauagugggcaaacccugcccuaagccacaccggcugaaccauauggggaucuguaguugcggacuuuauaaacagccgggcgcacccguacguuggaagcgcuga

SEQ ID NO: 1210 - RNA, 1476 nt, Artificial Sequence
  derived and/or modified protein sequence (opt3) from LASV(G2384-SLE-2012;Clade IV)__AIT17276__GPC
augggccagaucgugaccuucuuucaagaggucccccacguuauugaagaggugaugaacauaguacugaucgcccucagcauucuugcugugcugaagggguuguacaauuucgcaacaugcggauuagucggucuggugacuuuucuacuccuguguggcagauccugcacgaccucucuuuauaaagggguuuacgaacugcagacauuggagcucaacauggaaacucugaauaugaccaugccucugucauguacaaagaacaauagucaucacuauaucauggugggaaacgagaccggccucgaguuaacucugacaaauaccagcauuaucaaccauaaauucugcaaucuuuccgacgcccacaagaaaaacuuguacgaucaugcgcugaugucuauaaucucgacguuucaccuaucaauuccaaauuucaaccaguaugaagcuaugagcugugacuuuaauggugggaagaucaguguccaguacaaccucucccacucuuaugccggagaugcagccaaucauugcggcacuguggcuaacggcguacugcaaaccuucaugaggauggcauggggagggagcuacauugcccuugacuccggucacggcaagugggauuguaucaugacaucauaccaguaucugauaauucagaacacuaccugggaggaccauugccaguuuagucggccgagccccaucggguacuugggacuccugucucaacgcacacgagauauuuauaucucccguagauuacugggcaccuucacguggacucucucagacagcgaagguaaagauacaccugggggauacugucuuaccagguggaugcugaucgaggcugaguugaagugcuuuggcaauacugccguugcgaaauguaacgaaaagcacgacgaggaguucugcgauaugcuacggcuguuugacuucaauaaacaggcaauucagcgccucaaggccgaagcucagaugaguauacaacugaucaacaaggccgugaaugcacuuauuaacgaucagcugaucaugaaaaaucacuugagagacauaaugggcauuccauauugcaacuacucuaaguauugguaccucaaucauacaaccacggggaaaaccucccugcccaaguguugguuagucagcaacggaucguaccugaaugaaacacacuucucugacgauaucgagcagcaagcugacaacaugaucacugagaugcuacagaaagaauauauggagaggcaggguaagaccccucucggccugguggaucuuuuuguguucuccacaucauuuuacuugauuaguaucuuccugcaucucgucaaaauuccaacucaccggcauauaguuggaaagagcugccccaagccucaccgccugaaucacauggggaucuguuccugcggccuuuauaaacagccaggugugccgguacgauggaagagauga

SEQ ID NO: 1211 - RNA, 1473 nt, Artificial Sequence
  derived and/or modified protein sequence (opt3) from LASV(G2392-SLE-2012;Clade IV)__AIT17280__GPC
augggccagaucgugaccuucuuucaagaggucccccacguuauugaagaggugaugaacauaguacugaucgcccucagcauucuugcugugcugaagggguuguacaauuucgcaacaugcggauuagucggucuggugacuuuucuacuccuguguggcagauccugcacgaccucucuuuauaaagggguuuacgaacugcagacauuggagcucaacauggaaacucugaauaugaccaugccucugucauguacaaagaacaauagucaucacuauaucagggugggaaacgagaccggccucgaguuaacucugacaaauaccagcauuaucgaccauaaauucugcaaccuuuccgaugcccacaagaaaaauuuguacgaccaugcgcugaugucuauaaucucgacguuucaccuaucaauuccaaacuucaaucaguaugaagcuaugagcugugauuuuaacggugggaagaucaguguccaguacaaucucucccacucuuaugccggagacgcagccaaccauugcggcacuguggcuaauggcguacugcaaaccuucaugcggauggcauggggagggagcuacauugcccuugauuccggucacgagugggacuguaucaugacaucauaccaguaucugauaauucagaacacuaccugggauaaccauugccaguuuagucgcccgagccccaucggcuacuuggggcuccugucucaacgaacacgugacauuuauaucuccagaagguuacugggaaccuucacguggacucucucagauagcgaaggcaaggacacaccugguggguacugucuuacccgguggaugcugaucgaggcugaguugaaaugcuuuggaaauacugccguugcgaaguguaacgaaaaacacgaugaggaguucugcgacaugcuacgccuguuugauuucaauaagcaggcaauucagagacucaaaguggaagcccagaugaguauacaacugaucaacaaggcugucaaugcccuuauuaacgaccagcugaucaugaagaaucacuugagggacauaaugggcauuccauauugcaacuacucuaaauauugguaccucaaucauacaaccacgggcaagaccucccugcccaaauguugguuagugagcaacgggucguaccugaaugaaacacacuucucugaugacaucgagcagcaagcagauaacaugaucacugagaugcuacagaaggaauauauggagcggcagggaaaaaccccucucggucugguggaccuuuuugucuucuccacaucauuuuacuugauuaguaucuuccugcaucucguuaagauuccaacucaccgccauauagugggcaaaagcugccccaagccucaccgacugaaucacauggggaucuguuccugcggauuuuauaagcagccaggcguaccggugaaauggaagagauga

SEQ ID NO: 1212 - RNA, 1476 nt, Artificial Sequence
  derived and/or modified protein sequence (opt3) from LASV(G2405-SLE-2012;Clade IV)__AIT17284__GPC
augggccagaucgugaccuucuuucaagaggucccccacguuauugaagaggugaugaacauaguacugaucgcccucagcgugcuugcuguccugaagggguuguacaauuucgcaacaugcggaauuguggguuuaguuacuuuucugcuacucuguggcagauccugcacgaccucucuguauaaagggguguacgaacuucagacacuggaguugaacauggaaacucucaauaugaccaugccucugucauguacaaagaacaauagucaucacuauaucauggucggaaacgacaccggccuggagcucacuuuaacaaauaccagcauuaucaaccauaaauucugcaaucuguccgaugcccacaagaaaaaccuuuacgaccaugcguugaugucuauaaucucgacguuucaccugucaauuccaaauuucaaccaguaugaggcuaugagcugugauuuuaauggugggaagaucagugugcaguacaaccuaucccacucuuaugccggagacgcagccgaucauugcggcacuguagcuaauggcguucuccaaaccuucaugaggauggcauggggagggagcuacauugcccuggacuccggucggggccgcugggauuguaucaugacaucauaccaguaucuuauaauucagaacacuaccugggaagaccacugccaguuuagucgaccgagccccaucggguaccugggauugcucucucaacguacaagagauauuuauaucuccaggcggcuguuaggcaccuucacguggacucugucagacagcgaggguaaggauacaccugggggauacugucucacccgcuggaugcuuaucgaagcugagcugaaaugcuuuggcaacacugccguggcgaaguguaaugagaaacaugacgaagaguucugcgauauguugagacuauuugacuucaacaagcaggcaauucagaggcugaaagccgaagcucagaugaguauacaacucaucaauaaggccgucaacgcacugauuaaugaccagcuuaucaugaagaaccaucugcgggauauaaugggcauuccauauugcaauuacucuaaauauugguacuugaaccacacaaccacggggaagaccucccuccccaaauguuggcuggugagcaauggaucguacuuaaacgagacacacuucucugacgauaucgaacagcaagcugacaauaugaucacugagaugcugcagaaggaguauauggaacgccaggguaaaaccccucuaggccucguggaucuguuugucuucuccacaucauuuuaccuuauuaguaucuucuugcaccugguuaagauuccaacucaucgacacauaguggggaaacccugcccuaagccacauagacucaaccacaugggaaucuguagcugcggccuguauaagcagccggguguacccgugaaauggaagagguga

SEQ ID NO: 1213 - RNA, 1476 nt, Artificial Sequence
  derived and/or modified protein sequence (opt3) from LASV(G2427-SLE-2012;Clade IV)__AIT17288__GPC
augggccagaucgugaccuucuuucaagaggucccccacguuauugaagaggugaugaacauaguacugaucgcccucagcauucuugcugugcugaagggguuguacaauuucgcaacaugcggauuagucggucuggugacuuuucuacuccuguguggcagauccugcacgaccucucuuuauaaagggguuuacgaacugcagacauuggagcucaacauggaaacucugaauaugaccaugccucugucauguacaaagaacaauagucaucacuauaucauggugggaaacgagaccggccucgaguuaacucugacaaauaccagcauuaucaaccauaaauucugcaaucuuuccgacgcccacaagaaaaacuuguacgaucaugcgcugaugucuauaaucucgacguuucaccuaucaauuccaaauuucaaccaguaugaagcuaugagcugugacuuuaauggugggaagaucaguguccaguacaaccucucccacucuuaugccguggaugcagccaaucauugcggaacuguagcuaacggcguucugcaaaccuucaugaggauggcauggggcgggggauacauugcccuugacagcggucggggcaacugggauuguaucaugacauccuaccaguaucugauaauucagaauacuaccugggaggaccacugccaguuuucacgcccgagucccaucggguacuugggacuccugagccaacgaacacgugauauuuauaucucuagaagguuacugggcaccuucacguggacucucuccgacucagaagguaaggauacaccugggggauacugucuuacccgguggaugcugaucgaggcugaguugaaaugcuuuggcaacacugccguggcgaaguguaaugaaaaacaugacgaggaguucugcgauaugcuacgccuguuugacuucaacaagcaggcaauucagagacucaaagccgaagcucagaugagcauacaacugaucaauaaggccgucaacgcacuuauuaaugaucagcugaucaugaagaaccacuugagggacauaaugggcauuccauauugcaauuacaguaaauauugguaccucaaccacacagugaccgggaagacgucucugcccaaauguugguuaguguccaauggaagcuaccugaacgaaacccauuucucggacgauaucgagcagcaagcugacaauaugaucacagagaugcuacagaaggaauauauggagcggcaggguaaaacuccucucggccuggucgaucuuuuuguuuucucuaccuccuuuuacuugauuucaaucuuccugcaccucgugaagauuccaacacaucgccacauaguagggaaaaguugccccaagccucaucgacugaaccacaugggaaucuguagcugcggccuuuauaagcagccaggugugccggucagauggaaaagguga

SEQ ID NO: 1214 - RNA, 1476 nt, Artificial Sequence
  derived and/or modified protein sequence (opt3) from LASV(G2431-SLE-2012;Clade IV)__AIT17292__GPC
augggccagaucgugaccuucuuucaagaggucccccacguuauugaagaggugaugaacauaguacugaucgcccucagcauuauggcugugcuuaaggggcuguacaauaucgcaacaugcggauuggucgguuuagugacuuuccugcuacucuguggcagauccugcacgaccacacuguauaaagggguuuacgaacuucagacucuggaguugaacauggaaacccucaauaugacaaugccucugucuuguaccaagaacaauucacaucacuauauuauggugggaaacgagacuggccuggagcucacauuaaccaauacgaguaucauaaaccauaaauuuugcaaucugagcgacgcccacaagaaaaaccuuuacgaucaugcguugauguccaucauuucuacuuuccaccugucgaucccaaauuuuaaccaguaugaagcuaugucaugugacuucaauggugggaagauuagcguccaguacaaccuaagucacuccuaugccggagaugcagccaaucauugcggcaccguggcuaacggcguacuccaaacauuuaugaggauggcauggggagggucuuacaucgcccuggacagcggucacggcgggugggauuguauaaugacuuccuaccaguaucuuauuauccagaacaccacaugggaggaccauugccaguucacccggccgucacccauuggauaccugggcuugcucagucaacgcacgcgagauaucuauaucagccguagacuguuagguacuuuuacauggacccugucugacuccgaagggaaugauacuccuggaggcuacugucucacaagguggaugcuuauugaggcugagcugaagugcuucggcaacaccgccguugcgaaauguaaugaaaagcacgacgaggaauuuugcgauauguugcggcuauucgacuuuaacaaacaggcaauacagcgccugagagccgaggcucagaugucaauccaacucauuaauaaggccgugaacgcacugaucaaugaucagcuuauaaugaaaaaccaccugagggacauuauggggaucccauauugcaauuacagcaaguauugguacuugaaccauacgaccacaggacggaccagucucccccgcuguuggcuggucucuaaugguuccuacuuaaacgaaacucacuucagcgacgauaucgagcagcaagcugacaauaugauuacagagaugcugcagaaggaauauauggagcgacagggcaaaacuccucuagggcucguggaucuguucguguuuucgaccucuuucuaccuuaucuccauauuuuugcaucugauuaagaucccaacacacagacauauugucggaaaacccugcccuaagccacacaggcucaaccacaugggcguuuguucaugcggucuguauaaacagccgggggugcccguacgguggaagcguuga

SEQ ID NO: 1215 - RNA, 1476 nt, Artificial Sequence
  derived and/or modified protein sequence (opt3) from LASV(G2511-SLE-2012;Clade IV)__AIT17294__GPC
augggccagaucgugaccuucuuucaagaggucccccacguuauugaagaggugaugaacauaguacugaucgcccucagcauucuugcugugcugaagggguuguacaauuuagcaacaugcggacuggucggucuagugacuuuccuccugcuuuguggcagauccugcacgaccucucuguauaaagggguuuacgaauugcagacacucgagcugaacauggaaacucugaauaugaccaugccucucucauguacaaagaacaauagucaucacuauaucauggugggaaacgagaccggcuuagagcugacucuuacaaauaccagcauuaucgaccauaaauuuugcaacuuguccgaugcccacaagaaaaaucuguacgaccaugcgcuaaugucuauaaucucgacguuccaccucucaauuccaaacuuuaaucaguaugaagcuaugagcugugauuucaacggugggaagaucaguguccaguacaaucugucccacucuuaugccggagacgcagccaaccauugcggcacuguggcuaauggcguacuucaaaccuuuaugaggauggcauggggagggagcuacauugcccuggauuccggucggggcgggugggacuguaucaugacaucauaccaguauuugauaauucagaacacuaccugggaggaucacugccaguucagucgcccgagccccguuggauaccucggccuguuaucucaacgaacacgugacaucuauauuuccagaaggcugcucgguaccuuuacguggacucuuucagauagcgaagggaaggacacaccuggaggcuacugucugacccgguggauguugaucgaggcugagcuaaaaugcuucggcaacacugccguggcgaaguguaaugaaaaacaugaugaggaauuuugcgacaugcugcgccucuucgauuuuaacaagcaggcaauccagagacugaaaacagaggcccagaugaguauucaacuuauaaauaaggcugucaacgcccugaucaaugaccaguugauuaugaagaaccaccucagggacaucauggggauaccauauugcaauuacucuaaauauugguaccugaaccacaccacgaccggaaagacauccuuaccccgguguuggcuggugagcaaugguucguaccuaaacgaaacucauuucucugaugacauugagcagcaagcagauaauaugaucaccgagaugcuccagaaagaauauauggagcgccagggcaagacaccucuggggcuuguggacuuguucgucuuuuccacuucauucuaccugaucaguauuuuucuccaccugguuaaaaucccaacccaucgacacauugugggaaagcccugcccuaaaccacauagacuuaaccacaugggcauauguagcugcggucuguauaagcagccggggguacccgugaaguggaaaagguga

SEQ ID NO: 1216 - RNA, 1476 nt, Artificial Sequence
  derived and/or modified protein sequence (opt3) from LASV(G2554-SLE-2012;Clade IV)__AIT17298__GPC
augggccagaucgugaccuucuuucaagaggucccccacguuauugaagaggugaugaacauaguacugaucgcccucagcauucuugcugugcugaagggguuguacaauaucgcaacaugcggauuacugggucuagucuguuuccuccugcuuugcggcagauccuguacuacgucucuguauaaagggguguacgaauugcagacccucgagcugaacauggaaacacugaauaugacuaugccucucucaugcaccaagaacaauagucaucacuauauuaugguuggaaacgagacaggcuuagagcugacccuuacuaauacaagcaucauaaaccauaaauuuuguaauuuguccgacgcccacaagaaaaaccuguacgaucaugcgcuaaugucuaucauuucgaccuuccaccucucaaucccaaauuuuaaccaguaugaagcuaugagcugcgacuucaauggugggaagauuagugugcaguacaaccugucccacucuuaugccgucgaugcagccagccauuguggaacgaucgcuaauggcgugcuucaaacuuuuaugaggauggcauggggcggguccuacauagcccuggacucaggacacgguggcugggauugcauuaugaccaguuaccaguauuugaucauucagaacacaacuugggaggaccauugucaguucagccggccgucucccaucggguaccucggacuguuaucccaacgcacccgagauaucuauauuucacguagacugcucggcacauuuaccuggacgcuuagcgacagugaagguaaggauacuccugggggauacugccugacaagguggauguugauagaggcugagcuaaaauguuucggcaacaccgccguagcgaagugcaaugaaaaacacgacgaggaauuuugcgauaugcugcgccucuucgacuuuaacaagcaggcaauccagcggcugaaagccgaggcucagaugucuauucaacuuaucaauaaggccguuaacgcacugauaaaugaucaguugauuaugaagaaccaccucagagacaucaugggcaucccauauuguaauuacuccaaauauugguaccugaaccauacuacaaccgggaagacgagcuuacccaaaugcuggcuggugucgaauggaucuuaccuaaacgaaacccacuucuccgacgauauugagcagcaagcugacaauaugaucacagagaugcuccagaaggaauauauggagaggcaggguaaaacuccucugggccuugucgauuuguucguguuuucaaccaguuucuaccugauuagcauauuucuccaucuggugaagaucccaacacaccggcaugucguugggaaacccuguccuaagccacaccgccuuaaccacaugggaauuugcuccuguggccuguauggucagccgggggugcccguaaaguggaaacgauga

SEQ ID NO: 1217 - RNA, 1476 nt, Artificial Sequence
  derived and/or modified protein sequence (opt3) from LASV(G2557-SLE-2012;Clade IV)__AIT17302__GPC
augggccagaucgugaccuucuuucaagaggucccccacguuauugaagaggugaugaacauaguacugaucgcccucagccuucuggcuguguugaagggguuauacaaugucgcaacaugcggacugauuggucuagugacuuuccuccugcuuuguggcagauccugcacgaccaaccuguauaaagggguuuacgaauugcagacacucgagcugaauauggaaacucugaacaugaccaugccucucucuuguacaaagaauaacucacaucacuauaucauggugggaaaugagaccggcuuagagcugacucuuacaaacaccaguauuaucagccauaaauuuugcaauuuguccgacgcccacaagaaaaaccuguacgaucauacgcuaaugucuauaaucucgacuuuccaccucucaauuccaaauuuuaaccaguaugaagcgaugagcugugacuucaauggugggaagaucaguguccaguacaaccugucccacucuuaugcuguggaugccgcaaaucauugcggaaccguagccaacggcguucuucaaacauuuaugaggauggcuuggggcgggagcuacauugcacuggacuccggacgggguaacugggauuguaucaugacuucauaccaguauuugauaauucagaauaccacaugggaggaccacugccaguucagucgcccgagccccaucggcuaccucgggcuguuaucucaacgaacccgugauauuuauaucuccagaaggcugcucggaacguuuacuuggacacuuucagacagcgaaggcaacgauaccccugguggguacugucugacucgguggauguugaucgaggccgagcuaaagugcuucggaaauacagcuguggccaaauguaacgaaaagcaugacgaggaauuuugcgauaugcugcgccucuucgacuuuaauaaacaggcgauucagagacugaaggcagaggcccagaugaguauacaacuuaucaacaaagcugucaaugcccugauuaacgaucaguugaucaugaagaaucaccucagggacauaaugggcauuccauauugcaacuacucuaaguauugguaccugaaucacaccacgaccggcaaaacauccuuacccaaguguuggcuggugagcaacgggucguaccuaaaugaaacucauuucucugacgauaucgagcagcaagcagacaacaugaucaccgagaugcuccagaaagaauauauggagcggcagggaaagacaccucugggucuuguggauuuguucgucuuuuccacuucauucuaccugauuaguaucuuucuccaccugguuaaaauuccaacccaucgccacauagugggcaagcccugcccuaaaccacaucgacuuaaucacauggggaucuguagcugcggacuguauaagcagccgggcguacccgugagauggaagagguga

SEQ ID NO: 1218 - RNA, 1476 nt, Artificial Sequence
  derived and/or modified protein sequence (opt3) from LASV(G2587-SLE-2012;Clade IV)__AIT17310__GPC
augggccagaucgugaccuucuuucaagaggucccccacguuauugaagaggugaugaacauaguacugaucgcccucagcauucuugcugugcugaagggguuguacaauuuagcaacaugcggacuggucggucuagugacuuuccuccugcuuuguggcagauccugcacgaccucucuguauaaagggguuuacgaauugcagacacucgagcugaacauggaaacucugaauaugaccaugccucucucauguacaaagaacaauagucaucacuauaucauggugggaaacgagaccggcuuagagcugacucuuacaaauaccagcauuaucaaccauaaauuuugcaauuuguccgacgcccacaagaaaaaccuguacgaucaugcgcuaaugucuauaaucucgacguuccaccucucaauuccaaauuuuaaccaguaugaagcuaugagcugugacuucaauggugggaagaucaguguccaguacaaccugucccacucuuaugccggagaugcagccacucauugcggcaccguggcuaauggcguacuucaaacauuuaugaggauggcauggggagggagcuacauugcccuggacuccggucggggcaagugggauuguaucaugacuucauaccaguauuugauaauucagaacaccacaugggaggaccacugccaguucagucgcccgagccccaucggguaccucggacuguuaucucaacgaacccgugauauuuauaucuccagaaggcugcucggcacguuuacuuggacacuuucagacagcgaagguaaagauaccccugggggauacugucugacucgguggauguugaucgaggcugagcuaaagugcuucggcaacacagccguugcgaaauguaaugaaaagcaugacgaggaauuuugcgauaugcugcgccucuucgacuuuaacaaacaggcaauucagagacugaagaccgaggcccagaugaguauacaacuuaucaauaaggcugugaacgcccugauuaaugaucaguugaucaugaaaaaccaccucagggacauaaugggcauuccauauugcaauuacucuaaguauugguaccugaaccacacgaccacagggaaaacuuccuuaccccgguguuggcuggucagcaauggaucguaccuaaacgaaacccauuucucugacgauaucgagcagcaagcagacaauaugaucacagagaugcuccagaaggaauauauggagcgccaggguaaaacuccucugggccuuguggauuuguucguguuuuccaccucauucuaccugauuaguaucuuucuccaccuggucaagauuccaacacaucgacacauaguugggaaacccugcccuaagccacauagacuuaacuauaugggaaucuguagcugcggccuguacaagcagccgggugugcccguaaaauggaagagguga

SEQ ID NO: 1219 - RNA, 1476 nt, Artificial Sequence
  derived and/or modified protein sequence (opt3) from LASV(G2612-SLE-2012;Clade IV)__AIT17314__GPC
augggccagaucgugaccuucuuucaagaggucccccacguuauugaagaggugaugaacauaguacugaucacacucagcauucuugccgugcugaagggguuguacaaugucgcuacuugcggauuagugggucugguuacguuccuacuccuguguggcagauccugcaccacaucucuuuauaaagggguguacgaacugcagacuuuggagcucaacauggaaacccugaauaugacaaugccucugucauguaccaagaacaauagucaucacuauaucauggucggaaacgagacuggccucgaguuaacacugaccaauacgagcauuaucaaccauaaauuuugcaaucuuuccgacgcacacaagaaagauuuguacgaccaugcccugaugucuauaaucucgacuuuccaccuaucaauuccaaacuuuaaucaguaugaagcgaugagcugugauuucaacggugggaagaucagugugcaguacaaucucucccacucuuaugcuguagacgccgcaaaccauugcggaaccguugccaauggcgugcugcaaacauuuaugaggauggcuuggggcgggagcuacauugcacuugauuccggacgggguggcugggacuguaucaugacuucauaccaguaucugauaauucagaacaccacaugggaggaucacugccaguucagucgcccgagccccaucggguacuugggacuccugucucaacgaacccgugacauuuauaucuccagaagguuacugggcacguuuacuuggacacucucagauagcgaagguaacgacaccccugggggauacugucuuacucgguggaugcugaucgaggccgaguugaagugcuucggcaauacagcugucgccaaauguaacgaaaagcaugaugaggaauuuugcgacaugcuacgccuguucgauuuuaauaaacaggcgauucagagacucaaggcagaggcccagaugaguauacaacugaucaacaaagcugugaaugcccuuauuaacgaccagcugaucaugaagaaucacuugagggacauaaugggcauuccauauugcaacuacucuaaguauugguaccucaaucacaccacgaccgggaaaacaucccugcccaaguguugguuagugagcaacggaucguaccugaaugaaacucauuucucugaugacaucgagcagcaagcagauaacaugaucaccgagaugcuacagaaagaauauauggagcggcaggguaagacaccucucggccuggucgaccuuuucguguuuuccacuucauucuacuugauuaguaucuuucugcaccucguuaaaauuccaacccaucgccacauaguagggaagcccugcccuaaaccacaucgacugaaucacaugggaaucuguagcugcggccuuuauaagcagccgggugugcccgucaaguggaaaagauga

SEQ ID NO: 1220 - RNA, 1476 nt, Artificial Sequence
  derived and/or modified protein sequence (opt3) from LASV(G2615-SLE-2012;Clade IV)__AIT17318__GPC
augggccagaucgugaccuucuuucaagaggucccccacguuauugaagaggugaugaacauaguacugaucgcccucagccuucuggcuguguugaagggguuauacaaugucgcaacaugcggacugauuggucuagugacuuuccuccugcuuuguggcagauccugcacgaccaaccuguauaaagggguuuacgaauugcagacacucgagcugaauauggaaacucugaacaugaccaugccucucucuuguacaaagaauaacucacaucacuauaucauggugggaaaugagaccggcuuagagcugacucuuacaaacaccaguauuaucaaucauaaauuuugcaacuugagcgacgcccacaagaaaaaucuguacgaucaugcgcuaauguccauaaucucuacguuccaccucucgauuccaaacuuuaaucaguaugaagcuaugucaugugacuucaacggugggaagaucagcguccaguacaaucugagucacuccuaugccguggaugcagccaaccauugcggaacuguagcuaacggcguucuucaaaccuuuaugaggauggcauggggcgggucuuacauugcccuggacagcggacgggguaauugggauuguaucaugacauccuaccaguauuugauaauucagaacaucacuugggaggaccacugccaguucucacgcccgagucccauuggcuaccucgggcuguuaagccaacgaacccgugauaucuauaucucuagaaggcugcucggaacauuuaccuggacgcuuuccgacucagaaggcaaugauacuccugguggguacugucugacacgguggauguugauugaggcugagcuaaagugcuucggaaacaccgccguggcgaaauguaaugaaaagcaugacgaggaauuuugcgauaugcugcgccucuucgacuuuaacaaacaggcaauacagagacugaaggccgaggcucagaugagcauccaacuuauuaauaaagccgucaacgcacugaucaaugaucaguugauaaugaagaaccaccucagggacauuaugggcaucccauauugcaauuacaguaaguauugguaccugaaccacacuacaaccggcaaaacgucuuuacccaaguguuggcugguguccaaugggagcuaccuaaacgaaacccauuucucggacgauaucgagcagcaagcugacaauaugauuacagagaugcuccagaaagaauauauggagcggcagggaaagacuccucugggucuuguggauuuguucgucuuuucuaccuccuucuaccugaucucaauuuuucuccaccugguuaaaauaccaacacaucgccacaucgugggcaagcccugcccuaaaccacaucgacuuaaccacauggggauuuguaguugcggacuguauaagcagccgggcguacccgugagauggaagagguga

SEQ ID NO: 1221 - RNA, 1476 nt, Artificial Sequence
  derived and/or modified protein sequence (opt3) from LASV(G2723-SLE-2012;Clade IV)__AIT17322__GPC
augggccagaucgugaccuucuuucaagaggucccccacguuauugaagaggugaugaacauaguacugaucgcccucagccuucuggcuguguugaagggguuauacaaugucgcaacaugcggacugauuggucuagugacuuuccuccugcuuuguggcagauccugcacgaccaaccuguauaaaggggccuacgaauugcagacacucgagcugaauauggaaacucugaacaugaccaugccucucucuuguacaaagaauaacucacaucacuauaucaugguuggaaaugagaccggcuuagagcugacucuuacaaacaccaguauuaucaaucauaaauuuugcaacuugagcgacgcgcacaagaaaaaucuguacgaucauacgcuaauguccauaaucucuacuuuccaccucucgauuccaaacuuuaaucaguaugaagcuaugucaugugacuucaacggugggaagaucagcgugcaguacaaucugagucacuccuaugccgucgaugcagccaaccauugcggaaccguggcuaacggcguacuucaaacauuuaugaggauggcauggggcgggucuuacauugcccuggacagcggacgggguaauugggauuguaucaugacuuccuaccaguauuugauaauucagaacaccacaugggaggaccacugccaguucucacgcccgagucccaucggcuaccucgggcuguuaagccaacgaacccgugauauuuauaucucuagaaggcugcucggaacguuuacuuggacacuuuccgacucagaaggcaaugauaccccugguggguacugucugacucgguggauguugaucgaggcugagcuaaagugcuucggaaacacagccguugcgaaauguaaugaaaagcaugacgaggaauuuugcgauaugcugcgccucuucgacuuuaacaaacaggcaauucagagacugaaggccgaggcucagaugagcauacaacuuaucaauaaagccgugaacgcacugauuaaugaucaguugaucaugaagaaccaccucagggacauaaugggcauuccauauugcaauuacaguaaguauugguaccugaaccacaccacgaccggcaaaacaucuuuacccaaguguuggcuggucuccaaugggagcuaccuaaacgaaacucauuucucggacgauaucgagcagcaagcugacaauaugaucaccgagaugcuccagaaagaauauauggagcggcagggaaagacaccucugggucuuguggauuuguucguguuuucuacuuccuucuaccugauuucaaucuuucuccaccuggucaaaauuccaacccaucgccacauaguuggcaagcccugcccuaaaccacaucgacuuaaccacauggggaucuguaguugcggacuguauaagcagccgggcgugcccguaagauggaagagguga

SEQ ID NO: 1222 - RNA, 1476 nt, Artificial Sequence
  derived and/or modified protein sequence (opt3) from LASV(G2868-SLE-2012;Clade IV)__AIT17328__GPC
augggccagaucgugaccuucuuucaagaggucccccacguuauugaagaggugaugaacauaguacugaucacacucagcauucuugccgugcugaagggguuguacaauaucgcuacuugcggauuagucggucuggugacguuccuacuccuguguggcaaauccugcaccacaucucuuuauaaggggguuuacgaacugcagacuuuggagcucaacauggaaacccugaauaugacaaugccucugucauguaccaaaaacaauagucaucacuauauuagagugggaaacgagacuggccucgaguuaacacugaccaauacgagcaucauaaaccauaaguuuugcaaucuuuccgacgcacacaaaaagaacuuguacgaucaugcccugaugucuaucauuucgacuuuccaccuaucaaucccaaauuuuaaccaguaugaagcgaugagcugugacuucaauggugggaagauuaguguccaguacaaccucucccacucuuaugcuguggaugccgcaaaucauugcggaaccguagccaacggcguucugcaaacauuuaugaggauggcuuggggcgggagcuacaucgcacuugacuccggacacgguaacugggauuguauaaugacuucauaccaguaucugauuauccagaauaccacaugggaggaccauugccaguucagucggccgagccccauuggcuacuuggggcuccugucucaacgcacccgagauaucuauaucucccguagauuacugggaacguuuacuuggacacucucagacagcgaaggcaacgaugccccugguggguacugucuuaccagguggaugcugauugaggcugaguugaaaugcuucggaaauacugccguggcgaaguguaacgaaaaacacgacgaggaauuuugcgauaugcuacggcuguucgacuuuaauaagcaggcaauacagcgccucaaagccgaggcucagaugaguauccaacugauuaacaaggccgucaaugcacuuaucaacgaucagcugauaaugaagaaucacuugagagacauuaugggcaucccauauugcaacuacucuaaauauugguaccucaaucauacaaccacgggcaagaccucccugcccaaauguugguuagugagcaacgggucguaccugaaugaaacacacuucucugacgauaucgagcagcaagcugacaacaugauuacugagaugcuacagaaggaauauauggagaggcagggaaaaaccccucucggucugguggaucuuuucgucuuuuccacaucauucuacuugaucaguauuuuucugcaucucguuaagauaccaacucaccggcaugugguaggcaaaagcugccccaagccucaccgccugaaucacauggggaucuguuccugcggacuuuauaagcagccaggcgugccggucaaauggaagcgauga

SEQ ID NO: 1223 - RNA, 1476 nt, Artificial Sequence
  derived and/or modified protein sequence (opt3) from LASV(G2903-SLE-2012;Clade IV)__AIT17332__GPC
augggccagaucgugaccuucuuucaagaggucccccacguuauugaagaggugaugaacauaguacugaucgcccucagcauucuugcugugcugaagggguuguacaauuuagcaacaugcggacuggucggucuagugacuuuccuccugcuuuguggcagauccugcacgaccucucuguauaaagggguuuacgaauugcagacacucgagcugaacauggaaacucugaauaugaccaugccucucucauguacaaagaacaauagucaucacuauaucagggugggaaacgagaccggcuuagagcugacucuuacaaauaccagcauuaucaaccauaaauuuugcaauuuguccgacgcccacaagaaaaaccuguacgaucaugcgcuaaugucuauaaucucgacguuccaccucucaauuccaaauuuuaaccaguaugaagcuaugagcugugacuucaauggugggaagaucaguguccaguacaaccugucccacucuuaugccguggaugcagccaaucauugcggaacuguagcuaacggcguucuucaaaccuuuaugcggauggcauggggcgggagcuacauugcccuggacuccggacacggucgcugggauuguaucaugacaucauaccaguauuugauaauucagaacacuaccugggaggaccauugccucuucagucgaccgagccccaucggcuaccugggguuacugucucagcguacaagagauauuuauaucuccaggcggcuccuuggaaccuuuacguggacucugucagacagcgaaggccgcgauacaccugguggguacuguuugaccagauggaugcuaaucgaggcugagcugaagugcuucggaaauacugccguggcgaaauguaacgaaaagcacgacgaggaauuuugcgauaugcucaggcuguucgacuuuaauaaacaagcaauucagcggcuuaaggccgaggcucagaugaguauacagcugaucaacaaagccgucaaugcauugauuaacgaucaacucaucaugaagaaucaucugcgcgacauaaugggcauuccauauugcaacuacucuaaguauugguacuuaaaucacacaaccacgggccgaaccucccugcccagauguuggcuagugagcaacgggucguaccucaaugaaacacacuucucugacgauaucgagcagcaggcugacaacaugaucacugagaugcugcaaaaagaauauauggagaggcagggaaagaccccucuugguuugguggaucuguucgucuuuuccacaucauucuaccucauuaguaucuuucugcaucuuguuaaaauuccaacucaccggcauauagugggcaagagcugccccaaaccucaccgucugaaucacauggggaucuguuccugcggauuguauaagcagccaggcguaccggugaaauggaagcgcuga

SEQ ID NO: 1224 - RNA, 1476 nt, Artificial Sequence
  derived and/or modified protein sequence (opt3) from LASV(G2944-SLE-2012;Clade IV)__AIT17340__GPC
augggccagaucgugaccuucuuucaagaggucccccacguuauugaagaggugaugaacauaguacugaucgcccucagcauucuugcugugcugaagggguuguacaauuucgcaacaugcggauuagucggucuggugacuuuucuacuccuguguggcagauccugcacgaccucucuuuauaaagggguuuacgaacugcagacauuggagcucaacauggaaacucugaauaugaccaugccucugucauguacaaagaacaauagucaucacuauaucauggugggaaacgagaccggccucgaguuaacucugacaaauauuagcaucauaaaccauaaauucugcaaucuuuccgacgcccacaagaaaaacuuguacgaucaugcgcugaugucuaucauuucgaccuuucaccuaucaaucccaaauuucaaccaguaugaagcuaugagcugugacuuuaauggugggaagauuaguguccaguacaaccucucccacucuuaugccggagaugcagccaaucauugcggcacgguggcuaacggcguacugcaaacuuucaugaggauggcauggggagggagcuacaucgcccuugacuccggucggggcgagugggauuguauaaugaccucauaccaguaucugauuauccagaacacaacuugggaagaccacugccaguuuagucgcccgagccccauuggguacuugggacuccugucucaacgaacccgugauaucuauaucuccagaagguuacugggcacauucaccuggacgcucucagacagcgaggguaaggauacuccugggggauacugucuuacacgguggaugcugauugaggcugaauugaaaugcuuuggcaauaccgccguugcgaaguguaacgagaaacaugacgaagaguucugcgauaugcuacgccuguuugacuucaauaagcaggcaauacagagacucaaagccgaagcucagaugaguauccaacugauuaacaaggccgugaaugcacuuaucaacgaucagcugauaaugaagaaucacuugagggacauuaugggcaucccauauugcaacuacucuaaauauugguaccucaaucacacuacaaccgggaagacgucccugcccaaauguugguuagucagcaacggaucguaccugaaugagacccauuucucugacgauaucgagcagcaagcugacaacaugauuacagaaaugcuacagaaggaguauauggaacggcaggguaaaacuccucucggccugguggaucuuuuuguguucuccaccucauuuuacuugaucaguauuuuccugcaccucgucaagauaccaacacaucgccacaucguugggaaacccugcccucgaccacauagacugaaucacaugggaauuuguagcugcggccuuuauaagcagccgggugugcccguaaaguggaaaagguga

SEQ ID NO: 1225 - RNA, 1476 nt, Artificial Sequence
  derived and/or modified protein sequence (opt3) from LASV(G3010-SLE-2013;Clade IV)__AIT17344__GPC
augggccagaucgugaccuucuuucaagaggucccccacguuauugaagaggugaugaacauaguacugaucgcccucagcauucuugcugugcugaagggguuguacaauuucgcaacaugcggauuagucggucuggugacuuuucuacuccuguguggcagauccugcacgaccucucuuuauaaagggguuuacgaacugcagacauuggagcucaacauggaaacucugaauaugaccaugccucugucauguacaaagaacaauagucaucacuauaucauggugggaaacgagaccggccucgaguuaacucugacaaauaccagcauuaucaaccauaaauucugcaaucuuuccgacgcccacaagaaaaacuuguacaaucaugcgcugaugucuauaaucucgacguuucaccuaucaauuccaaacuucaaucaguaugaagcuaugagcugugauuuuaacggugggaagaucaguguccaguacaaucucucccacucuuaugccggagacgcagccagccauugcggcacuguggcuaacggcguacugcaaaccuucaugaggauggcauggggaggguccuacauugcccuugauucagguuacggcaagugggacuguaucaugacaaguuaucaguaccugauaauucagaacacuaccugggaggaucacugccaguuuagccggccgucucccaucggguauuugggacuccugucccaacgcacacgagacauuuacaucucacguagauuacugggcaccuucacguggacucucagcgauagugaagguaaagacacaccugggggauauugucuuaccagguggaugcugaucgaggcugaguugaagugcuuuggcaauacugccguugcgaaauguaacgaaaagcaugaugaggaguucugcgacaugcuacggcuguuugauuucaauaaacaggcaauucagcgccucaagacagaagcccagaugucuauacaacugaucaacaaggcugugaaugcccuuauuaacgaccagcugaucaugaaaaaucacuugagagauauaaugggcauuccauacugcaacuauuccaaguacugguaccucaaucacaccacgaccgggaaaacaagccugcccaaguguugguuagucucgaacggaucuuaucugaaugaaacucauuucuccgacgacaucgagcagcaagcagauaacaugaucaccgagaugcuacagaaagaauacauggagaggcaggguaagacaccucucggccugguggaccuuuuuguguucucaaccaguuuuuauuugauuagcaucuuccugcaccucgucaaaauuccaacucaucggcacauaguugggaaguccugccccaagccucaucgccugaaucacaugggaaucuguucuugcggccuuuacaaacagccaggugugccgguacgauggaagagauga

SEQ ID NO: 1226 - RNA, 1476 nt, Artificial Sequence
  derived and/or modified protein sequence (opt3) from LASV(G3016-SLE-2013;Clade IV)__AIT17348__GPC
augggccagaucgugaccuucuuucaagaggucccccacguuauugaagaggugaugaacauaguacugaucgcccucagcauucuugcugugcugaagggguuguacaauaucgcaacaugcggauuaauuggucuggucacuuuccuacuccuguguggcagauccugcacgaccucucuuuauaaagggguguacgaacugcagacauuggagcucaacauggaaacucugaauaugaccaugccucugucauguacaaagaacaauagucaucacuauaucaugguuggaaacgagaccggccucgaguuaacucugacaaauaccagcauaaucaaccauaaauuuugcaaucuuuccgacgcccacaagaaaaacuuguacgaucaugcgcugaugucuauuaucucgacguuccaccuaucaauuccaaauuuuaaccaguaugaagcuaugagcugugacuucaauggugggaagaucagugugcaguacaaccucucccacucuuaugccggagaugcagccaaucauugcggcacugucgcuaacggcgugcugcaaaccuuuaugaggauggcauggggagggagcuacauagcccuugacuccggucggggccgcugggauuguauuaugacaucauaccaguaucugaucauucagaacacuaccugggaggaccacugccaguucagucgaccgagccccaucggguacuugggacuccugucucaacguacaagagauaucuauauuuccaggcgguuacugggcaccuuuacguggacucucucagacagcgaagguaaugauacaccugggggauacugucuuacccgcuggaugcugauagaggcugaguugaagugcuucggcaacacugccguagcgaaauguaaugaaaagcaugacgaggaauuuugcgauaugcuaagacuguucgacuuuaacaaacaggcaauccagaggcucaaggccgaggcucagaugaguauucaacugaucaauaaagccguuaacgcacuuauaaaugaucagcugauuaugaagaaccacuugcgggacaucaugggcaucccauauugcaauuacucuaaguauugguaccucaaccacacaaccacggggaaaaccucccugcccaaguguugguuagugagcaauggaucguaccugaacgaaacacauuucucugacgauauugagcagcaagcugacaauaugaucacugagaugcuacagaaagaauauauggagcgccaggguaagaccccucucggccuggucgaucuuuucguguuuuccacaucauucuacuugauuaguauauuucugcaccucgugaaaaucccaacucaucgacacauugucgggaagcccugcccuaaaccacauagacugaaccacaugggaaucuguagcugcggccuuuauaagcagccggguguucccgugaaguggaaaagguga

SEQ ID NO: 1227 - RNA, 1476 nt, Artificial Sequence
  derived and/or modified protein sequence (opt3) from LASV(G3034-SLE-2013;Clade IV)__AIT17350__GPC
augggccagaucgugaccuucuuucaagaggucccccacguuauugaagaggugaugaacauaguacugaucgcccucagcauucuugcugugcugaagggguuguacaaugucgcaacaugcggauuaaucggucuggugacuuuccuacuccuguguggcagauccugcacgaccacacuuuauaaagggguuuacgaacugcaggccuuggagcucaacauggaaacucugaauaugaccaugccucugucuuguacaaagaacaauucacaucacuauauuauggugggaaacgagaccggccucgaguuaacucugacaaauaccaguaucauagaccauaaauuuugcaaccuuagcgaugcgcacaagaaaaauuuguacgaccaugcucugauguccaucauuucuacguuccaccuaucgaucccaaacuuuaaucaguaugaagccaugucaugugauuucaacggugggaagauuagcguccaguacaaucucagucacuccuaugcaggagacgccgcuaagcauugcggcacuguggcaaacggcguacugcaaaccuuuaugaggauggccuggggagggucuuacaucgcucuugauagcggucggaauggcugggacuguguuaugacauccuaccaguaucugauaauucagaacacuaccugggaggaucacugccaguucucacgcccgagucccaucggguacuugggacuccugagccaacgaacacgugacauuuauaucucuagaagguuacugggcaccuuuacguggacucucuccgauucagaagguaaagacacaccugggggauacugucuuacccgguggaugcugaucgaggccgaguugaagugcuucggcaacacugcgguggcaaaauguaaugaaaagcaugaugaggaauuuugcgacaugcuacgccuguucgauuuuaacaaacaggccauucagagacucaagacagaggcucagaugagcauacaacugaucaauaaggccgucaacgcacuuauuaaugaccagcugaucaugaaaaaccacuugagggacauaaugggcauuccauauugcaauuacaguaaguauugguaccucaaccacaccgugacggggaaaaccucucugccccgguguugguuaguguccaauggaagcuaccugaacgaaacacauuucucggaugacaucgagcagcaagcugauaauaugaucacugagaugcuacagaaggaauauauugagcgccaggguaaaaccccucucggccuggucgaccuuuucguguuuucuacauccuucuacuugaucucaauuuuucugcaccucguuaagauaccaacucaucgacacaucauugggaaacccugcccuaagccacauagacugaaccacaugggaaucuguaguugcggccuuuauaagcagccggguguacccgugagguggaaacgguga

SEQ ID NO: 1228 - RNA, 1476 nt, Artificial Sequence
  derived and/or modified protein sequence (opt3) from LASV(G3101-SLE-2013;Clade IV)__AIT17354__GPC
augggccagaucgugaccuucuuucaagaggucccccacguuauugaagaggugaugaacauaguacugaucgcccucagcauucuugcugugcugaagggguuguacaauuucgcaacaugcggauuagucggucuggugacuuuucuacuccuguguggcagauccugcacgaccucucuuuauaaagggguuuacgaacugcagacauuggagcucaacauggaaacucugaauaugaccaugccucugucauguacaaagaacaauagucaucacuauaucauggugggaaacgagaccggccucgaguuaacucugacaaauauuagcaucauaaaccauaaauucugcaaucuuuccgacgcccacaagaaaaacuuguacgaucaugcgcugaugucuaucauuucgaccuuucaccuaucaaucccaaauuucaaccaguaugaagcuaugagcugugacuuuaauggugggaagauuaguguccaguacaaccucucccacucuuaugccggagaugcagccaaucauugcggcacgguggcuaacggcguacugcaaacuuucaugaggauggcauggggagggagcuacaucgcccuugacuccggucacggcgggugggauuguauaaugaccucauaccaguaucugauuauccagaacacaacuugggaggaccauugccaguuuagucggccgagccccauuggauacuugggccuccugucucaacgcacccgagauaucuauaucucccguagauuacuggguacauucaccuggacgcucucagacagcgaagggaaggauacuccuggaggcuacugucuuacaagguggaugcugauugaggcugaguugaaaugcuuuggcaauaccgccguugcgaaguguaacgaaaaacacgacgaggaguucugcgauaugcuacggcuguuugacuucaauaagcaggcaauacagcgccucaaagccgaagcucagaugaguauccaacugauuaacaaggccgugaaugcacuuaucaacgaucagcugauaaugaagaaucacuugagagacauuauggggaucccauauugcaacuacucuaaauauugguaccucaaucauacuacaaccggaaagacgucccugcccaaauguugguuagucagcaacgguucguaccugaaugaaacccacuucucugacgauaucgagcagcaagcugacaacaugauuacagagaugcuacagaaggaauauauggagaggcagggcaaaacuccucucgggcugguggaucuuuuuguguucuccaccucauuuuacuugaucaguauuuuccugcaucucgucaagauaccaacacaccggcauaucguuggaaaacccugcccucgcccacaccgacugaaucacaugggcauuuguagcugcggucuuuauaagcagccgggggugcccguaaaguggaaaagauga

SEQ ID NO: 1229 - RNA, 1476 nt, Artificial Sequence
  derived and/or modified protein sequence (opt3) from LASV(G3110-SLE-2013;Clade IV)__AIT17360__GPC
augggccagaucgugaccuucuuucaagaggucccccacguuauugaagaggugaugaacauaguacugaucgcccucagcauucuugcugugcugaagggguuguacaauuucgcaacaugcggauuagucggucuggugacuuuucuacuccuguguggcagauccugcacgaccucucuuuauaaagggguuuacgaacugcagacauuggagcucaacauggaaacucugaauaugaccaugccucugucauguacaaagaacaauagucaucacuauaucagggugggaaacgagaccggccucgaguuaacucugacaaauaccagcauuaucaaccaucgguucugcaaucuuuccgacgcccacaaaaagaacuuguacgaucaugcgcugaugucuauaaucucgacguuucaccuaucaauuccaaauuucaaccaguaugaagcuaugagcugugacuuuaauggugggaaaaucaguguccaguacaaccucucccacucuuaugccggagaugcagccaaucauugcggcacuguggcuaacggcguacugcaaaccuucaugcgcauggcauggggagggagcuacauugcccuugacuccggucacggcaagugggauuguaucaugacaucauaccaguaucugauaauucagaacacuaccugggacgaucauugccaguuuagucgaccgagccccaucggguacuugggacuccugucucaacguacaagagacauuuauaucuccaggcgguuacugggcaccuucacguggacucucucagauagcgaggguaaggacacaccugggggauacugucuuacccgcuggaugcugaucgaagcugaguugaaaugcuuuggcaauacugccguugcgaaguguaacgagaaacacgaugaagaguucugcgacaugcuaagacuguuugauuucaauaagcaggcaauuaggcggcucaaagccgaagcucagaugaguauacagcugaucaacaaggccgugaaugcacuuauuaacgaccaacugaucaugaagaaucacuugcgcgacauaaugggcauuccauauugcaacuacucuaaauauugguaccucaaucauacaaccacggggaagaccucccugccccgauguugguuagucagcaacggaucguaccugaaugagacacacuucucugaugacaucgaacagcaggcugauaacaugaucacugagaugcuacaaaaagaguauauggaaagacaggguaagaccccucucggccugguggaccuuuuuguguucuccacaucauuuuacuugauuaguaucuuccugcaucucgucaaaauuccaacucacaggcauauaguuggaaagagcugccccaaaccucaccggcugaaucacauggggaucuguuccugcggcuuuuauaagcagccaggugugccgguaaaguggaaacguuga

SEQ ID NO: 1230 - RNA, 1476 nt, Artificial Sequence
  derived and/or modified protein sequence (opt3) from LASV(G3148-SLE-2013;Clade IV)__AIT17364__GPC
augggccagaucgugaccuucuuucaagaggucccccacguuauugaagaggugaugaacauaguacugaucgcccucagcauucuugcugugcugaagggguuguacaauuucgcaacaugcggauuagucggucuggugacuuuucuacuccuguguggcagauccugcacgaccucucuuuauaaagggguuuacgaacugcagacauuggagcucaacauggaaacucugaauaugaccaugccucugucauguacaaagaacaauagucaucacuauaucauggugggaaacgagaccggccucgaguuaacucugacaaauaccagcauuaucaaccauaaauucugcaaucuuuccgacgcccacaagaaaaacuuguacgaucaugcgcugaugucuauaaucucgacguuucaccuaucaauuccaaauuucaaccaguaugaagcuaugagcugugacuuuaauggugggaagaucaguguccaguacaaccucucccacucuuaugccggagaugcagccaaucauugcggcacuguggcuaacggcguacugcaaaccuucaugaggauggcauggggagggagcuacauugcccuugacuccggucgggaucgcugggacuguaucaugacaucauaccaguaucugauaauucagaacacuaccugggaggaucacugccaguuuagucgaccgagccccaucggcuacuuggggcuccugucucaacguacaagagacauuuauaucuccaggcgguuacugggaaccuucacguggacucucucagauagcgaaggcaaggacacaccugguggguacugucuuacccgcuggaugcugaucgaggcugaguugaaaugcuuuggaaauacugccguugcgaaguguaacgaaaaacaugaugaggaguucugcgacaugcuaagacuguuugauuucaauaagcaggcaauucagaggcucaaagccgaagcucagaugaguauacaacugaucaacaaggccgugaaugcacuuauuaacgaccagcugaucaugaagaaucacuugcgggacauaaugggcauuccauauugcaacuacucuaaauauugguaccucaaucacacaaccacgggcaagaccucccugcccaaauguugguuagucagcaacgggucguaccugaaugaaacacauuucucugaugacaucgagcagcaagcugauaacaugaucacugagaugcuacagaaggaauauauugagcgccagggaaaaaccccucucggucugguggaccuuuuuguguucuccacaucauuuuacuugaucaguauuuuccugcaccucgucaagauaccaacucaucgacacaucguuggcaaacccugcccuaagccacauagacugaaucacauggggauuuguagcugcggacuuuauaagcagccgggcguguccguaaaauggaagagguga

SEQ ID NO: 1231 - RNA, 1476 nt, Artificial Sequence
  derived and/or modified protein sequence (opt3) from LASV(G3151-SLE-2013;Clade IV)__AIT17368__GPC
augggccagaucgugaccuucuuucaagaggucccccacguuauugaagaggugaugaacauaguacugaucgcccucagcauucuugcugugcugaagggguuguacaauuucgcaacaugcggauuagucggucuggugacuuuucuacuccuguguggcagauccugcacgaccucucuuuauaaagggguuuacgaacugcagacauuggagcucaacauggaaacucugaauaugaccaugccucugucauguacaaagaacaauagucaucacuauaucauggugggaaacgagaccggccucgaguuaacucugacaaauaccagcauuaucaaccauaaauucugcaaucuuuccgacgcccacaagaaaaacuuguacgaucaugcgcugaugucuauaaucucgacguuucaccuaucaauuccaaauuucaaccaguuugaagcuaugagcugugacuucaauggugggaagaucaguguccaguauaaccucucccacucuuacgccggagaugcagccaaucauugcggcacuguggcuaacggcguacugcaaaccuuuaugaggauggcauggggagggagcuauauugcccuugacuccggucacucaaagugggauuguaucaugacaaguuaccaguaccugauaauucagaacacuaccugggacgaucauugccaguucagccggccgucucccaucggcuauuuggggcuccugucccaacgcacacgagacauuuacaucucacguagauuacugggaaccuuuacguggacucucagcgauagugagggcaaagacacaccugguggguauugucuuaccagguggaugcugaucgaagcugaguugaagugcuucggaaauacugccguugcgaaauguaacgagaagcacgaugaagaguuuugcgacaugcuacggcuguucgauuucaauaaacaggcaauucagcgccucaaggccgaagcucagaugucuauacaacugaucaacaaggccgugaaugcacuuauuaacgaccagcugaucaugaaaaaucacuugagagacauaaugggcauuccauacugcaacuauuccaaguacugguaucucaaucauacaaccacgggcaaaaccagccugcccaaguguugguuagucucgaacgggucuuaccugaaugagacacacuuuuccgaugacaucgaacagcaagcugauaacaugaucacugagaugcuacagaaagaguacauggaaaggcagggaaagaccccucucggucugguggaccuuuucguguuuucaacaaguuucuauuugauuagcaucuuucugcaucucgucaaaauuccaacucaccggcauauaguuggcaaguccugccccaagccucaccgccugaauuacauggggaucuguucuugcggauucuauaaacagccaggcgugccgguaaaguggaaacgauga

SEQ ID NO: 1232 - RNA, 1476 nt, Artificial Sequence
  derived and/or modified protein sequence (opt3) from LASV(G3157-SLE-2013;Clade IV)__AIT17370__GPC
augggccagaucgugaccuucuuucaagaggucccccacguuauugaagaggugaugaacauaguacugaucgcccucagcauucuugcugugcugaagggguuguacaauuucgcaacaugcggauuagucggucuggugacuuuucuacuccuguguggcagauccugcacgaccucucuuuauaaagggguuuacgaacugcagacauuggagcucaacauggaaacucugaauaugaccaugccucugucauguacaaagaacaauagucaucacuauaucauggugggaaacgagaccggccucgaguuaacucugacaaauaccagcauuaucaaccauaaauucugcaaucuuuccgacgcccacaagaaaaacuuguacgaucaugcgcugaugucuauaaucucgacguuucaccuaucaauuccaaauuucaaccaguaugaagcuaugagcugugacuuuaauggugggaagaucaguguccaguacaaccucucccacucuuaugccggagaugcagccaaucauugcggcacuguggcuaacggcguacugcaaaccuucaugaggauggcauggggagggagcuacauugcccuugacuccggucgggaucgcugggacuguaucaugacaucauaccaguaucugauaauucagaacacuaccugggaggaucacugccaguuuagucgaccgagccccaucggcuacuuggggcuccugucucaacguacaagagacauuuauaucuccaggcgguuacugggaaccuucacguggacucucucagauagcgaaggcaaggacacaccugguggguacugucuuacccgcuggaugcugaucgaggcugaguugaaaugcuuuggaaauacugccguugcgaaguguaacgaaaaacaugaugaggaguucugcgacaugcuaagacuguuugauuucaauaagcaggcaauucagaggcucaaagccgaagcucagaugaguauacaacugaucaacaaggccgugaaugcacuuauuaacgaccagcugaucaugaagaaucacuugcgggacauaaugggcauuccauauugcaacuacucuaaauauugguaccucaaucacacaaccacgggcaagaccucccugcccaaauguugguuagucagcaacgggucguaccugaaugaaacacauuucucugaugacaucgagcagcaagcugauaacaugaucacugagaugcuacagaaggaauauauggagcgccagggaaaaaccccucucggucugguggaccuuuuuguguucuccacaucauuuuacuugauuaguaucuuccugcaccucgucaagauuccaacucaucgacacauaguuggcaaacccugcccuaagccacauagacugaaucacauggggaucuguagcugcggacuuuauaagcagccgggcguguccguaaaauggaagagguga

SEQ ID NO: 1233 - RNA, 1476 nt, Artificial Sequence
  derived and/or modified protein sequence (opt3) from LASV(G3206-SLE-2013;Clade IV)__AIT17378__GPC
augggccagaucgugaccuucuuucaagaggucccccacguuauugaagaggugaugaacauaguacugaucgcccucagcauucuugcugugcugaagggguuguacaauuuagcaacaugcggacuggucggucuagugacuuuccuccugcuuuguggcagauccugcacgaccucucuguauaaagggguuuacgaauugcagacacucgagcugaacauggaaacucugaauaugaccaugccucucucauguacaaagaacaauagucaucacuauaucauggugggaaacgagaccggcuuagagcugacucuuacaaauaccagcauuaucaaccauaaauuuugcaauuuguccgacgcccacaagaaaaaccuguacgaucauacgcuaaugucuauaaucucgacuuuccaccucucaauuccaaauuuuaaccaguaugaagcgaugagcugugacuucaauggugggaagaucaguguccaguacaaccugucccacucuuaugcuguggaugccgcaaaucauugcggaaccguagccaacggcguucuucaaacauuuaugaggauggcuuggggcgggagcuacauugcacuggacuccggacggucagguugggauuguaucaugacuucauaccaguauuuggugauacagaacaccacaugggaggaccacugccaguucagccgcccgucucccauuggcuaccucgggcuguuaucccaacgaacccgugauaucuauauuucaagaaggcugcucggaacguuuacuuggacacuuagcgacagugaaggcaagaauaccccugguggguacugucugacucgguggauguugaucgaggccgagcuaaaaugcuucggaaacacagcugucgccaaguguaaugaaaaacaugaugaggaauuuugcgacaugcugcgccucuucgauuuuaacaagcaggcgauccagagacugaaagcagaggcccagaugucuauucaacuuauaaauaaggcugugaacgcccugaucaaugaccaguugauuaugaagaaccaccucagggauaucaugggcauaccauauugcaauuacuccaaauauugguaccugaaccacaccacgaccggccggacuagcuuaccccgcuguuggcuggugucgaaugggucuuaccuaaacgaaacucauuucuccgacgacauugagcagcaagcagauaauaugaucaccgagaugcuccagaaggaauauauggagcgacagggaaaaacaccucugggucuugucgacuuguucguuuuuaguacaaguuucuaccugaucagcauuuuucuccaccuggugaagaucccaacccauagacacauuguaggcaaauccugccccaagccucauaggcuuaaccacauggggauauguucuugcggauucuauaaacagccaggcgugccggucaaguggaagcgguga

SEQ ID NO: 1234 - RNA, 1476 nt, Artificial Sequence
  derived and/or modified protein sequence (opt3) from LASV(G3234-SLE-2013;Clade IV)__AIT17388__GPC
augggccagaucgugaccuucuuucaagaggucccccacguuauugaagaggugaugaacauaguacugaucgcccucagcauucuugcugugcugaagggguuguacaaugucgcaacaugcggauuaaucggucuggugacuuuccuacuccuguguggcagauccugcacgaccacacuuuauaaagggguuuacgaacugcaggccuuggagcucaacauggaaacucugaauaugaccaugccucugucuuguacaaagaacaauucacaucacuauauuagggugggaaacgagaccggccucgaguuaacucugacaaauaccaguaucauaaaccauaaauuuugcaaucuuagcgacgcgcacaagaaaaacuuguacgaucaugcucugauguccaucauuucuacguuccaccuaucgaucccaaauuuuaaccaguaugaagccaugucaugugacuucaauggugggauuaucagcguccaguacaaccucagucacuccuaugcaggagaugccgcuaaucauugcggcacuguggcaaacggcguacugcaaaccuuuaugcggauggccuggggagggucuuacauagcucuugacagcggucgcaacggcugggauuguauuaugacauccuaccaguaucugaucauucagaauacuaccugggacgaucacugccaguucucacgaccgagucccaucggguacuugggacuccugagccaacguacaagagacaucuauauuucuaggcgguuacugggcaccuuuacguggacucucuccgauucagaggguaaggacacaccugggggauacugucuuacccgcuggaugcugauagaagccgaguugaagugcuucggcaacacugcgguugcaaaauguaaugagaagcaugaugaagaguuuugcgacaugcuaagacuguucgauuuuaacaaacaggccauccagaggcucaagacagaagcucagaugaauauucaacugaucaacaaagccgugaaugcacuuauaaacgaccagcugauuaugaagaaucacuugcgggacaucaugggcaucccauauugcaacuacagcaaguauugguaccucaauaacaccgcuacggggaaaaccagucugccccgcuguugguuagucucuaauggauccuaccugaacgagacacacuucagcgaugacauugaacagcaagccgauaauaugaucacugagaugcuacagaaggaguauauggaacgacaggguaaaaccccucucggccugguggaccuuuucguguuuucgacaucuuucuacuugauuuccauauuucugcaucucgucaagaucccaacucacagacauauuguugggaaacccugcccuaagccacacaggcugaaccauaucggaaucuguucaugcggccuuuauaaacagccgggugugcccguaaaguggaagcgguga

SEQ ID NO: 1235 - RNA, 1476 nt, Artificial Sequence
  derived and/or modified protein sequence (opt3) from LASV(G502-SLE-2009;Clade IV)__AIT17126__GPC
augggccagaucgugaccuucuuucaagaggucccccacguuauugaagaggugaugaacauaguacugaucgcccucagcauucuugcugugcugaagggguuguacaauuucgcaacaugcggauuagucggucugcuaacuuuucuccugcuuuguggcagauccugcacgaccgggcuguauaaaggaguguacgaauugcagacacucgagcugaacauggaaacucugaauaugaccaugccucucucuuguacaaagaacaauucacaucacuauaucaugguuggcaacgagaccgguuuagagcugacucuuacaaauaccaguauuaucaaccauaaauucugcaauuugagcgacgcccacaagaaaaaccuguacgaucaugcgcuaauguccauaaucucuacguuucaccucucgauuccaaauuucaaccaguaugaagcuaugucaugugacuuuaaugggggaaagaucagcgugcaguacaaccugagucacuccuaugccggcgaugcagccgaccauugcggcacugucgcuaauggggugcuucaaaccuucaugaggauggcauggggagguucuuacauugcccuggauagcggccgggggcgcugggacuguaucaugacauccuaccaguauuugauaauucagaacacuaccugggaggaucacugccaguuuucacgaccgagucccaucggauaccucggccuguuaagccaacguacaagagacauuuauaucucuaggcggcugcucgguaccuucacguggacucuuuccgauucagaagggaaggacacaccuggaggcuacugucugacccgcuggauguugaucgaggcugagcuaaaaugcuuuggcaacacugccguagcgaaguguaaugaaaaacaugaugaggaguucugcgacaugcugagacucuuugauuucaacaagcaggcaauucagaggcugaaagccgaagcucagaugagcauacaacuuaucaauaaggccguuaacgcacugauuaaugaccaguuggugaugaagaaccaccuccgggacaucauggggauaccauauugcaauuacagucgcuauugguaccugaaccacacaaccacgggacgaaccucuuuacccaaauguuggcuggucuccaaugguagcuaccuaaacgaaacacauuucucggaugacauugagcagcaagcugauaauaugaucacugagaugcuccagaaggaauauauggagagacagggcaaaaccccucuggggcuuguggacuuguuuguguucucuacauccuuuuaccugaucucaauuuuccuccaccuggucaagaucccaacucauaggcacauuguuggaaaaaguugccccaagccucaucggcuuaaccacaugggcauauguagcugcggucuguauaaacagccaggggugccgguaaaguggaagcguuga

SEQ ID NO: 1236 - RNA, 1476 nt, Artificial Sequence
  derived and/or modified protein sequence (opt3) from LASV(G503-SLE-2009;Clade IV)__AIT17130__GPC
augggccagaucgugaccuucuuucaagaggucccccacguuauugaagaggugaugaacauaguacugaucgcccucagcauucuugcugugcugaagggguuguacaauuucgcaacaugcggauuugucgguuuagugacuuuccugcuacucuguggcagauccugcacgaccucucuguauaaagggguuuacgaacuucagacacuggaguugaacauggaaacucucaauaugaccaugccucugucauguacaaagaacaauagucaucacuauaucagggugggaaacgacaccggccuggagcucacuuuaacaaauaccagcauuaucaaccauaaauuuugcaaucuguccgaugcccacaagaaaaaccuuuacgaccaugcguugaugucuauaaucucgacguuccaccugucaauuccaaauuuuaaccaguaugaggcuaugagcugugauuucaauggugggaagaucaguguccaguacaaccuaucccacucuuaugccguggacgcagccagccauugcggaacuauugcuaauggcguacuccaaaccuuuaugcggauggcauggggcggguccuacaucgcccuggauucaggacgcgaccgaugggauuguauaaugacaaguuaccaguaucuuauuauccagaacacuaccugggaagaccacugccaguucagccguccgucucccauugguuaccugggcuugcucucccaaagaacaagggauaucuauaucucacggcgccuguuagggaccuuuacguggacucugagcgacagugagggaaaggauacaccuggcgguuacugucucaccagauggaugcuuauugaagcugagcugaaaugcuucgggaacacugccguugcgaaguguaaugagaaacaugacgaagaguuuugcgauauguugaggcuauucgacuucaacaagcaggcaauacagcggcugaaagccgaagcucagaugucuauccaacucauuaauaaggccgugaacgcacugaucaaugaccagcuuauaaugaagaaccacuugcgcgauauuaugggaaucccauauugcaauuacuccaaauauugguacuugaaccacacaaccacgggcaagaccagccuccccaaauguuggcuggucucgaauggcucuuacuuaaacgagacacauuuuuccgacgauaucgaacagcaagcugacaauaugauuacugagaugcugcagaaggaguauauggaacgacaggggaaaaccccucuaggacucguggaucuguucguguuuucaacaaguuucuaccuuaucagcauuuuucugcaccuggucaagauaccaacucauagacacaucguugguaaauccugccccaagccucauaggcucaaccacaugggcauuuguucuugcgggcuguauaagcagccaggagugccgguaaaauggaagcgguga

SEQ ID NO: 1237 - RNA, 1476 nt, Artificial Sequence
  derived and/or modified protein sequence (opt3) from LASV(G610-SLE-2009;Clade IV)__AIT17134__GPC
augggccagaucgugaccuucuuucaagaggucccccacguuauugaagaggugaugaacauaguacugaucgcccucagcauucuugcugugcugaagggguuguacaauuucgcaacaugcggauuagucggucuggugacuuuucuacuccuguguggcagauccugcacgaccucucuuuauaaagggguuuacgaacugcagacauuggagcucaacauggaaacucugaauaugaccaugccucugucauguacaaagaacaauagucaucacuauaucauggugggaaacgagaccggccucgaguuaacucugacaaauaccagcauuaucaaccauaaauucugcaaucuuuccgacgcccacaagaaaaacuuguacgaucaugcgcugaugucuauaaucucgacguuucaccuaucaauuccaaauuucaaccaguaugaagcuaugagcugugacuuuaauggugggaagaucaguguccaguacaaccucucccacucuuaugccggagaugcagccaaucauugcggcacuguggcuaacggcguacugcaaaccuucaugaggauggcauggggagggagcuacauugcccuugacuccggucggggccgcugggauuguaucaugacaucauaccaguaucugauaauucagaacacuaccugggaggaccacugccaguuuagucgaccgagccccaucggguacuugggacuccugucucaacguacaagagauauuuauaucuccaggcgguuacugggcaccuucacguggacucucucagacagcgaagguaaggauacaccugggggauacugucuuacccgcuggaugcugaucgaggcugaguugaaaugcuuuggcaauacugccguugcgaaguguaacgaaaaacaugacgaggaguucugcgauaugcuaagacuguuugacuucaauaagcaggcaauucagaggcucaaagccgaagcucagaugaguauacaacugaucaacaaggccgugaaugcacuuauuaacgaucagcugaucaugaagaaucacuugcgggacauaaugggcauuccauauugcaacuacucuaaauauugguaccucaaucacacaaccacggggaagaccucccugcccaaauguugguuagucagcaacggaucguaccugaaugaaacacauuucucugacgauaucgagcagcaagcugacaacaugaucacugagaugcuacagaaggaauauauggagcgccaggguaaaaccccucucggccugguggaucuuuuuguguucuccacaucauuuuacuugauuaguaucuuccugcaccucgucaagauuccaacucaucgacacauaguugggaaaagcugccccaagccucauagacugaaucacaugggaaucuguuccugcggccuuuauaagcagccaggugugccgguaaaauggaagagguga

SEQ ID NO: 1238 - RNA, 1476 nt, Artificial Sequence
  derived and/or modified protein sequence (opt3) from LASV(G636-SLE-2009;Clade IV)__AIT17138__GPC
augggccagaucgugaccuucuuucaagaggucccccacguuauugaagaggugaugaacauaguacugaucgcccucagcauucuugcugugcugaagggguuguacaauuuagcaacaugcggacuggucggucuagugacuuuccuccugcuuuguggcagauccugcacgaccucucuguauaaagggguuuacgaauugcagacacucgagcugaacauggaaacucugaauaugaccaugccucucucauguacaaagaacaauagucaucacuauaucauggugggaaacgagaccggcuuagagcugacucuuacaaauaccagcuugauuaaccauaaauuuugcaaucuguccgacgcccacaagaaaaaccuauacgaucaugcgcucaugucuaucauaucgacguuccaccugucaaucccaaauuuuaaccaguaugaagcuaugagcugugacuucaauggugggaagauuaguguccaguacaaccuuucccacucuuaugccguggaugcagccagccauugcggaacuguagcuaauggcguucugcaaaccuuuaugaggauggcauggggcggguccuacaucgccuuggacucaggacgggguggcugggauuguauuaugacaaguuaccaguaucucaucauacagaacacuaccugggaggaccacugccaguucagccgcccgucucccauuggguaccugggauuacugucccaacgaacacgugauaucuauauuucaagaaggcuccuuggcaccuuuacguggacucugagcgacagugaagguaaggauacaccugggggauacuguuugacccgguggaugcuaaucgaggcugagcugaaaugcuucggcaacacugccguggcgaaguguaaugaaaaacaugacgaggaauuuugcgauaugcuccgccuguucgacuuuaacaagcaggcaauccagagacuuaaagccgaggcucagaugucuauucaacugauaaauaaggccgucaacgcauugaucaaugaucagcucauuaugaagaaccaccugagggacaucaugggcauaccauauugcaauuacuccaaauauugguacuuaaaccacacaaccacggggcggaccagccugccccgcuguuggcuagugucgaauggaucuuaccucaacgaaacacauuucuccgacgauauugagcagcaagcugacaauaugaucacugagaugcugcagaaggaauauauggagcgacaggguaaaaccccucuuggcuugguggaucuguucgucuuuucaacaaguuucuaccucaucagcauuuuucugcaccuuguuaagaucccaacucauagacacauuguggggaaauccugccccaagccucauaggcugaaccacaugggaauauguucuugcggcuuguauaaacagccagguguaccggugaaguggaagcgguga

SEQ ID NO: 1239 - RNA, 1476 nt, Artificial Sequence
  derived and/or modified protein sequence (opt3) from LASV(G692-SLE-2009;Clade IV)__AIT17146__GPC
augggccagaucgugaccuucuuucaagaggucccccacguuauugaagaggugaugaacauaguacugaucgcccucagcauucuugcugugcugaagggguuguacaauuuagcaacaugcggacuggucggucuagugacuuuccuccugcuuuguggcagauccugcacgaccucucuguauaaagggguuuacgaauugcagacacucgagcugaacauggaaacucugaauaugaccaugccucucucauguacaaagaacaauagucaucacuauaucauggugggaaacgagaccggcuuagagcugacucuuacaaauaccagcauuaucaaccauaaauuuugcaauuuguccgacgcccacaagaaaaaccuguacgaucaugcgcuaaugucuauaaucucgacguuccaccucucaauuccaaauuuuaaccaguaugaagcuaugagcugugacuucaauggugggaagaucaguguccaguacaaccugucccacucuuaugccggagaugcagccaaucauugcggcacuguggcuaacggcguacuucaaaccuuuaugaggauggcauggggagggagcuacauugcccuggacuccggucggggccgcugggauuguaucaugacaucauaccaguauuugauaauucagaacacuaccugggaggaccacugcaguuucagccgaccgucucccaucggguaccucggacuguuaucccagcguacaagagauauuuauaucucaaggcggcugcucggcaccuuuacguggacucuuagcgacagugaagguaaggauacaccugggggauacugucugacccgcuggauguugaucgaggcugagcuaaaaugcuucggcaauacugccguugcgaaguguaacgaaaaacaugacgaggaauuuugcgauaugcugagacucuucgacuuuaauaagcaagcaauucagaggcugaaagccgaggcucagaugucuauacagcuuaucaacaaggccgugaaugcacugauuaacgaucaauugaucaugaagaaucaccuccgggacauaaugggcauuccauauugcaacuacuccaaauauugguaccugaaucacacaaccacggggaagaccagcuuacccaaauguuggcuggucucgaacggaucuuaccuaaaugaaacacauuucuccgacgauaucgagcagcaggcugacaacaugaucacugagaugcuccaaaaggaauauauggagcgccaggguaaaaccccucugggccuuguggauuuguucguguuuucaacaaguuucuaccugauuagcaucuuucuccaccuggucaagauuccaacucaucgacacauaguugggaaauccugccccaagccucauagacuuaaucacaugggaaucuguucuugcggcuucuauaagcagccaggugugccgguaaaauggaagagguga

SEQ ID NO: 1240 - RNA, 1476 nt, Artificial Sequence
  derived and/or modified protein sequence (opt3) from LASV(G733-SLE-2010;Clade IV)__AIT17154__GPC
augggccagaucgugaccuucuuucaagaggucccccacguuauugaagaggugaugaacauaguacugaucgcccucagcauucuugcugugcugaagggguuguacaauuucgcaacaugcggaaucgucgguuuaguguccuuucugcuacucuguggcagaucuugcacuacgucacuguauaaagggguuuacgaacuucagacccuggaguugaacauggaaacacucaauaugacuaugccucugaguuguaccaagaacaauagccaucacuauauuauggugggaaacgagacaggccuggagcucaccuuaacuaauacauccaucauaaaccauaaauucugcaaucugucugacgcccacaagaaaaaccuuuacgaucaugcguugaugucgaucauuucaaccuuucaccugagcaucccaaauuucaaccaguaugaagcuaugaguugugacuuuaauggugggaagauuuccguccaguacaaccuaucucacagcuaugccggagaugcagccaaucauugcggcacgaucgcuaacggcgugcuccaaacuuucaugaggauggcauggggaggguccuacauagcccuggacucaggucgggaucgcugggacuguauuaugaccaguuaccaguaucuuaucauucagaacacaacuugggaggaucacugccaguuuagccgaccgucucccaucggcuaccugggguugcucucccaacguaccagagacaucuauauuucaaggcggcuguuaggaacauucaccuggacgcugagcgauagugaaggcaaggacacuccugguggguacugucucacacgcuggaugcuuauagaggcugagcugaaaugcuuuggaaauaccgccguagcgaaguguaacgaaaaacaugaugaggaguucugcgacauguugagacuauuugauuucaauaagcaggcaauccagaggcugaaagccgaagcucagaugucuauucaacucaucaacaaggccguuaaugcacugauaaacgaccagcuuauuaugaagaaucaucugcgggacaucaugggcaucccauauugcaacuacuccaaauauugguacuugaaucacacuacaaccggcaagacgagccuccccaaauguuggcuggugucgaacgggucuuacuuaaaugaaacccacuucuccgaugacauugagcagcaagcugauaacaugaucacagagaugcugcagaaggaauauauggagcgccagggaaaaacuccucuaggucucgucgaccuguuuguguucucaaccaguuuuuaccuuauuagcauauucuugcaccuggugaagaucccaacacaucgacacgucguuggcaaauccugccccaagccucauagacucaaucacauggggauuuguucuugcggacuguauggccagccaggugugccgguaaaguggaaaagguga

SEQ ID NO: 1241 - RNA, 1476 nt, Artificial Sequence
  derived and/or modified protein sequence (opt3) from LASV(G771-SLE-2010;Clade IV)__AIT17158__GPC
augggccagaucgugaccuucuuucaagaggucccccacguuauugaagaggugaugaacauaguacugaucgcccucagcauucuugcugugcugaagggguuguacaauuucgcaacaugcggauuagucggucuggugacuuuucuacuccuguguggcagauccugcacgaccucucuuuauaaagggguuuacgaacugcagacauuggagcucaacauggaaacucugaauaugaccaugccucugucauguacaaagaacaauagucaucacuauaucauggugggaaacgagaccggccucgaguuaacucugacaaauaccagcauuaucaaccauaaauucugcaaucuuuccgacgcccacaagaaaaacuuguacgaucaugcgcugaugucuauaaucucgacguuucaccuaucaauuccaaauuucaaccaguaugaagcuaugagcugugacuuuaauggugggaagaucaguguccaguacaaccucucccacucuuaugccggagaugcagccaaucauugcggcacuguggcuaacggcguacugcaaaccuucaugaggauggcauggggagggagcuacauugcccuugacuccggucgggaucgcugggacuguaucaugacaucauaccaguaucugauaauucagaacacuaccugggaggaucacugccaguuuagucgaccgagccccaucggcuacuuggggcuccugucucaacguacaagagacauuuauaucuccaggcgguuacugggaaccuucacguggacucucucagauagcgaaggcaaggacacaccugguggguacugucuuacccgcuggaugcugaucgaggcugaguugaaaugcuuuggaaauacugccguugcgaaguguaacgaaaaacaugaugaggaguucugcgacaugcuaagacuguuugauuucaauaagcaggcaauucagaggcucaaagccgaagcucagaugaguauacaacugaucaacaaggccgugaaugcacuuauuaacgaccagcugaucaugaagaaucacuugcgggacauaaugggcauuccauauugcaacuacucuaaauauugguaccucaaucacacaaccacgggcaagaccucccugcccaaauguugguuagucagcaacgggucguaccugaaugaaacacauuucucugaugacaucgagcagcaagcugauaacaugaucacugagaugcuacagaaggaauauauggagcgccagggaaaaaccccucucggucugguggaccuuuuuguguucuccacaucauuuuacuugauuaguaucuuccugcaccucgucaagauuccaacucaucgacacauaguuggcaaaagcugccccaagccucauagacugaaucacauggggaucuguuccugcggacuuuauaagcagccaggcgugccgguaaaauggaagagguga

SEQ ID NO: 1242 - RNA, 1476 nt, Artificial Sequence
  derived and/or modified protein sequence (opt3) from LASV(G808-SLE-2010;Clade IV)__AIT17164__GPC
augggccagaucgugaccuucuuucaagaggucccccacguuauugaagaggugaugaacauaguacugaucgcccucagcauucuugcugugcugaagggguuguacaauuucgcaacaugcggauuagucggucuggugacuuuucuacuccuguguggcagauccugcacgucuucacuuuauaaagggguuuacgaacugcagaccuuggagcucaacauggaaacacugaauaugacuaugccucugaguuguaccaagaacaauagccaucacuauaucagggugggaaacgagacaggccucgaguuaacccugacuaauacauccauuaucgaccauaaauucugcaaccuuucugaugcccacaagaaaaauuuguacgaccaugcgcugaugucgauaaucucaaccuuucaccuaagcauuccaaacuucaaucaguaugaagcuaugaguugugauuuuaacggugggaagaucuccguccaguacaaucucucucacagcuaugccggagacgcagccaagcauugcggcacgguggcuaacggcguacugcaaacuuucaugcggauggcauggggaggguccuacauugcccuugauucaggucacggcaauugggacuguaucaugaccaguuaccaguaucugauaauucagaacacaacuugggaggaucauugccaguuuagccgcccgucucccaucggguacuugggacuccugucccaacgaacccgugacauuuauaucucaagaagguuacugggcacauucaccuggacgcucagcgauagugaagguaacgacgcuccugggggauacugucuuacucgguggaugcugauccaggccgaguugaaaugcuuuggcaauacagcgguugcaaaguguaacgagaaacacgaugaagaguucugcgacaugcuacgccuguuugauuucaauaagcaggccauucagagacucaaagcugaagcccaaaugucuauacagcugaucaacaaggcagugaaugcucuuauuaacgaccagcugaucaugaagaaucacuugagggacauaaugggcauuccauauugcaacuacuccaaauauugguaccucaaucauaccacuacagggcggaccagccugccccgcuguugguuagucucgaacggaucuuaccugaaugagacgcacuucuccgaugacaucgaacaacaggccgauaacaugaucaccgagaugcuacagaaggaguauauggaacgacaggguaaaacaccucucggccugguggaccuuuuuguguucucaaccaguuuuuacuugauuagcaucuuccugcaucucgucaagauuccaacucacagacauauaguugggaaauccugccccaagccucacaggcugaaucacaugggaaucuguucuugcggccuuuuuaaacaaccaggugugccgguaaaguggaagcgguga

SEQ ID NO: 1243 - RNA, 1476 nt, Artificial Sequence
  derived and/or modified protein sequence (opt3) from LASV(Guinea Faranah;Clade IV)__AMZ00381__GPC
augggccagaucgugaccuucuuucaagaggucccccacguuauugaagaggugaugaacauaguacugaucgcccucagcauucuugcugugcugaagggguuguacaaugucgcaacaugcggauuaaucggucugauugccuuccuacuccuguguggcagauccugcacuucuacgcuuuauaaagggguguacgaacugcaggcguuggagcucaacauggaaacccugaauaugacaaugccucugucauguacuaagaacaauagucaucacuauaucaugguuggaaacgagaccggccucgaguuaacacugaccaauacuagcauaaucaaccauaaauuuugcaaucuuuccgacgcucacaagaaaaacuuguacaaucaugcccugaugucuauuaucucgacauuccaccuaucaauuccaaacuuuaaucaguaugaagcaaugagcugugauuucaacggugggaagaucagugugcaguacaaucucucccacucuuaugccgucgacgcugcaaaccauugcggaaccguggccaacggcauacugcaaacguuuaugaggauggcuuggggcgggagcuacauugcccuugauuccggacacgguggcugggacuguaucaugucaaguuaccaguaucugguaauucagaauacuaccugggaggaucauugccaguucagccggccgucucccaucggguacuugggacuccugucccaacgcacacgagacaucuauauuucacguagauuacugggcacuuuuaccuggacacucagcgauagugaagguaaggacaccccugggggauacugucuuacgagguggaugcugauagaggcggaguugaaaugcuucggcaacacugcaguugccaaguguaaugaaaaacacgaugaggaauuuugcgacaugcuacggcuguucgauuuuaacaagcaggcuauccagcgccucaaagccgaggcacagaugucuauucaacugaucaauaaggcugugaacgcccuuauaaaugaccagcugauuaugaagaaccacuugagagauaucaugggcaucccauauugcaauuacuccaaauauugguaccucaaccauacaauuaccgggaggacuagccugcccaaguguugguuagucucgaauggaucuuaccugaacgaaacacacuucuccgacgacaucgagcagcaagcggauaauaugauuaccgagaugcuacagaaagaauaucucgagcggcaggguaagacgccucugggccuuguggacuuguucguguuuucaaccaguuucuaccugauaagcaucuuucuccaucugauuaaaaucccaacacaccgccauaucgucgggaaguccugccccaaaccucaccgacuuaaccacaugggaguuuguucuugcggccuguauaagcagccaggugugccgguaagauggaagagguga

SEQ ID NO: 1244 - RNA, 1476 nt, Artificial Sequence
  derived and/or modified protein sequence (opt3) from LASV(GUINEA Z-185a;Clade IV)__AMZ00377__GPC
augggccagaucgugaccuucuuucaagaggucccccacguuauugaagaggugaugaacauaguacugaucgcccucagcauucuugcugugcugaagggguuguacaaugucgcaacaugcggauuaaucggucuggugacuuuccuauuucucuguggcagauccugcucuacgucacuguauaaagggguuuacgaacuucagacccuggaguugaacauggaaacacucaauaugacuaugccucugaguuguaccaagaacaauagccaucacuauauuauggugggaaacgagacaggccuggagcucaccuuaacuaauacauccaucauaaaccauaaauucugcaaucugucugacgcccacaagaaaaaccuuuacgaucauaccuugaugucgaucauuucaacguuucaccugagcaucccaaauuucaaccaguaugaagcgaugaguugugacuuuaauggugggaagauuuccguccaguacaaccuaucucacagcuaugcuguggaugccgcaaaucauugcggaacuguagccaacggcguucuccaaaccuucaugaggauggcuuggggcggguccuacaucgcacuggacucaggacgggguaacugggauuguauaaugacaaguuaccaguaucuugugauucagaauacuaccugggaggaccacugccaguuuagccgcccgucucccaucggcuaccugggguugcucucccaacgaacacgugauauuuauaucucaagaaggcuguuaggaaccuucacguggacucugagcgacagugaaggcaaggauacaccugguggguacugucucacccgguggaugcuuaucgaggccgagcugaaaugcuuuggaaacacugcugucgccaaguguaaugaaaaacaugacgaggaguucugcgauauguugcgccuauuugacuucaacaagcaggcgauucagagacugaaagcagaagcccagaugucuauacaacucaucaauaaggcugugaacgcccugauuaaugaucagcuuaucaugaagaaccaccugagggacauaaugggcauuccauauugcaauuacuccaaauauugguacuugaaccacacagugaccggcaagacgagccuccccaaauguuggcuggucucgaaugggucuuacuuaaacgaaacccauuucuccgacgauaucgagcagcaagcagacaaucugaucacagagaugcuacagaaggaauauauggagcggcagggaaaaacuccucucggucugguugaucuuuuuguguucucaaccaguuuuuacuugauuagcaucuuccugcaccucguaaagauuccaacacaucgccacauagugggcaaacccugcccuaagccacaucgacugaaccacauggggaucuguuccugcggagucuauaagcagccgggcgugcccguuagauggaaaagguga

SEQ ID NO: 1245 - RNA, 1476 nt, Artificial Sequence
  derived and/or modified protein sequence (opt3) from MOPV/LASV reassortant(IGS-1;Clade IV)__AFY05576__GPC
augggccagaucgugaccuucuuucaagaggucccccacguuauugaagaggugaugaacauaguacugaucgcccucagcgugcuugcuguccugaagggguuguacaauuucgcaacaugcggauuagugggucugguuacuuuucuacuccuguguggcagauccugcacgaccucucuuuauaaagggguguacgaacugcagacauuggagcucaacauggaaacucugaauaugaccaugccucugucauguacaaagaacaauagucaucacuauauuauggucggaaacgagaccggccucgaguuaacucugacaaauaccagcaucauuaaccauaaauucugcaaucuuuccgacgcccacaagaaaaacuuguacgaucaugcgcugaugucuaucauaucgacguuucaccuaucaaucccaaauuucaaccaguaugaagcuaugagcugugacuuuaauggugggaagauuagugugcaguacaaccucucccacucuuaugccggagaugcagccaaucauugcggcacuguagcuaacggcguucugcaaaccuucaugaggauggcauggggagggagcuacaucgcccuugacuccggucggggcaacugggauuguauuaugacaucauaccaguaucugaucauacagaauacuaccugggaggaccacugccaguuuagucgcccgagccccauuggguacuugggacuccugucucaacgaacacgugauaucuauauuuccagaagguuacugggcaccuucacguggacucucucagacagcgaaggugaggauacaccugggggauacugucuuacccgguggaugcugaucgaggcugaauugaagugcuuuggcaacacugccguggcgaaauguaaugagaagcaugacgaagaguucugcgauaugcuacgccuguuugacuucaacaaacaggcaauccagagacucaaggccgaagcucagaugaguauucaacugauaaauaaagccgucaacgcacuuaucaaugaucagcugauuaugaagaaccacuugagggacaucaugggcauaccauauugcaauuacucuaaguauugguaccucaaccacacaaccacggggcggaccucccugcccaaauguugguuagugagcaauggaucguaccugaacgagacacauuucucugacgauauugagcagcaagcugacaauaugaucacugaaaugcuacagaaggaguauauggaacgccaggguaaaaccccucucggccugguggaucuuuuugucuucuccacaucauuuuacuugaucaguauuuuccugcaccucguuaagaucccaacucaucgacacauuguggggaaaagcugccccaagccucauagacugaaccacaugggaauauguuccugcggccuuuauaaacagccagguguaccggugaaguggaagagguga

SEQ ID NO: 1246 - RNA, 1476 nt, Artificial Sequence
  derived and/or modified protein sequence (opt3) from MOPV/LASV reassortant(IGS-11;Clade IV)__AFY05588__GPC
augggccagaucgugaccuucuuucaagaggucccccacguuauugaagaggugaugaacauaguacugaucgcccucagcgugcuugcuguccugaagggguuguacaauuucgcaacaugcggauuagugggucugguuacuuuucuacuccuguguggcagauccugcacgaccucucuuuauaaagggguguacgaacugcagacauuggagcucaacauggaaacucugaauaugaccaugccucugucauguacaaagaacaauagucaucacuauauuauggucggaaacgagaccggccucgaguuaacucugacaaauaccagcaucauuaaccauaaauucugcaaucuuuccgacgcccacaagaaaaacuuguacgaucaugcgcugaugucuaucauaucgacguuucaccuaucaaucccaaauuucaaccaguaugaagcuaugagcugugacuuuaauggugggaagauuagugugcaguacaaccucucccacucuuaugccggagaugcagccaaucauugcggcacuguagcuaacggcguucugcaaaccuucaugaggauggcauggggagggagcuacaucgcccuugacuccggucggggcaacugggauuguauuaugacaucauaccaguaucugaucauacagaauacuaccugggaggaccacugccaguuuagucgcccgagccccauuggguacuugggacuccugucucaacgaacacgugauuuauauaucuccagaaggcugcucggcaccuucacguggacucuuucagacagcgaaggugaggauacaccugggggauacugucugacccgguggauguugauugaggcugaacuaaagugcuuuggcaacacugccguggcgaaauguaaugagaagcaugacgaagaguucugcgauaugcugcgccucuuugacuucaacaaacaggcaauccagagacugaaggccgaagcucagaugaguauccaacuuauuaauaaagccgucaacgcacugauaaaugaucaguugaucaugaagaaccaccucagggacauuaugggcaucccauauugcaauuacucuaaguauugguaccugaaccacacaaccacggggcggaccuccuuacccaaauguuggcuggugagcaauggaucguaccuaaacgagacacauuucucugacgauauagagcagcaagcugacaauaugauuacugaaaugcuccagaaggaguauauggaacgccaggguaaaaccccucugggccuuguggauuuguuugucuucuccacaucauuuuaccugaucaguaucuuccuccaccugguuaagauuccaacucaucgacacaucguggggaaaagcugccccaagccucauagacuuaaccacaugggaauuuguuccugcggccuguauaaacagccagguguaccggugaaguggaagagguga

SEQ ID NO: 1247 - RNA, 1476 nt, Artificial Sequence
  derived and/or modified protein sequence (opt3) from MOPV/LASV reassortant(IGS-12;Clade IV)__AFY05590__GPC
augggccagaucgugaccuucuuucaagaggucccccacguuauugaagaggugaugaacauaguacugaucgcccucagcgugcuugcuguccugaagggguuguacaauuucgcaacaugcggauuagugggucugguuacuuuucuacuccuguguggcagauccugcacgaccucucuuuauaaagggguguacgaacugcagacauuggagcucaacauggaaacucugaauaugaccaugccucugucauguacaaagaacaauagucaucacuauauuauggucggaaacgagaccggccucgaguuaacucugacaaauaccagcaucauuaaccauaaauucugcaaucuuuccgacgcccacaagaaaaacuuguacgaucaugcgcugaugucuaucauaucgacguuucaccuaucaaucccaaauuucaaccaguaugaagcuaugagcugugacuuuaauggugggaagauuagugugcaguacaaccucucccacucuuaugccggagaugcagccaaucauugcggcacuguagcuaacggcguucugcaaaccuucaugaggauggcauggggagggagcuacaucgcccuugacuccggucggggcaacugggauuguauuaugacaucauaccaguaucugaucauacagaauacuaccugggaggaccacugccaguuuagucgcccgagccccauuggguacuugggacuccugucucaacgaacacgugauauguauaucuccagaagguuacugggcaccuucacguggacucucucagacagcgaaggugaggauacaccugggggauacugucuuacccgguggaugcugauugaggcugaauugaagugcuuuggcaacacugccguggcgaaauguaaugagaagcaugacgaagaguucugcgauaugcuacgccuguuugacuucaacaaacaggcaauccagagacucaaggccgaagcucagaugaguauccaacugauuaauaaagccgucaacgcacuuauaaaugaucagcugaucaugaagaaccacuugagggacauuaugggcaucccauauugcaauuacucuaaguauugguaccucaaccacacaaccacggggcggaccucccugcccaaauguugguuagugagcaauggaucguaccugaacgagacacauuucucugacgauauagagcagcaagcugacaauaugauuacugaaaugcuacagaaggaguauauggaacgccaggguaaaaccccucucggccugguggaucuuuuugucuucuccacaucauuuuacuugaucaguaucuuccugcaccucguuaagauuccaacucaucgacacaucguggggaaaagcugccccaagccucauagacugaaccacaugggaauuuguuccugcggccuuuauaaacagccagguguaccggugaaguggaagagguga

SEQ ID NO: 1248 - RNA, 1476 nt, Artificial Sequence
  derived and/or modified protein sequence (opt3) from LASV(LM032-SLE-2010;Clade IV)__AIT17802__GPC
augggccagaucgugaccuucuuucaagaggucccccacguuauugaagaggugaugaacauaguacugaucgcccucagcauucuugcugugcugaagggguuguacaauuuagcaacaugcggacuggucggucuagugacuuuccuccugcuuuguggcagauccugcacgaccucucuguauaaagggguuuacgaauugcagacacucgagcugaacauggaaacucugaauaugaccaugccucucucauguacaaagaacaauagucaucacuauaucauggugggaaacgagaccggcuuagagcugacucuuacaaauaccagcauuaucaaccauaaauuuugcaauuuguccgacgcccacaagaaaaaccuguacaaucaugcgcuaaugucuauaaucucgacguuccaccucucaauuccaaacuuuaaucaguaugaagcuaugagcugugauuucaacggugggaagaucaguguccaguacaaucugucccacucuuaugccggagacgcagccaaccauugcggcacuguggcuaacggcguacuucaaaccuuuaugaggauggcauggggagggagcuacauugcccuggauuccggucgggaccgcugggauuguaucaugacaucauaccaguauuugauaauucagaauacuaccugggaggaccacugccaguucagucgaccgagccccaucggcuaccucgggcuguuaucucaacguacaagagauauuuauaucuccaggcggcugcucggaaccuuuacguggacucuuucagacagcgaaggcaaggauacaccugguggguacugucugacccgcuggauguugaucgaggcugagcuaaaaugcuucggaaacacugccguugcgaaguguaaugaaaaacaugacgaggaauuuugcgauaugcugagacucuucgacuuuaacaagcaggcaauucagaggcugaaagccgaggcucagaugaguauacaacuuaucaauaaggccgugaacgcacugauuaaugaucaguugaucaugaagaaccaccuccgggacauaaugggcauuccauauugcaauuacucuaaauauugguaccugaaccacacaaccacgggcaagaccuccuuacccaaauguuggcuggucagcaaugggucguaccuaaacgaaacacauuucucugacgauaucgagcagcaagcugacaauaugaucacugagaugcuccagaaggaauauauggagcgccugggaaaaaccccucuugguuugguggaucuguucguguuuuccacaucauucuaccucauuaguaucuuucugcaccuugucaagauuccaacucaucgacacauaguuggcagaagcugccccaaaccucauaggcugaaccacauggggaucuguuccugcggauuguauaagcagccaggcgugccgguaaaguggaaacgguga

SEQ ID NO: 1249 - RNA, 1476 nt, Artificial Sequence
  derived and/or modified protein sequence (opt3) from LASV(LM222-SLE-2010;Clade IV)__AIT17806__GPC
augggccagaucgugaccuucuuucaagaggucccccacguuauugaagaggugaugaacauaguacugaucgcccucagcauucuugcugugcugaagggguuguacaauuucgcaacaugcggauuaaucggucuggucacuuuucuacuccuguguggcagauccugcacgaccucucuuuauaaagggguguacgaacugcagacauuggagcucaacauggaaacucugaauaugaccaugccucugucauguacaaagaacaauagucaucacuauauuaugguuggaaacgagaccggccucgaguuaacucugacaaauaccagcaucauaaaccauaaauucugcaaucuuuccgacgcccacaagaaaaacuuguacgaucaugcgcugaugucuaucauuucgacguuucaccuaucaaucccaaauuucaaccaguaugaagcuaugagcugugacuuuaauggugggaagauuagugugcaguacaaccucucccacucuuaugccggagaugcagccaaucauugcggcacugucgcuaacggcgugcugcaaaccuucaugaggauggcauggggagggagcuacaucgcccuugacuccggucggggcaagugggauuguauaaugacaucauaccaguaucugauuauccagaacacuaccugggaggaccacugccaguuuagucgcccgagccccauuggguacuugggacuccugucucaacgaacacgugauaucuauaucuccagaagguuacugggcaccuucacguggacucucucagacagcgaagguaaagauacaccugggggauacugucuuacccgguggaugcugauugaggcugaguugaagugcuuuggcaauacugccguagcgaaauguaacgaaaagcaugacgaggaguucugcgauaugcuacgccuguuugacuucaauaaacaggcaauacagagacucaaggccgaagcucagaugaguauccaacugauuaacaaggccguuaaugcacuuaucaacgaucagcugauaaugaaaaaucacuugagggacauuaugggcaucccauauugcaacuacucuaaguauugguaccucaaucacacaaccacggggaaaaccucccugcccaaguguugguuagugagcaacggaucguaccugaaugaaacacauuucucugacgauaucgagcagcaagcugacaacaugauuacugagaugcuacagaaagaauauauggagcggcaggguaagaccccucucggccuggucgaucuuuuuguguucuccacaucauuuuacuugaucaguauuuuccugcaccucgugaaaauaccaacucaucgccacaucgucggaaagagcugccccaagccucaucgacugaaucacauggggauuuguuccugcggccuuuauaaacagccagguguuccggugaaguggaaaagauga

SEQ ID NO: 1250 - RNA, 1476 nt, Artificial Sequence
  derived and/or modified protein sequence (opt3) from LASV(LM395-SLE-2009;Clade IV)__AIT17810__GPC
augggccagaucgugaccuucuuucaagaggucccccacguuauugaagaggugaugaacauaguacugaucgcccucagcauucuugcugugcugaagggguuguacaauuuagcaacaugcggacuggucggucuagugacuuuccuccugcuuuguggcagauccugcacgaccucucuguauaaagggguuuacgaauugcagacacucgagcugaacauggaaacucugaauaugaccaugccucucucauguacaaaggacaacagucaucacuauaucagggugggaaaugagaccggcuuagagcugacucuuacaaacaccagcauuuugaaucauaaauuuugcaaccuguccgaugcccacaagaaaaaucuauacgaccaugcgcucaugucuaucauaucgacguuccaccugucaaucccaaacuuuaaucaguaugaagcuaugagcugugauuucaacggugggcggauuaguguccaguacaaucuuucccacucuuaugccggagacgcagccaaccauugcggcacuguggcuaauggcguacugcaaaccuuuaugcgcauggcauggggagggagcuacaucgccuuggauuccggucgaggccguugggacuguauuaugacaucauaccaguaucucaucauacagaacacuaccugggaggaucacugccaguucaguagaccgagccccauuggguaccugggauuacugucucaaaggacacgggacaucuauauuucccgcagacuccuuggcaccuuuacguggacucugucagauagcgaagguaaggacacaccugggggauacuguuugaccagguggaugcuaaucgaggcugagcugaagugcuucggcaacacugccguugcgaaauguaaugaaaagcaugaugaggaauuuugcgacaugcuccggcuguucgauuuuaacaaacaggcaauccagcgccuuaaggccgaggcucagaugaguauucaacugauaaauaaagccgugaacgcauugaucaaugaccagcucauuaugaagaaccaucugcgagacaucaugggcauaccauauugcaauuacucuaaguauugguacuuaaaccacacaaccacggggaaaaccucccugcccagauguuggcuagucagcaauggaucguaccucaacgaaacacacuucucugaugacauugagcagcaagcugauaauaugaucacugagaugcugcagaaggaauauauggagaggcaggguaaaaccccucuuggcuugguggaccuguucguguuuuccacaucauucuaccucaucaguauuuuucugcaccuugucaagaucccaacucaucggcacguuguggggaaacccugcccuaagccacaucgucugaaccacaugggaauuuguagcugcggcuuguauaaacagccggguguacccgugaaguggaagcgcuga

SEQ ID NO: 1251 - RNA, 1476 nt, Artificial Sequence
  derived and/or modified protein sequence (opt3) from LASV(LM765-SLE-2012;Clade IV)__AIT17814__GPC
augggccagaucgugaccuucuuucaagaggucccccacguuauugaagaggugaugaacauaguacugaucgcccucagcauucuugcugugcugaagggguuguacaauuucgcaacaugcggauuagucggucuggugacuuuucuacuccuguguggcagauccugcacgaccucucuuuauaaagggguuuacgaacugcagacauuggagcucaacauggaaacucugaauaugaccaugccucugucauguacaaagaacaauagucaucacuauaucauggugggaaacgagaccggccucgaguuaacucugacaaauaccagcauuaucgaccauaaauucugcaaccuuuccgaugcccacaggaagaauuuguacgaccaugcgcugaugucuauaaucucgacguuucaccuaucaauuccaaacuucaaucaguaugaagcuaugagcugugauuuuaacggugggaaaaucaguguccaguacaaucucucccacucuuaugccaaggacgcagccgaucauugcggaacuguggcuaacggcguacugcaaaccuucaugcggauggcauggggcgggagcuacauugcccuugacuccggacgcggucgaugggauuguaucaugacaucauaccaguaucugauaauucagaauacuaccugggaggaccacugccaguuuagucguccgagccccaucggcuacuuggggcuccugucucaaagaacaagggauauuuauaucucccggcgcuuacugggaaccuucacguggacucucucagacagcgaaggcaaggauacaccugguggguacugucuuaccagauggaugcugaucgaggcugaguugaaaugcuuuggaaacacugccguugcgaaguguaacgaaaaacaugacgaggaguucugcgauaugcuaaggcuguuugacuucaauaagcaggcaauucagcggcucaaagccgaagcucagaugaguauacaacugaucaacaaggccgugaaugcacuuauuaacgaccagcugaucaugaagaaucacuugcgcgauauaaugggcauuccauauugcaacuacucuaaauauugguaccucaaucacacaaccacgggcaagaccucccugcccaaauguugguuagucagcaacgggucguaccugaaugaaacacauuucucugacgauaucgagcagcaagcugacaacaugaucacugagaugcuacagaaggaauauauggagcgacagggaaaaaccccucucggucugguggaucuuuuuguguucuccacaucauuuuacuugauuaguaucuuccugcaccucgucaagauuccaacucauagacacauaguuggcaaacccugcccuaagccacauaggcugaaucacauggggaucuguagcugcggacuuuauaagcagccgggcgugcccguaaaauggaagcgguga

SEQ ID NO: 1252 - RNA, 1476 nt, Artificial Sequence
  derived and/or modified protein sequence (opt3) from LASV(LM774-SLE-2012;Clade IV)__AIT17820__GPC
augggccagaucgugaccuucuuucaagaggucccccacguuauugaagaggugaugaacauaguacugaucgcccucagcauucuugcugugcugaagggguuguacaauuucgcaacaugcggauuagucggucuggugacuuuucuacuccuguguggcagauccugcacgaccucucuuuauaaagggguuuacgaacugcagacauuggagcucaacauggaaacucugaauaugaccaugccucugucauguacaaagaacaauagucaucacuauaucauggugggaaacgagaccggccucgaguuaacucugacaaauaccagcauuaucaaccauaaauucugcaaucuuuccgacgcccacaagaaaaacuuguacgaucaugcgcugaugucuauaaucucgacguuucaccuaucaauuccaaauuucaaccaguaugaagcuaugagcugugacuuuaauggugggaagaucaguguccaguacaaccucucccacucuuaugccgaggaugcagccaaucauugcggaacuguggcuaacggcguacugcaaaccuucaugaggauggcauggggcgggagcuacauugcccuugacuccggacgggguaacugggauuguaucaugacaucauaccaguaucugauaauucagaauacuaccugggaagaccacugccaguuuagucgcccgagccccaucggcuacuuggggcuccugucucaacgaacacgugauauuuauaucuccagaagguuacugggaaccuucacguggacucucucagacagcgagggcaaggauacaccugguggguacugucuuacccgguggaugcugaucgaggcugaauugaaaugcuuuggaaacacugccguugcgaaguguaaugagaaacaugacgaagaguucugcgauaugcuacgccuguuugacuucaacaagcaggcaauucagagacucaaagccgaagcucagaugaguauacaacugaucaauaaggccgugaacgcacuuauuaaugaucagcugaucaugaagaaccacuugagggacauaaugggcauuccauauugcaauuacucuaaauauugguaccucaaccacacaaccacgggcaagaccucccugcccaaauguugguuagucagcaaugggucguaccugaacgagacacauuucucugacgauaucgagcagcaagcugacaauaugaucacugaaaugcuacagaaggaguauauggaacggcagggaaaaaccccucucggucugguggaucuuuuuguguucuccacaucauuuuacuugauuaguaucuuccugcaccucgucaagauuccaacucaucgccacauaguuggcaaaagcugccccaagccucaucgacugaaccacauggggaucuguuccugcggacuuuauaagcagccaggcgugccgguaaaauggaagagauga

SEQ ID NO: 1253 - RNA, 1476 nt, Artificial Sequence
  derived and/or modified protein sequence (opt3) from LASV(LM776-SLE-2012;Clade IV)__AIT17824__GPC
augggccagaucgugaccuucuuucaagaggucccccacguuauugaagaggugaugaacauaguacugaucgcccucagcauucuugcugugcugaagggguuguacaauuucgcaacaugcggauuagucggucuggugacuuuucuacuccuguguggcagauccugcacgaccucuguuuauaaagggguguacgaacuucagacacuggaguugaacauggaaacucucaauaugaccaugccucugucauguacaaagaacaauagucaucacuauaucauggucggaaacgagaccggccuggagcucacuuuaacaaauaccagcauuaucaaccauaaauucugcaaucuguccgacgcccacaagaaaaaccuuuacgaucaugcguugaugucuauaaucucgacguuucaccugucaauuccaaauuucaaccaguaugaagcuaugagcugugacuuuaauggugggaagaucagugugcaguacaaccuaucccacucuuaugccggagaugcagccaaucauugcggcacuguagcuaacggcguucuccaaaccuucaugaggauggcauggggagggagcuacauugcccuggacuccggucacggcaagugggauuguaucaugacaucauaccaguaucuuauaauucagaacacuaccugggaggaccauugccaguuuagucggccgagccccaucggguaccugggauugcucucucaacgcacacgagauauuuauaucucccguagacuguuaggcaccuucacguggacucugucagacagcgaagguaaagauacaccugggggauacugucucaccagguggaugcuuaucgaggcugagcugaagugcuuuggcaauacugccguggcgaaauguaacgaaaagcacgacgaggaguucugcgauauguugcggcuauuugacuucaauaaacaggcaauucagcgccugaaggccgaagcucagaugaguauacaacucaucaacaaggccgucaaugcacugauuaacgaucagcuuaucaugaaaaaucaccugagagacauaaugggcauuccauauugcaacuacucuaaguauugguacuugaaucauacaaccacggggaaaaccucccuccccaaguguuggcuggugagcaacggaucguacuuaaaugaaacacacuucucugacgauaucgagcagcaagcugacaacaugaucacugagaugcugcagaaagaauauauggagaggcaggguaagaccccucuaggccucguggaucuguuugucuucuccacaucauuuuaccuuauuaguaucuucuugcaucugguuaaaauuccaacucaccggcauauagugggaaagagcugccccaagccucaccgccucaaucacauggggaucuguuccugcggccuguauaaacagccagguguaccggugcgauggaagagauga

SEQ ID NO: 1254 - RNA, 1476 nt, Artificial Sequence
  derived and/or modified protein sequence (opt3) from LASV(LM778-SLE-2012;Clade IV)__AIT17828__GPC
augggccagaucgugaccuucuuucaagaggucccccacguuauugaagaggugaugaacauaguacugaucgcccucagcauucuugcugugcugaagggguuguacaauuucgcaacaugcggauuagucggucuggugacuuuucuacuccuguguggcagauccugcacgaccucucuuuauaaaggggacuacgaacugcagacauuggagcucaacauggaaacucugaauaugaccaugccucugucauguacaaagaacaauagucaucacuauaucaugguuggaaacgagaccggccucgaguuaacucugacaaauaccagcauuaucaaccauaaauucugcaaucuuuccgaugcccacaagaaaaacuuguacgaccaugcgcugaugucuauaaucucgacguuucaccuaucaauuccaaauuucaaccaguaugaagcuaugagcugugauuuuaauggugggaagaucagugugcaguacaaccucucccacucuuaugccggagacgcagccaaucauugcggcacugucgcuaacggcgugcugcaaaccuucaugaggauggcauggggagggagcuacauugcccuugauuccggucggggcaacugggacuguaucaugacaucauaccaguaucugauaauucagaauacuaccugggaggaucacugccaguuuagucgcccgagccccaucggguacuugggacuccugucucaacgaacacgugacauuuauaucuccagaagguuacugggcaccuucacguggacucucucagauagcgaagguaaggacacaccugggggauacugucuuacccgguggaugcugaucgaggcugaguugaaaugcuuuggcaacacugccguagcgaaguguaaugaaaaacaugaugaggaguucugcgacaugcuacgccuguuugauuucaacaagcaggcaauucagagacucaaagccgaagcucagaugaguauacaacugaucaauaaggccguuaacgcacuuauuaaugaccagcugaucaugaagaaccacuugagggacauaaugggcauuccauauugcaauuacucuaaauauugguaccucaaccacacaaccacggggaagaccucccugcccaaauguugguuagugagcaauggaucguaccugaacgaaacacauuucucugaugacaucgagcagcaagcugauaauaugaucacugagaugcuacagaaggaauauauggagcggcaggguaaaaccccucucggccuggucgaccuuuuuguguucuccacaucauuuuacuugauuaguaucuuccugcaccucgugaagauuccaacucaucgccacauagucgggaaaagcugccccaagccucaucgacugaaccacaugggaaucuguuccugcggccuuuauaagcagccagguguuccggugaaauggaagagauga

SEQ ID NO: 1255 - RNA, 1476 nt, Artificial Sequence
  derived and/or modified protein sequence (opt3) from LASV(Mad39;Clade IV)__ANH09722__GPC
augggccagaucgugaccuucuuucaagaggucccccacguuauugaagaggugaugaacauaguacugaucgcccucagcauucuugcugugcugaagggguuguacaaugucgcaacaugcggauuaaucggucuggugacuuuccuacuccuguguggcagauccugcacgaccacacuuuauaaagggguuuacgaacugcaggccuuggagcucaacauggaaacucugaauaugaccaugccucugucuuguacaaagaacaauucacaucacuauauuagggugggaaacgagaccggccucgaguuaacucugacaaauaccagucuuaucaaccauaaauuuugcaauuugagcgacgcgcacaagaaaaaccuguacgaucaugcucuaauguccauaaucucuacguuccaccucucgauuccaaauuuuaaccaguaugaagccaugucaugugacuucaaugaugguaagaucagcguccaguacaaccugagucacacuuaugcaggggacaccgccaaucauugcggaacaguggcuaacggcguacuucaaacuuuuaugcggauggcauggggcggguccuacauugcccuggauucuggacgcgguggcugggacuguaucaugaccagcuaccaguauuugauaauucagaacacaaccugggaggaucacugccaguucucccgaccgucacccaucggguaccucggacuguuaagucaacguacgagagacauuuauaucagcaggcggcugcucggcacuuuuacauggacccuuucugauuccgaagguaaggacacuccugggggauacugucugacacgcuggauguugaucgaggcugagcuaaaaugcuucggcaauaccgccguugcgaaguguaacgaaaaacaugaugaggaauuuugcgacaugcugagacucuucgauuuuaauaagcaggcaauucagaggcugaaagccgaggcucagaugucaauacaacuuaucaacaaggccgugaaugcacugauuaacgaccaguugaucaugaagaaucaccuccgggacauaaugggcauuccauauugcaacuacagcaaauauugguaccugaaucacacggucaccgggaagacaaguuuacccaaauguuggcuggugucuaacggauccuaccuaaaugaaacucauuucagcgaugacaucgagcagcaagcugauaacaugaucaccgagaugcuccagaaggaauauauggagcgccaggguaaaacaccucugggccuuguggacuuguucgucuuuucgacuucuuucuaccugauuuccaucuuucuccaccugguuaagauuccaacccaucgacacgugguagggaaacccugcccuaagccacauagacuuaaucacaugggaauauguucaugcggcuucuauaagcagccgggugugcccgucagguggaaacgguga

SEQ ID NO: 1256 - RNA, 1476 nt, Artificial Sequence
  derived and/or modified protein sequence (opt3) from LASV(Mad41;Clade IV)__ANH09724__GPC
augggccagaucgugaccuucuuucaagaggucccccacguuauugaagaggugaugaacauaguacugaucgcccucagcauucuugcugugcugaagggguuguacaaugucgcaacaugcggauuaaucggucuggugacuuuccuacuccuguguggcagauccugcacgaccacacuuuauaaagggguuuacgaacugcaggccuuggagcucaacauggaaacucugaauaugaccaugccucugucuuguacaaagaacgacucacaucacuauauuauggugggaaaugagaccggccucgaguuaacucugacaaacaccaguaucauaagccauaaauuuugcaaucuuuccgaugcgcacaagcagaacuuguacgaccaugcucugaugucuaucauuucgacguuccaccuaucaaucccaaauuuuaaccaguaugaagccaugagcugugauuucaauggugggaaaauuaguguccaauacaaccucucccacacuuaugcaggagacgccgcuaaucauugcggcaccguggcaaacggcguacugcagacauuuaugaggauggccuggggagggucuuacaucgcucuugauagcggucggggcgggugggacuguauaaugacuuccuaccaguaucugauuauccagaauaccacaugggaggaucacugccaauucucacgcccgagucccauuggauacuugggccuccugagccagcgaacccgugacaucuauaucucuagaagguuacuggguacguuuacuuggacacucuccgauucagaagggaaggacaccccuggaggcuacugucuuacucgguggaugcugauugaggccgaguugaagugcuucggcaacacagcgguugcaaaauguaacgaaaagcaugaugaggaauuuugcgacaugcuacgccuguucgauuuuaauaaacaggccauacagagacucaaggcugaggcccaaaugagcauccagcugauuaacaaagcagugaaugcucuuaucaacgaccagcugauaaugaagaaucacuugagggacauuauggggaucccauauugcaacuacaguaaguauugguaccucaaucacaccgucacgggaaaaaccucucugcccaaguguugguuaguguccaacgguagcuaccugaaugaaacacauuucucggaugacaucgagcaacaggccgauaacaugauuacugagaugcuacagaaagaauauauggagcggcagggcaagaccccucucgggcugguggaccuuuucgucuuuucuacauccuucuacuugaucucaauuuuucugcaccucguuaaaauaccaacucaucgccacgugguaggaaagcccugcccuaaaccacaucgacugaaucacaugggcaucuguaguugcgguuucuaugggcaaccgggcgugcccgucagauggaagagguga

SEQ ID NO: 1257 - RNA, 1476 nt, Artificial Sequence
  derived and/or modified protein sequence (opt3) from LASV(Mad63;Clade IV)__ANH09728__GPC
augggccagaucgugaccuucuuucaagaggucccccacguuauugaagaggugaugaacauaguacugaucgcccucagcgugcuugcuguccugaagggguuguacaauguggcaacaugcggauuaauuggucugguuacuuuccuacuccuguguggcagauccugcacgaccacacuuuauaaagggguguacgaacugcaggccuuggagcucaacaugggaacucugaauaugaccaugccucugucuuguacaaagaacaauucacaucacuauaucauggucggcaacgaaaccggucucgaguuaacucugacaaauaccaguauuaucaaccauaaauuuugcaaucuuagcgacgcgcacaagaaagauuuguacgaccaugcucugauguccauaaucucuacguuccaccuaucggugccaaacuuuaaucaguaugaggccaugucaugugauuucaacgggggaaagauuagcguacaguacaaucucagucacgcauaugccggcgacacugcuaaccauugcggcaccguugcaaauggggugcugcaaacauuuaugaggauggccuggggagguuccuacaucgcucuugauucuggccgcgggggaugggacuguauuaugacuagcuaccaguaucugaucauacagaacaccacaugggaagaucacugccaguucucccggccgucacccauuggcuacuugggucuccugagucaacgaacccgugacaucuauauuagcagaagguuacuggggacguuuacuuggacacucucugauuccgagggagaauacaccccuggcggcuauugucuuacucgguggaugcugaucgaggccgaguugaagugcuucgggaacacagcggucgcaaaauguaaugaaaagcaugacgaggaauuuugcgauaugcuacgccuguucgacuuuaacaaacaggccauccagagacucaaggcugaggcccagaugucaauucaacugauaaauaaagcagugaacgcucuuaucaaugaucagcugauuaugaagaaccacuugagggacaucaugggaauaccauacugcaauuauagcaaguacugguaccucaaccacaccgugacggguaaaaccagucugcccaaguguugguuagucucuaauggcuccuaucugaacgaaacacauuucagcgacgauauugagcagcaagccgacaauaugaucacugagaugcuacagaaagaauacauggagcggcaggggaagaccccucucggacugguugaucuuuucguguuuucgacaucuuucuauuugaucuccauuuuucugcaccucguaaaaaucccaacucaucgccacguggucggcaagcccugcccuaaaccacaucgacugaaccacauggguauuuguucaugcggguucuacaagcagccgggcgugcccguuagauggaagagguga

SEQ ID NO: 1258 - RNA, 1476 nt, Artificial Sequence
  derived and/or modified protein sequence (opt3) from LASV(Mad69;Clade IV)__ANH09730__GPC
augggccagaucgugaccuucuuucaagaggucccccacguuauugaagaggugaugaacauaguacugaucgcccucagcgugcuugcuguccugaagggguuguacaauguggcaacaugcggauuaauuggucugguuacuuuccuacuccuguguggcagauccugcacgaccacacuuuauaaagggguguacgaacugcaggccuuggagcucaacauggaaacucugaauaugaccaugccucugucuuguacaaagaacaauucacaucacuauaucauggucggaaacgagaccggccucgaguuaacucugacaaauaccaguauuaucaaccauaaauuuugcaaucuuagcgacgcgcacaagaaaaacuuguacgaucaugcucugauguccauaaucucuacguuccaccuaucgauuccaaauuuuaaccaguaugaagccaugucaugugacuucaaucaggguaagaucagcgugcaauacaaccucagucacgcauaugccggggaugcugcaaaucauugcggaacuguagccaacggcguucugcagaccuuuaugaggauggcuuggggcggguccuacauugcccuugacucuggacgggguggcugggauuguaucaugacaagcuaccaguaucugauaauucagaacacuaccugggagaaucacugccaauucucccgcccgucacccaucggguacuugggacuccugagucagcgaacacgugacauuuauaucagcagaagguuacugggcaccuuuacguggacucucucugauuccgaagguaaggggacaccuggaggcuacugucuuacccgguggaugcugaucgaggcggaguugaaaugcuucggcaacacugcaguggccaaguguaaugaaaaacaugacgaggaauuuugcgauaugcuacgccuguucgacuuuaacaagcaggcuauucagagauucaaagccgaggcacaaaugucaauacagcucaucaauaaggcugucaacgcccugauuaaugaucagcuuaucaugaagaaccaccugagggacauaauggggauuccauauugcaauuacagcaaauauugguacuugaaccacacagugaccggaaagacgagucuccccaaauguuggcuggugucuaaugguuccuacuuaaacgaaacccauuucagcgaugacaucgagcaacaggcggacaauaugaucacagagaugcugcagaaggaauauauggagcggcagggccgcacuccucuagggcucgucgaucuguuuguuuucucgaccucuuuuuaccuuauuuccaucuucuugcaccuggugaaaauuccaacacaucgacacguagugggaaagcccugcccuaaaccacauagacucaaccacaugggcauauguucaugcgguuuuuauaagcaaccggggguccccgugagguggaagcgguga

SEQ ID NO: 1259 - RNA, 1476 nt, Artificial Sequence
  derived and/or modified protein sequence (opt3) from LASV(Mad83;Clade IV)__ANH09732__GPC
augggccagaucgugaccuucuuucaagaggucccccacguuauugaagaggugaugaacauaguacugaucgcccucagcauucuugcugugcugaagggggucuacaauguggcaacaugcggauugaucgguuuaguuacuuuccugcuacucuccggcagaucuuguacgaccacaauuuauaaagggguguacgaacugcaggcccuugagcugaacauggaaacuuugaauaugaccaugccucucucaugcacaaagaacaauagucaucacuauaucauggucggaaacgagaccggccuggagcugacucucacaaauaccagcauaaucaaccauaaauuuuguaauuuauccgacgcgcacaagaaaaaccuguacgaucaugcucuuaugucuauuaucucgacguuccacuugucaauuccaaauuuuaaccaguaugaagccaugagcugcgacuucaauggugggaagaucagugugcaguacaaccugucccacacuuaugcaggagaugccgcuaaucauuguggcaccguagcaaacggcguucuacaaacauuuaugaggauggccuggggagggucuuacauagcucucgacagcggucacggcgggugggauugcauuaugacuuccuaccaguaucugaucauucagaacaccacaugggagaaucauugucaguucucacggccgagucccaucggauaccuuggccuguugagccaacgcacccgagacaucuauauuucucguagacuccuggguacguuuacuuggacauuauccgauucagaagggaaggacaccccuggaggcuacugccugacuagguggaugcucauagaggccgagcuuaaauguuucggcaacacagcgguggcaaagugcaaugaaaaacacgaugaggaauuuugugacaugcugcgguuguucgauuuuaacaagcaggccauccagcgccuaaaagcugaggcccagaugagcauucaacugaucaauaaggcagucaacgcucucauaaaugaccagcugauuaugaagaaccaccuuagagauaucauggggaucccauauugcaauuacaguaaauauugguaccugaaccauaccgugacgggaaagaccucuuugcccaaaugcuggcucguguccaaugguagcuaccugaacgaaacacacuucucggacgacauugagcagcaagccgauaauaugaucacugagauguuacagaaggaauauauggagaggcagggcaaaaccccucuggggcuagucgaccucuucguguuuucuacauccuucuaccugauuucaauauuucuucauuugguuaagaucccaacucaccggcauauuguaggaaaacccuguccuaagccacaccgccugaaccacaugggcaucugcaguugugguuucuauaagcagccgggggugcccguccgauggaaaagauga

SEQ ID NO: 1260 - RNA, 1476 nt, Artificial Sequence
  derived and/or modified protein sequence (opt3) from LASV(NL;Clade IV)__AAO59512__GPC
augggccagaucgugaccuucuuucaagaggucccccacguuauugaagaggugaugaacauaguacugaucgcccucagcauucuugcugugcugaagggguuguacaauuucgcaacaugcggauuagucggucugguggccuuucuacuccuguguggcagauccugcacuucuucacuuuauaaagggguuuacgaacugcagacguuggagcucaacauggaaacccugaauaugacaaugccucugaguuguacuaagaacaauagccaucacuauaucagggugggaaacgagaccggccucgaguuaacacugaccaauacuuccauuaucaaccauaaauucugcaaucuuucugacgcgcacaagaaaaacuuguacgaucaugcucugaugucgauaaucucaacauuucaccuaagcauuccaaauuucaaccaguaugaagccaugaguugugacuuuaauggugggaagaucuccguccaguacaaccucucucacagcuaugcaguggaugccgcuaagcauugcggaaccguagcaaauggcguucugcaaacguucaugcggauggccuggggcggguccuacauugcucuugacucaggacacggucgcugggauuguaucaugaccaguuaccaguaucugauaauucagaacacuacaugggaggaccauugccaguuuagccgaccgucucccaucggcuacuuggggcuccugucccaacguacuagagauauuuauaucucaaggcgguuacugggaaccuucacauggacccucagcgacagugaaggcaaagauacgccugguggguacugucuuacucgcuggaugcugaucgaggccgaguugaagugcuuuggaaacacagcgguggcaaaauguaaugaaaagcacgacgaggaguucugcgauaugcuaagacuguuugacuucaacaaacaggccauucagaggcucaagaccgaagcucagaugucuauacaacugaucaauaaggccgucaacgcacuuauuaaugaucagcugaucaugaaaaaccacuugcgggacauaaugggcauuccauauugcaauuacucccgcuauugguaccucaaccauacuacaaccggcaagacgagccugcccaaauguugguuagugucgaaugggucuuaccugaacgaaacccgauucuccgacgauaucgagcagcaagcugacaauaugaucacagagaugcuacagaaggaauauauggagagacagggaaaaacuccucucggucugguggaucuuuuugucuucucaaccaguuuuuacuugauuagcaucuuccugcaccucguuaagauuccaacacauaggcacauagugggcaaauccugccccaagccucaucggcugaaccacauggggaucuguucuugcggacuuuauaagcagccaggcguaccggugaaauggaagcguuga

SEQ ID NO: 1261 - RNA, 1476 nt, Artificial Sequence
  derived and/or modified protein sequence (opt3) from LASV(Z0947-SLE-2011;Clade IV)__AIT17840__GPC
augggccagaucgugaccuucuuucaagaggucccccacguuauugaagaggugaugaacauaguacugaucgcccucagcauucuugcugugcugaagggguuguacaauuucgcaacaugcggauuagucggucuggugacuuuucuacuccuguguggcagauccugcacgaucucucuuuauaaagggguuuacgaacugcagaccuuggagcucaacauggaaacacugaauaugacuaugccucugucauguaccaagaacaauagucaucacuauauuauggugggaaacgagacaggccucgaguuaacccugacuaauacaagcaucauaaaccauaaauucugcaaucuuuccgacgcccacaagaaaaacuuguacgaucaugcgcugaugucuaucauuucgaccuuucaccuaucaaucccaaauuucaaccaguaugaagcuaugagcugugacuuuaauggugggaagauuaguguccaguacaaccucucccacucuuaugccggagaugcagccaaucauugcggcacgguggcuaacggcguacugcaaacuuucaugaggauggcauggggagggagcuacaucgcccuugacuccggucgggaucgcugggacuguauaaugaccucauaccaguaucugauuauccagaacacaacuugggaggaucacugccaguuuagucgaccgagccccauuggcuacuuggggcuccugucucaacguaccagagacaucuauaucuccaggcgguuacugggaacauucaccuggacgcucucagauagcgaaggcaaggacacuccugguggguacugucuuacacgcuggaugcugauugaggcugaguugaaaugcuuuggaaauaccgccguugcgaaguguaacgaaaaacaugaugaggaguucugcgacaugcuaagacuguuugauuucaauaagcaggcaauacagaggcucaaagccgaagcucagaugaguauccaacugauuaacaaggccgugaaugcacuuaucaacgaccagcugauaaugaagaaucacuugcgggacauuaugggcaucccauauugcaacuacucuaaauauugguaccucaaucacacuacaaccggcaagacgucccugcccaaauguugguuagucagcaacgggucguaccugaaugaaacccauuucucugaugacaucgagcagcaagcugauaacaugauuacagagaugcuacagaaggaauauauggagcgccagggaaaaacuccucucggucugguggaccuuuuuguguucuccaccucauuuuacuugaucaguauuuuccugcaccucgucaagauaccaacacaucgacacaucguuggcaaacccugcccuaagccacauagacugaaucacauggggauuuguagcugcggacuuuauaagcagccgggcgugcccguaaaauggaagagguga

SEQ ID NO: 1262 - RNA, 1476 nt, Artificial Sequence
  derived and/or modified protein sequence (opt3) from LASV(Z0948-SLE-2011;Clade IV)__AIT17844__GPC
augggccagaucgugaccuucuuucaagaggucccccacguuauugaagaggugaugaacauaguacugaucgcccucagcauucuugcugugcugaagggguuguacaauuucgcaacaugcggauuagucggucuggugacuuuucuacuccuguguggcagauccugcacgaucucucuuuauaaagggguuuacgaacugcagaccuuggagcucaacauggaaacacugaauaugacuaugccucugucauguaccaagaacaauagucaucacuauauuauggugggaaacgagacaggccucgaguuaacccugacuaauacaagcaucauaaaccauaaauucugcaaucuuuccgacgcccacaagaaaaacuuguacgaucaugcgcugaugucuaucauuucgaccuuucaccuaucaaucccaaauuucaaccaguaugaagcuaugagcugugacuuuaauggugggaagauuaguguccaguacaaccucucccacucuuaugccggagaugcagccaaucauugcggcacgguggcuaacggcguacugcaaacuuucaugaggauggcauggggagggagcuacaucgcccuugacuccggucgggaucgcugggacuguauaaugaccucauaccaguaucugauuauccagaacacaacuugggaggaucacugccaguuuagucgaccgagccccauuggcuacuuggggcuccugucucaacguaccagagacaucuauaucuccaggcgguuacugggaacauucaccuggacgcucucagauagcgaaggcaaggacacuccugguggguacugucuuacacgcuggaugcugauugaggcugaguugaaaugcuuuggaaauaccgccguugcgaaguguaacgaaaaacaugaugaggaguucugcgacaugcuaagacuguuugauuucaauaagcaggcaauacagaggcucaaagccgaagcucagaugaguauccaacugauuaaccgggccgugaaugcacuuaucaacgaccagcugauaaugaagaaucacuugcgcgacauuaugggcaucccauauugcaacuacucuaaguauugguaccucaaucacacuacaaccggcaaaacgucccugcccaaguguugguuagucagcaacgggucguaccugaaugaaacccauuucucugaugacaucgagcagcaagcugauaacaugauuacagagaugcuacagaaagaauauauggagcgacagggaaagacuccucucggucugguggaccuuuuuguguucuccaccucauuuuacuugaucaguauuuuccugcaccucgucaaaauaccaacacauagacacaucguuggcaagcccugcccuaaaccacauaggcugaaucacauggggauuuguagcugcggacuuuauaagcagccgggcgugcccguaaaguggaaacgguga

SEQ ID NO: 1263 - RNA, 1476 nt, Artificial Sequence
  derived and/or modified protein sequence (opt3) from LASV(Z148;Clade IV)__AAT49008__GPC
augggccagaucgugaccuucuuucaagaggucccccacguuauugaagaggugaugaacauaguacugaucgcccucagcauucuugcugugcugaagggguuguacaaugucgcaacaugcggauuaaucggucuggugacuuuccuauuucucuguggcagauccugcucuacgacccuguauaaagggguuuacgaacuucagacacuggaguugaacauggaaacucucaauaugaccaugccucugucauguacaaagaacaauagucaucacuauauuauggugggaaacgagaccggccuggagcucacuuuaacaaauaccagcaucauaaaccauaaauucugcaaucuguccgacgcccacaagaaaaaccuuuacgaucauacguugaugucuaucauuucgacuuuucaccugucaaucccaaauuucaaccaguaugaagcgaugagcugugacuuuaauggugggaagauuaguguccaguacaaccuaucccacucuuaugcuguggaugccgcaaaucauugcggaaccguagccaacggcguucuccaaacauucaugaggauggcuuggggcgggagcuacaucgcacuggacuccggacgggguaacugggauuguauaaugacuucauaccaguaucuuauuauccagaauaccacaugggaggaccacugccaguuuagucgcccgagccccauuggcuaccugggguugcucucucaacgaacccgugauaucuauaucuccagaaggcuguuaggaacguucacuuggacacugucagacagcgaaggcaaggauaccccugguggguacugucucacucgguggaugcuuauugaggccgagcugaaaugcuuuggaaacacagcuguggccaaguguaaugaaaaacaugacgaggaguucugcgauauguugcgccuauuugacuucaacaagcaggcgauacagagacugaaagcagaagcccagaugaguauccaacucauuaauaaggcugucaacgcccugaucaaugaucagcuuauaaugaagaaccaccugagggacauuaugggcaucccauauugcaauuacucucgguauugguacuugaaccacaccgugacgggcaaaaccucccuccccaaguguuggcuggugagcaaugggucguacuuaaacgaaacacauuucucugacgauaucgagcagcaagcagacaaucugauuacugagaugcuacagaaagaauauauggagcgccagggaaagaccccucucggucuggucgaucuuuuuguuuucuccacaucauuuuacuugaucaguauuuuccugcaccucgugaaaauaccaacucaucgacacaucguaggcaagcccugcccuaaaccacauagacugaaccacauggggauuuguagcugcggaguguauaagcagccgggcguccccgugagguggaagcgguga

SEQ ID NO: 1264 - RNA, 1476 nt, Artificial Sequence
  derived and/or modified protein sequence (opt3) from LASV(Bamba-R114;Clade V)__AHC95555__GPC
augggccagaucgugaccuucuuucaagaggucccccacguuauugaagaggugaugaacauaguacugaucgcccucagcauucuugcugugcugaagggguuguacaauaucgcaacaugcggauuaauuggucuggucacuuuccuacuccuguguggcagauccugcaguucaaaccuuuauaaagggguguacgaacugcagaguuuggaccucaauauggagacgcugaacaugaccaugccucugagcuguacaaagaauaacucccaucacuauaucagggccggaaaugaaacuggccucgaguuaacccugacaaacaccucucuuauaaaucauaaauuuugcaacuugucggaugcgcacaagaaaaaucuguacgaccauacucuaaugucaaucauuagcacauuccaccucaguaucccaaacuuuaaucaguaugaggcuauguccugugauuucaacggugggaagauuucuguucaguacaaucugagccacgccuaugcaaucgacgccgcugaacauugcggaaccguggcaaacggcguccuucaaacguuuaugcggauggccuggggcggguccuacauagcucuggauucaggacgcgguaacugggacuguauuaugacuucuuaccaguauuugaucauucagaauaccacaugggaggaucacugccaguucagccgaccgucucccaucggcuaccucgggcuguuaucccaacguacuagagacaucuauauuucaaggcggcugcucggaaccuuuacauggacccuuagcgauagugaaggcaacgccacgccugguggguacugucugacucgcuggauguugauagaggcggagcuaaagugcuucggaaauacagcaguggccaaauguaacgaaaagcaugacgaggaauuuugcgauaugcugagacucuucgacuuuaauaaacaggcuaucucuaggcugaaguccgaggcccagaugagcauucagcuuaucaacaaagcaguaaaugcucugauaaacgaucaauugauuaugaagaaucaccuccgggacaucaugggcaucccauauugcaacuacucgaaguauugguaccugaaucacaccauuacuggccgcacaucuuuacccaaauguuggcugguuuccaacgggucauaccuaaaugaaacccauuucagugacgauaucgagcagcaggccgacaacaugauuacggagaugcuccaaaaggaauauauggagcgacagggaaaaaccccucugggucuuguggauuuguucgucuuuagcacauccuucuaccugauaucuaucuuucuccaccuggugaagauuccaacucauagacacaucgugggcaaacccugcccuaagccacauaggcuuaaucacauggggaucuguagcugcggacuguauaaacagccgggcguccccuugaaguggaagcgguga

SEQ ID NO: 1265 - RNA, 1476 nt, Artificial Sequence
  derived and/or modified protein sequence (opt3) from LASV(Komina-R16;Clade V)__AHC95557__GPC
augggccagaucgugaccuucuuucaagaggucccccacguuauugaagaggugaugaacauaguacugaucgcccucagcauucuugcugugcugaagggguuguacaauaucgcaacaugcggauuaauuggucuggucacuuucuuucuacucuguggcagauccuguucuucaaaccuguauaaagggguguacgaacuucagagucuggacuugaauauggagacgcucaacaugaccaugccucugagcugcacaaagaauaacucccaucacuauaucaggguuggaaaugaaacuggccuggagcucaccuuaacaaacaccucucugcuuaaucauaaauucugcaacuugucggaugcccacaagcggaaucuguacgaccaugcgcuaaugucaauaaucagcacuuuucaccucaguauuccaaacuucaaucaguaugaggcuauguccugugauuuuaacggugggaaaaucacagugcaguacaaucugucucacagcuaugccggagacaccgcaaagcauugcggcacgauugccaacggcguccuucaaacuuucaugcgcauggcuuggggaggguccuacaucgcacuggauucaggucacggcaacugggacuguauaaugaccaguuaccaguauuugauuauccagaauacaacuugggaagaucauugccaguuuagccgaccgucucccauuggguaccucggacuguuaucccaacguaccagagacaucuauaucucaaggcggcugcucggcacauucaccuggacgcuuagcgauagugaggguaacgccacuccugggggauacugucugacacgcuggauguugauugaagcugagcuaaagugcuuuggcaauaccgccguggcgaaauguaacgagaagcacgacgaagaguucugcgauaugcugagacucuuugacuucaauaaacaggcaauaucuaggcugcgguccgaagcccagaugagcauccagcuuauuaacaaggcuguaaaugcccugaucaacgaucaauugauaaugaaaaaucaccuccgcgacauuaugggcaucccauauugcaacuacucgaaguauugguaccugaaucauacuguuacagggcgaaccucuuuacccaaguguuggcugguguccaacggaucauaccuaaaugagacgcacuucagugacgauaucgaacagcaggcagacaacaugauuaccgagaugcuccaaaaagaguauauggauagacaggguaagacaccucugggccuugucgacuuguuuguguucagcacuuccuuuuaccugaucucuauuuuccuccaucuggugaaaauaccaacccacaggcauaucgucgggaagcccugcccuaaaccacaccggcuuaaucguaugggaauuuguagcugcggccuguauaagcagccggguguucccgugaaauggaagcgcuga

SEQ ID NO: 1266 - RNA, 1476 nt, Artificial Sequence
  derived and/or modified protein sequence (opt3) from LASV(Ouoma-R123;Clade V)__AHC95559__GPC
augggccagaucauuaccuucuuucaagaggugccccacgucauagaagagguuaugaacaucgugcugauugcccucagcauccuugcuguacugaagggguuguacaauauugcaacaugcggauuaaucggucuggugacuuuccuacuccuguguggcagauccuguucuucaagucuuuauaaaggggucuacgaacugcagagcuuggaccucaacauggagacgcugaauaugaccaugccucuguccugcacaaagaacaauucucaucacuauauaagggugggaaacgaaacuggccucgaguuaacccugacaaauaccucgcuuaucaaccauaaauuuugcaauuugucagaugcccacaagaaaaaccuguacgaccaugcgcuaaugagcauuaucaguacuuuccaccucuccauuccaaauuuuaaccaguaugaggcuaugucuugugauuucaauggugggaagaucagcguucaguacaaccugucccacgccuaugcaauagacgccgcuucacauugcggaacaguggcaaauggcguccuucaaaccuuuaugcggauggccuggggcgggaguuacauugcucuggauagcggacacgguaacugggacuguaucaugacgucuuaccaguauuugauuauccagaacacuaccugggaagaucauugccaguucucccgcccgucacccaucggcuaccucgggcuguuaagccaacgaacacgugacauuuauauaaguagaaggcugcucggaacuuuuaccuggacacuuucugauuccgagggcaaugccaccccugguggguacugucugacgcgguggauguugaucgaagcggagcuaaagugcuucggaaacacugcaguggccaaauguaaugagaagcacgacgaagaguuuugcgauaugcugcgccucuucgacuuuaacaaacaggcuauuagcagacugaagucggaagcccagaugucuauccagcuuauaaauaaagcaguaaacgcucugauuaaugaucaauugaucaugaagaaccaccucagggacaucaugggcauuccauauugcaauuacuccaaguauugguaccugaaccauacaguuaccggcaaaacuucauuacccaaguguuggcuggugaguaaugggagcuaccuaaacgagacacacuucuccgacgauaucgaacagcaggccgacaauaugauuaccgagaugcuccaaaaagaguauauggaacggcagggaaagacgccucugggucuugucgauuuguucguguuuucuaccagcuucuaccugauaucaaucuuucuccaucuggugaaaauuccaacacaccgccauaucgucggcaagcccugcccuaaaccacaccgacuuaaccacauggggaucuguaguugcggacuguauaagcagccgggcguucccgugaaguggaaaagauga

SEQ ID NO: 1267 - RNA, 1476 nt, Artificial Sequence
  derived and/or modified protein sequence (opt3) from LASV(Soromba-R;Clade V)__AHC95553__GPC
augggccagaucgugaccuucuuucaagaggucccccacguuauugaagaggugaugaacauaguacugaucgcccucagcauucuugcugugcugaagggguuguacaauaucgcaacaugcggauuaauuggucuggucacuuucuuucuacucuguggcagauccugcaguucaaaccuguauaaagggguguacgaacuucagagucuggacuugaauauggagacgcucaacaugaccaugccucugagcuguacaaagaauaacucccaucacuauaucaggguuggaaaugaaacuggccuggagcucaccuuaacaaacaccucucugcuugaucauaaauucugcaauuugucggacgcccacaagaaaaaccuguacgaucaugcgcuaaugucaauaaucagcacuuuucaccucaguauuccaaauuucaaccaguaugaggcuauguccugugacuuuaauggugggaagaucacagugcaguacaaccugucucacagcuaugccggagaugcagcccggcauugcggcaccauugcuaauggcguccuucaaacguucaugcgcauggcauggggaggguccuacaucgcccuggacucaggucacggcaacugggauuguauaaugacuucuuaccaguauuugauuauccagaacaccacaugggaagaccauugccaguuuagccgaccgucucccauuggguaccucucccuguuaucacaacguacuagagauaucuauaucagcaggcggcugcucggaaccuucacauggacccuuagugacucugagggcaaugcuacgccugguggguacugucugacucgcuggauguugauugaagccgagcuaaagugcuuuggaaacacagcgguggcaaaauguaaugagaagcacgaugaagaguucugcgacaugcugagacucuuugauuucaacaaacaggccauauccaggcugcggagcgaagcucagaugucgauccagcuuauuaauaaggccguaaacgcacugaucaaugaccaauugauaaugaaaaaccaccuccgcgacauuaugggcaucccauauugcaauuacucuaaguauugguaccugaaccauaccguuacuggccgaacauccuuacccaaguguuggcuggugucaaaugggaguuaccuaaacgagacccacuucagcgaugacaucgaacagcaggcugauaauaugauuacggagaugcuccaaaaagaguauauggacagacagggaaagaccccucugggucuugucgauuuguuuguguucuccacaucuuuuuaccugaucagcauuuuccuccaucuggugaaaauaccaacucacaggcauaucgucggcaagcccugcccuaaaccacaccggcuuaaccguauggggauuuguucaugcggacuguauaagcagccgggcguucccgugaaauggaagcgcuga

SEQ ID NO: 1268 - RNA, 1473 nt, Artificial Sequence; identical to SEQ ID NO: 1022
  derived and/or modified protein sequence (opt3) from LASV(Alzey;Clade VI)__SCA79105__GPC

SEQ ID NO: 1269 - RNA, 1473 nt, Artificial Sequence
  derived and/or modified protein sequence (opt3) from LASV(Lassa/H.sapiens-wt/TGO/2016/201600568;Clade VI)__AVN98153__GPC
augggccagaucauuaccuucuuucaagaggugccccacgucauagaagagguuaugaacaucgugcugauugcccucagccuucuggcuaucuugaaggggguauacaauguggcaacaugcggaauuaucgguuuagucacuuuccuguuucuauguggcagauccugcucucucauauauaaagggucauacgaacugcagacgcuugagcugaacauggaaaccuugaauaugacaaugccucucaguuguacuaagaacagcucccaucacuauaucagggugggaaaugagaccggccuggagcugacacucaccaacacuucuauuaucaaucauaaauucugcaacuuaucggacgcccacaagcggaaucuguacgaucaugcgcuuaugucaauuuugagcacauuucaccugaguaucccaaacuucaaucaguaugaagcuauguccugugacuuuaacggugggaaaauaucuguucaguacaaucuaagccacgccuaugcaguggaugccgcugagcauugcggaaccgucgcaaacggcgugcuccaaacguucaugcgcauggccuggggcggguccuacauugcucuggacucaggacgagguaauugggauuguaucaugaccaguuaccaguaucuuauuauccagaacacuacaugggaagaccacugccaguuuagccguccgucucccaucggcuaccugggguugcucucccaaagaacuagggauauuuauauaucacggcgccuguuaggaaccuucacauggacccugagcgacagugagggcaacgagacgccugguggguacugucucacuagauggaugcuuaucgaagccgagcugaagugcuuuggaaauacagcgguagcaaaguguaacgaaaaacaugaugaggaguucugcgacauguugaggcuauuugauuucaauaagcaggccauucagcggcugaaaucugaagcucagauguccauccaacucauaaacaaggccguuaaugcacugauuaacgaccagcuuaucaugaaaaaucaucugcgcgauaugaugggcaucccauauugcaacuacagcaaguauugguacuugaaucacaccucgucuggccgagcuucccuccccaaguguuggcuggugucaaacgggaguuacuuaaaugagacucacuucagcgacgacauugaacagcaagccgauaacaugaucacagagaugcugcagaaagaauauauugacagacagggaaagaccccucuaggucucgucgaucuguuuguguucuccacgucuuuuuaccuuauaagcaucuucuugcaccugauuaaaaucccaacccauaggcacaucgugggcaagcccugcccuaaaccacaucggcucaaucacauggggauuuguucaugcggacuguauaagcagccgggcguccccacacguuggaaacgcuga

SEQ ID NO: 1270 - RNA, 1473 nt, Artificial Sequence
  derived and/or modified protein sequence (opt3) from LASV(NIGERIA IKEJI;Clade II)__AMZ00373__GPC
augggccagaucauuaccuucuuucaagaggugccccacgucauagaagagguuaugaacaucgugcugauugcccucagccuucuggcuaucuugaaggggauuuacaauguagcaacaugcggauuauucggucugaucuccuuucuauuccucuguggcagaucuugcucaacuauguauaaagggguguacgaacugcagacgcuugagcuggacauggccaacuugaauaugaccaugccucucaguuguacaaagaacaauagccaucacuauauaauggucggaaacgaaacuggccuggagcugacccucacaaaucaguccaucauuaaccauaaauuuugcaauuuaucugaugcgcacaagaaaaaccuguacgaccauacccuuaugucgaucauuucaacuuuccacuugagcaucccaaauuuuaaccaguaugaggcuaugaguugugauuucaauggugggaagauauccgugcaauacaaccugucucacagcuaugccguugacgcagccaaucauugcggaacaguggcuaacggcguccuacagaccuuuaugaggauggcauggggcggguccuacauugcccucgauucaggaaaggguaacugggacuguaucaugacgaguuaccaguaucugauuauccagaauacuaccugggaagaucacugccaauucagccggccgucucccaucggcuaccuugggcuguugucccagcgcacacgagacauuuauauaucacguagacuccugggaacuuuuaccuggacauuaagcgauagugagggcaacgacgcuccugguggguacugucugaccagguggaugcucaucgaagccgagcuuaaaugcuucggaaauacggcgauugcaaaguguaacgagaaacaugaugaagaguuuugcgacaugcugcgguuguucgauuucaauaagcaggccaucaaacgccuaaaggcugaagcccagaugucuauacaacugauuaacaaggcagugaaugcucucaucaacgaccagcugaucaugaaaaaucaccuuagagacauuaugggcaucccauauugcaacuacuccaaguauugguaccugaauaacacuguaacaggcaaaagcucguugcccaaguguuggcucguuucuaauggguccuaccugaacgagacccacuuuucagaugacauugaacagcaagccgauaauaugauaacugagauguuacagaaagaguauauggacaggcagggaaagacaccucugggucuaguggaucucuucgucuuuaguaccagcuucuaccugaucuccauuuuucuucauuuggugaaaaucccaacgcaccggcauaucaccggcaagcccugcccuaagccacaccgccugaaccauauggggauuuguucuugcggacucuauaaacagccgggcgugcccgucaaguggaaacgauga

SEQ ID NO: 1271 - RNA, 1476 nt, Artificial Sequence
  derived and/or modified protein sequence (opt4) from LASV(Josiah;Clade IV)__NP_694870__GPC
augggccagaucgugaccuucuuccaggaggugccccacgugaucgaggaggugaugaacaucgugcugaucgcccugagcgugcuggccgugcugaagggccuguacaacuucgccaccugcggccuggugggccuggugaccuuccugcugcugugcggcagaagcugcaccaccagccuguacaagggcguguacgagcugcagacccuggagcugaacauggagacccugaacaugaccaugccccugagcugcaccaagaacaacagccaccacuacaucauggugggcaacgagaccggccuggagcugacccugaccaacaccagcaucaucaaccacaaguucugcaaccugagcgacgcccacaagaagaaccuguacgaccacgcccugaugagcaucaucagcaccuuccaccugagcauccccaacuucaaccaguacgaggccaugagcugcgacuucaacggcggcaagaucagcgugcaguacaaccugagccacagcuacgccggcgacgccgccaaccacugcggcaccguggccaacggcgugcugcagaccuucaugagaauggccuggggcggcagcuacaucgcccuggacagcggcagaggcaacugggacugcaucaugaccagcuaccaguaccugaucauccagaacaccaccugggaggaccacugccaguucagcagacccagccccaucggcuaccugggccugcugagccagagaaccagagacaucuacaucagcagaagacugcugggcaccuucaccuggacccugagcgacagcgagggcaaggacacccccggcggcuacugccugaccagauggaugcugaucgaggccgagcugaagugcuucggcaacaccgccguggccaagugcaacgagaagcacgacgaggaguucugcgacaugcugagacuguucgacuucaacaagcaggccauccagagacugaaggccgaggcccagaugagcauccagcugaucaacaaggccgugaacgcccugaucaacgaccagcugaucaugaagaaccaccugagagacaucaugggcauccccuacugcaacuacagcaaguacugguaccugaaccacaccaccaccggcagaaccagccugcccaagugcuggcuggugagcaacggcagcuaccugaacgagacccacuucagcgacgacaucgagcagcaggccgacaacaugaucaccgagaugcugcagaaggaguacauggagagacagggcaagaccccccugggccugguggaccuguucguguucagcaccagcuucuaccugaucagcaucuuccugcaccuggugaagauccccacccacagacacaucgugggcaagagcugccccaagccccacagacugaaccacaugggcaucugcagcugcggccuguacaagcagcccggcgugcccgugaaguggaagagauga

SEQ ID NO: 1272 - RNA, 1473 nt, Artificial Sequence
  derived and/or modified protein sequence (opt4) from LASV(LP;Clade I)__AAF86701__GPC
augggccagaucaucaccuucuuccaggaggugccccacgugaucgaggaggugaugaacaucgugcugaucgcccugagccugcuggccauccugaagggccuguacaacaucgccaccugcggcaucaucggccugguggccuuccuguuccugugcggcaagagcugcagccugacccugaagggcggcuacgagcugcagacccuggagcugaacauggagacccugaacaugaccaugccccugagcugcaccaagaacagcagccaccacuacaucagagugggcaacgagaccggccuggagcugacccugaccaacaccagcaucaucaaccacaaguucugcaaccugagcgacgcccacaagaagaaccuguacgaccacgcccugaugagcaucaucagcaccuuccaccugagcauccccaacuucaaccaguacgaggccaugagcugcgacuucaacggcggcaagaucagcgugcaguacaaccugagccacagcuacgccggcgacgccgccgagcacugcggcaccguggccaacggcgugcugcagaccuucaugagaauggccuggggcggcagauacaucgcccuggacagcggcaagggcaacugggacugcaucaugaccagcuaccaguaccugaucauccagaacaccaccugggaggaccacugccaguucagcagacccagccccaucggcuaccugggccugcugagccagagaaccagagacaucuacaucagcagaagacugcugggcaccuucaccuggacccugagcgacagcgagggcaacgagacccccggcggcuacugccugaccagauggaugcugaucgaggccgagcugaagugcuucggcaacaccgccguggccaagugcaacgagaagcacgacgaggaguucugcgacaugcugagacuguucgacuucaacaagcaggccaucagaagacugaaggccgaggcccagaugagcauccagcugaucaacaaggccgugaacgcccugaucaacgaccagcugaucaugaagaaccaccugagagacaucaugggcauccccuacugcaacuacagcaaguacugguaccugaaccacaccagcagcggcagaaccagccugcccaagugcuggcugaucagcaacggcagcuaccugaacgagacccaguucagcgacgacaucgagcagcaggccgacaacaugaucaccgagaugcugcagaaggaguacaucgagagacagggcaagaccccccugggccugguggacaucuucaucuucagcaccagcuucuaccugaucagcaucuuccugcaccugaucaagauccccacccacagacacaucgugggcaagcccugccccaagccccacagacugaaccacaugggcgugugcagcugcggccuguacaagcaccccggcgugcccaccaaguggaagagauga

SEQ ID NO: 1273 - RNA, 1473 nt, Artificial Sequence
  derived and/or modified protein sequence (opt4) from LASV(803213;Clade II)__AAF86703__GPC
augggccagaucaucaccuucuuccaggaggugccccacgugaucgaggaggugaugaacaucgugcugaucgcccugagccugcuggccauccugaagggcaucuacaacguggccaccugcggccuguucggccugaucagcuuccugcugcugugcggcagaagcugcagcgugaccuacaagggcguguacgagcugcagacccuggagcugaacauggccaaccugaacaugaccaugccccugagcugcaccaagaacaacagccaccacuacaucauggugggcaacgagaccggccuggagcugacccugaccaacaccagcaucaucaaccacaaguucugcaaccugagcgacgcccacaagaagaaccuguacgaccacgcccugaugagcaucaucagcaccuuccaccugagcauccccaacuucaaccaguacgaggccaugagcugcgacuucaacggcggcaagaucagcgugcaguacaaccugagccacagcuucgccguggacgccgccaaccacugcggcaccaucgccaacggcgugcugcagaccuucaugagaauggccuggggcggcagcuacaucgcccuggacagcggcaagggcaacugggacugcaucaugaccagcuaccaguaccugaucauccagaacaccaccugggaggaccacugccaguucagcagacccagccccaucggcuaccugggccugcugagccagagaaccagagacaucuacaucagcagaagacugcugggcaccuucaccuggacccugagcgacagcgagggcaacgaggcccccggcggcuacugccugaccagauggaugcugaucgaggccgagcugaagugcuucggcaacaccgccguggccaagugcaacgagaagcacgacgaggaguucugcgacaugcugagacuguucgacuucaacaagcaggccaucaagagacugaagaccgaggcccagaugagcauccagcugaucaacaaggccgugaacgcccugaucaacgaccagcugaucaugaagaaccaccugagagacaucaugggcauccccuacugcaacuacagcagauacugguaccugaaccacaccgugaccggcaagaccagccugcccagaugcuggcuggugagcaacggcagcuaccugaacgagacccacuucagcgacgacaucgagcagcaggccgacaacaugaucaccgagaugcugcagaaggaguacauggacagacagggcaagaccccccugggccugguggaccuguucguguucagcaccagcuucuaccugaucagcaucuuccugcaccuggugaagauccccacccacagacacaucgugggcaagcccugccccaagccccacagacugaaccacaugggcaucugcagcugcggccuguacaagcaccccggcgugcccgugaaguggaagagauga

SEQ ID NO: 1274 - RNA, 1473 nt, Artificial Sequence
  derived and/or modified protein sequence (opt4) from LASV(GA391;Clade III)__CAA36645__GPC
augggccagaucgugaccuucuuccaggaggugccccacgugaucgaggaggugaugaacaucgugcugaucgcccugagcauccuggccauccugaagggccuguacaacguggccaccugcggccugaucggccuggugaccuuccugcugcugagcggcagaagcugcagccugaucuacaagggcaccuacgagcugcagacccuggagcugaacauggagacccugaacaugaccaugccccugagcugcaccaagaacaacagccaccacuacaucagagugggcaacgagaccggccuggagcugacccugaccaacaccagcauccugaaccacaaguucugcaaccugagcgacgcccacaagagaaaccuguacgaccacagccugaugagcaucaucagcaccuuccaccugagcauccccaacuucaaccaguacgaggccaugagcugcgacuucaacggcggcaagaucaccgugcaguacaaccugagccacagcuucgccguggacgccgccggccacugcggcacccuggccaacggcgugcugcagaccuucaugagaauggccuggggcggcagcuacaucgcccuggacagcggcagaggcaacugggacugcaucaugaccagcuaccaguaccugaucauccagaacaccaccugggacgaccacugccaguucagcagacccagccccaucggcuaccugggccugcugagccagagaaccagagacaucuacaucagcagaagacugcugggcaccuucaccuggacccugagcgacagcgagggcaacgagacccccggcggcuacugccugaccagauggaugcugaucgaggccgagcugaagugcuucggcaacaccgccguggccaagugcaacgagaagcacgacgaggaguucugcgacaugcugagacuguucgacuucaacaagcaggccaucagaagacugaagaccgaggcccagaugagcauccagcugaucaacaaggccgugaacgcccugaucaacgaccagcugaucaugaagaaccaccugagagacaucaugggcauccccuacugcaacuacagcagauacugguaccugaaccacaccagcaccggcaagaccagccugcccagaugcuggcugaucagcaacggcagcuaccugaacgagaccaaguucagcgacgacaucgagcagcaggccgacaacaugaucaccgagaugcugcagaaggaguacaucgacagacagggcaagaccccccugggccugguggaccuguucguguucagcaccagcuucuaccugaucagcaucuuccugcaccuggugaagauccccacccacagacacaucgugggcaagcccugccccaagccccacagacugaaccacaugggcaucugcagcugcggccuguacaagcagcccggcgugcccgugagauggaagagauga

SEQ ID NO: 1275 - RNA, 1476 nt, Artificial Sequence
  derived and/or modified protein sequence (opt4) from LASV(AV;Clade V)__CCA30314__GPC
augggccagaucgugaccuucuuccaggaggugccccacgugaucgaggaggugaugaacaucgugcugaucgcccugagcauccuggccgugcugaagggccuguacaacaucgccaccugcggccugaucggccugaucaccuuccugcugcugugcggcagaagcugcagcagcaaccuguacaagggcguguacgagcugcagagccuggaccugaacauggagacccugaacaugaccaugccccugagcugcaccaagaacaacagccaccacuacaucagagugggcaacgacaccggccuggagcugacccugaccaacaccagcauccugaaccacaaguucugcaaccugagcgacgcccacaagaaggaccuguacgaccacgcccugaugagcaucaucagcaccuuccaccugagcauccccaacuucaaccaguacgaggccaugagcugcgacuucaacggcggcaagaucagcgugcaguacaaccugagccacagcuacgccaucgacgccgccaaccacugcggcaccguggccaacggcauccugcagaccuucaugagaauggccuggggcggcagcuacaucgcccuggacagcggcagaggcaacugggacugcaucaugaccagcuaccaguaccugaucauccagaacaccaccugggagaaccacugccaguucagcagacccagccccaucggcuaccugggccugcugagccagagaaccagagacaucuacaucagcagaagacugcugggcaccuucaccuggacccugagcgacagcgagggcaacgccacccccggcggcuacugccugaccagauggaugcugaucgaggccgagcugaagugcuucggcaacaccgccguggccaagugcaacgagaagcacgacgaggaguucugcgacaugcugagacuguucgacuucaacaagcaggccaucagcagacugaagagcgaggcccagaugagcauccagcugaucaacaaggccgugaacgcccugaucaacgaccagcugaucaugaagaaccaccugagagacaucaugggcauccccuacugcaacuacagcaaguacugguaccugaaccacaccaucaccggcaagaccagccugcccaagugcuggcuggugagcaacggcagcuaccugaacgagacccacuucagcgacgacaucgagcagcaggccgacaacaugaucaccgagaugcugcagaaggaguacauggagagacagggcaagaccccccugggccugguggaccuguucguguucagcaccagcuucuaccugaucagcaucuuccugagacuggugaagauccccacccacagacacaucgugggcaagcccugccccaagccccacagacugaaccacaugggcaucugcagcugcggccuguacaagcagcccggcgugcccgugagauggaagagauga

SEQ ID NO: 1276 - RNA, 1473 nt, Artificial Sequence
  derived and/or modified protein sequence (opt4) from LASV(Togo/2016/7082;Clade VI)__AMR44577__GPC
augggccagaucaucaccuucuuccaggaggugccccacgugaucgaggaggugaugaacaucgugcugaucgcccugagccugcuggccauccugaagggcguguacaacguggccaccugcggcaucaucggccuggugaccuuccuguuccugugcggcagaagcugcagccugaucuacaagggcagcuacgagcugcagacccuggagcugaacauggagacccugaacaugaccaugccccugagcugcaccaagaacagcagccaccacuacaucagagugggcaacgagaccggccuggagcugacccugaccaacaccagcaucaucaaccacaaguucugcaaccugagcgacgcccacaagagaaaccuguacgaccacgcccugaugagcauccugagcaccuuccaccugagcauccccaacuucaaccaguacgaggccaugagcugcgacuucaacggcggcaagaucagcgugcaguacaaccugagccacgccuacgccguggacgccgccgagcacugcggcaccguggccaacggcgugcugcagaccuucaugagaauggccuggggcggcagcuacaucgcccuggacagcggcagaggcaacugggacugcaucaugaccagcuaccaguaccugaucauccagaacaccaccugggaggaccacugccaguucagcagacccagccccaucggcuaccugggccugcugagccagagaaccagagacaucuacaucagcagaagacugcugggcaccuucaccuggacccugagcgacagcgagggcaacgagacccccggcggcuacugccugaccagauggaugcugaucgaggccgagcugaagugcuucggcaacaccgccguggccaagugcaacgagaagcacgacgaggaguucugcgacaugcugagacuguucgacuucaacaagcaggccauccagagacugaagagcgaggcccagaugagcauccagcugaucaacaaggccgugaacgcccugaucaacgaccagcugaucaugaagaaccaccugagagacaugaugggcauccccuacugcaacuacagcaaguacugguaccugaaccacaccagcagcggcagaaccagccugcccaagugcuggcuggugagcaacggcagcuaccugaacgagacccacuucagcgacgacaucgagcagcaggccgacaacaugaucaccgagaugcugcagaaggaguacaucgacagacagggcaagaccccccugggccugguggaccuguucguguucagcaccagcuucuaccugaucagcaucuuccugcaccugaucaagauccccacccacagacacaucgugggcaagcccugccccaagccccacagacugaaccacaugggcaucugcagcugcggccuguacaagcagcccggcgugcccaccagauggaagagauga

SEQ ID NO: 1277 - RNA, 1473 nt, Artificial Sequence
  derived and/or modified protein sequence (opt4) from LASV(KAK-428;Clade n.d. (VII))__ANH09740__GPC
augggccagaucgugaccuucuuccaggaggugccccacgugaucgaggaggugaugaacaucgugcugaucgcccugagccugcuggccauccugaagggccuguacaacuucgccaccugcggcgugaucggccugaucaccuuccugcugcugugcggcagaagcugcagcgccaccuacaagggccaguacgagcugcagacccuggagcugaacauggagagccugaacaugaccaugccccugagcugcaccaagaacaacagccaccacuacaucagagccggcaacaacaccggccuggagcugacccugaccaacaccagcaucaucagccacaaguucugcaaccugagcgacgcccacaagaagaaccuguacgaccacacccugaugagcaucaucaccaccuuccaccugagcauccccaacuucaaccaguacgaggccaugagcugcgacuucaacggcggcaagaucagcauccaguacaaccugagccacagcuacgccggcgacgccgcccagcacugcggcaccguggccaacggcgugcugcagaccuucaugagaauggccuggggcggcagcuaccuggcccuggacagcggcagaagaggcugggacugcaucaucagcagcuaccaguaccugaucauccagaacaccaccugggacgaccacugccaguucagcagacccagccccaucggcuaccugggcuucgugagccagaagaccagagacaucuacaucagcagaagacugcugggcaccuucaccuggacccugagcgacagcgagggccacgacaugcccggcggcuacugccugaccagauggaugcugaucgaggccgaccugaagugcuucggcaacaccgccguggccaagugcaacgagaagcacgacgaggaguucugcgacauguggagacuguucgacuucaacaagcaggccauccagagacugaaggccgaggcccagaugaacauccagcugaucaacaaggccgugaacgcccugaucaacgaccagcugaugaugaagaaccaccugagagacaucaugggcauccccuacugcaacuacagcaaguucugguaccugaacaacaccaccaccggcagaaccagccugcccagaugcuggcugaucagcaacggcagcuaccugaacgagacccacuucagcgacgacaucgagcagcaggccgacaacaugaucaccgagaugcugcagaaggaguacauggacagacagggcaagaccccccugggccugguggaccuguucguguucagcaccagcuucuaccugaucaccaucuuccugcaccuggugaagauccccacccacagacacaucgugggcaagcccugccccaagccccacagacugaaccacaugggcaucugcagcugcggccuguacaagcagcccggcgugcccgugagauggaagagauga

SEQ ID NO: 1278 - RNA, 1473 nt, Artificial Sequence
  derived and/or modified protein sequence (opt4) from LASV(Acar 3080;Clade I)__AAT49014__GPC
augggccagaucaucaccuucuuccaggaggugccccacgugaucgaggaggugaugaacaucgugcugaucgcccugagccugcuggccauccugaagggccuguacaacaucgccaccugcggcaucaucggccugguggccuuccuguuccugugcggcaagagcugcagccugacccugaagggcggcuacgagcugcagacccuggagcugaacauggagacccugaacaugaccaugccccugagcugcaccaagaacagcagccaccacuacaucagagugggcaacgagaccggccuggagcugacccugaccaacaccagcaucaucaaccacaaguucugcaaccugagcgacgcccacaagaagaaccuguacgaccacgcccugaugagcaucaucagcaccuuccaccugagcauccccaacuucaaccaguacgaggccaugagcugcgacuucaacggcggcaagaucagcgugcaguacaaccugagccacagcuacgccggcgacgccgccgagcacugcggcaccguggccaacggcgugcugcagaccuucaugagaauggccuggggcggcagauacaucgcccuggacagcggcaagggcaacugggacugcaucaugaccagcuaccaguaccugaucauccagaacaccaccugggaggaccacugccaguucagcagacccagccccaucggcuaccugggccugcugagccagagaaccagagacaucuacaucagcagaagacugcugggcaccuucaccuggacccugagcgacagcgagggcaacgagacccccggcggcuacugccugaccagauggaugcugaucgaggccgagcugaagugcuucggcaacaccgccguggccaagugcaacgagaagcacgacgaggaguucugcgacaugcugagacuguucgacuucaacaagcaggccaucagaagacugaaggccgaggcccagaugagcauccagcugaucaacaaggccgugaacgcccugaucaacgaccagcugaucaugaagaaccaccugagagacaucaugggcauccccuacugcaacuacagcaaguacugguaccugaaccacaccagcagcggcagaaccagccugcccaagugcuggcugaucagcaacggcagcuaccugaacgagacccaguucagcgacgacaucgagcagcaggccgaccacaugaucaccgagaugcugcagaaggaguacaucgagagacagggcaagaccccccugggccugguggacaucuucaucuucagcaccagcuucuaccugaucagcaucuuccugcaccugaucaagauccccacccacagacacaucgugggcaagcccugccccaagccccacagacugaaccacaugggcgugugcagcugcggccuguacaagcaccccggcgugcccaccaaguggaagagauga

SEQ ID NO: 1279 - RNA, 1473 nt, Artificial Sequence; identical to SEQ ID NO: 1272
  derived and/or modified protein sequence (opt4) from LASV(Pinneo-NIG-1969;Clade I)__AIT17836__GPC

SEQ ID NO: 1280 - RNA, 1473 nt, Artificial Sequence
  derived and/or modified protein sequence (opt4) from LASV(ISTH0009-NIG-2011;Clade II)__AIT17404__GPC
augggccagaucaucaccuucuuccaggaggugccccacgugaucgaggaggugaugaacaucgugcugaucgcccugagccugcuggccauccugaagggcaucuacaacguggccaccugcggccuguucggccuggugagcuuccugcugcugugcggcagaagcugcagcaccaccuacaagggcguguacgagcugcagacccuggagcuggacauggccagccugaacaugaccaugccccugagcugcaccaagaacaacagccaccacuacaucauggugggcaacgagaccggccuggagcugacccugaccaacaccagcaucaucaaccacaaguucugcaaccugagcgacgcccacaagaagaaccuguacgaccacgcccugaugagcaucaucagcaccuuccaccugagcauccccaacuucaaccaguacgaggccaugagcugcgacuucaacggcggcaagaucagcgugcaguacaaccugagccacgccuacgccguggacgccgccaaccacugcggcaccaucgccaacggcgugcugcagaccuucaugagaauggccuggggcggcagcuacaucgcccuggacagcggcaagggcagcugggacugcaucaugaccagcuaccaguaccugaucauccagaacaccaccugggaggaccacugccaguucagcagacccagccccaucggcuaccugggccugcugagccagagaaccagagacaucuacaucagcagaagacugcugggcaccuucaccuggacccugagcgacagcgagggcaacgagacccccggcggcuacugccugaccagauggaugcugaucgaggccgagcugaagugcuucggcaacaccgccguggccaagugcaacgagaagcacgacgaggaguucugcgacaugcugagacuguucgacuucaacaagcaggccaucagaagacugaagaccgaggcccagaugagcauccagcugaucaacaaggccgugaacgcccugaucaacgaccagcugaucaugaagaaccaccugagagacaucaugggcauccccuacugcaacuacagcaaguacugguaccugaaccacaccgugaccggcaagaccagccugcccagaugcuggcuggugagcaacggcagcuaccugaacgagacccacuucagcgacgacaucgagcagcaggccgacaacaugaucaccgagcugcugcagaaggaguacauggacagacagggcaagaccccccugggccugguggaccuguucguguucagcaccagcuucuaccugaucagcaucuuccugcaccugaucaagauccccacccacagacacaucaccggcaagcccugccccaagccccacagacugaaccacaugggcaucugcagcugcggccuguacaagcaccccggcgugcccgugaaguggaagagauga

SEQ ID NO: 1281 - RNA, 1473 nt, Artificial Sequence
  derived and/or modified protein sequence (opt4) from LASV(ISTH0012-NIG-2011;Clade II)__AIT17408__GPC
augggccagaucaucaccuucuuccaggaggugccccacgugaucgaggaggugaugaacaucgugcugaucgcccugagccugcuggccauccugaagggcaucuacaacguggccaccugcggccuguucggccuggugagcuuccugcugcugugcggcagaagcugcagcaccaccuacaagggcguguacgagcugcagacccuggagcuggacauggccagccugaacaugaccaugccccugagcugcaccaagaacaacagccaccacuacaucauggugggcaacgagaccggccuggagcugacccugaccaacaccagcaucaucaaccacaaguucugcaaccugagcgacgcccacaagaagaaccuguacgaccacgcccugaugagcaucaucagcaccuuccaccugagcauccccaacuucaaccaguacgaggccaugagcugcgacuucaacggcggcaagaucagcgugcaguacaaccugagccacaccuacgccguggacgccgccaaccacugcggcaccguggccaacggcgugcugcagaccuucaugagaauggccuggggcggcagcuacaucgcccuggacagcggcaagggcagcugggacugcaucaugaccagcuaccaguaccugaucauccagaacaccaccugggaggaccacugccaguucagcagacccagccccaucggcuaccugggccugcugagccagagaaccagagacaucuacaucagcagaagacugcugggcaccuucaccuggacccugagcgacagcgagggcaacgagacccccggcggcuacugccugaccagauggaugcugaucgaggccgagcugaagugcuucggcaacaccgccguggccaagugcaacgagaagcacgacgaggaguucugcgacaugcugagacuguucgacuucaacaagcaggccaucagaagacugaagaccgaggcccagaugagcauccagcugaucaacaaggccgugaacgcccugaucaacgaccagcugaucaugaagaaccaccugagagacaucaugggcauccccuacugcaacuacagcaaguacugguaccugaaccacaccgugaccggcaagaccagccugcccagaugcuggcuggugagcaacggcagcuaccugaacgagacccacuucagcgacgacaucgagcagcaggccgacaacaugaucaccgagcugcugcagaaggaguacauggacagacagggcaagaccccccugggccugguggaccuguucguguucagcaccagcuucuaccugaucagcaucuuccugcaccuggugaagauccccacccacagacacgugaucggcaagcccugccccaagccccacagacugaaccacaugggcaucugcagcugcggccuguacaagcaccccggcgugcccgugaaguggaagagauga

SEQ ID NO: 1282 - RNA, 1473 nt, Artificial Sequence
  derived and/or modified protein sequence (opt4) from LASV(ISTH0047-NIG-2011;Clade II)__AIT17412__GPC
augggccagaucaucaccuucuuccaggaggugccccacgugaucgaggaggugaugaacaucgugcugaucgcccugagccugcuggccauccugaagggcaucuacaacguggccaccugcggccuguucggccuggugagcuuccugcugcugugcggcagaagcugcagcaccaccuacaagggcguguacgagcugcagacccuggagcuggacauggccagccugaacaugaccaugccccugagcugcaccaagaacaacagccaccacuacaucauggugggcaacgagaccggccuggagcugacccugaccaacaccagcaucaucaaccacaaguucugcaaccugagcgacgcccacaagaagaaccuguacgaccacgcccugaugagcaucaucagcaccuuccaccugagcauccccaacuucaaccaguacgaggccaugagcugcgacuucaacggcggcaagaucagcgugcaguacaaccugagccacgccuacgccguggacgccgccaaccacugcggcaccaucgccaacggcgugcugcagaccuucaugagaauggccuggggcggcagcuacaucgcccuggacagcggcaagggcagcugggacugcaucaugaccagcuaccaguaccugaucauccagaacaccagcugggaggaccacugccaguucagcagacccagccccaucggcuaccugggccugcugagccagagaaccagagacaucuacaucagcagaagacugcugggcaccuucaccuggacccugagcgacagcgagggcaacgagacccccggcggcuacugccugaccagauggaugcugaucgaggccgagcugaagugcuucggcaacaccgccguggccaagugcaacgagaagcacgacgaggaguucugcgacaugcugagacuguucgacuucaacaagcaggccaucagaagacugaagaccgaggcccagaugagcauccagcugaucaacaaggccgugaacgcccugaucaacgaccagcugaucaugaagaaccaccugagagacaucaugggcauccccuacugcaacuacagcaaguacugguaccugaaccacaccgugaccggcaagaccagccugcccagaugcuggcuggugagcaacggcagcuaccugaacgagacccacuucagcgacgacaucgagcagcaggccgacaacaugaucaccgagcugcugcagaaggaguacaucgacagacagggcaagaccccccugggccugguggaccuguucguguucagcaccagcuucuaccugaucagcaucuuccugcaccuggugaagauccccacccacagacacgugaucggcaagcccugccccaagccccacagacugaaccacaugggcaucugcagcugcggccuguacaagcaccccggcgugcccgugaaguggaagagauga

SEQ ID NO: 1283 - RNA, 1473 nt, Artificial Sequence
  derived and/or modified protein sequence (opt4) from LASV(ISTH0073-NIG-2011;Clade II)__AIT17416__GPC
augggccagaucaucaccuucuuccaggaggugccccacgugaucgaggaggugaugaacaucgugcugaucgcccugagccugcuggccauccugaagggcaucuacaacguggccaccugcggccuguucggccuggugagcuuccugcugcugugcggcagaagcugcagcaccaccuacaagggcguguacgagcugcagacccuggagcuggacauggccagccugaacaugaccaugccccugagcugcaccaagaacaacagccaccacuacaucauggugggcaacgagaccggccuggagcugacccugaccaacaccagcaucaucaaccacaaguucugcaaccugagcgacgcccacagaaagaaccuguacgaccacgcccugaugagcaucaucagcaccuuccaccugagcauccccaacuucaaccaguacgaggccaugagcugcgacuucaacggcggcaagaucagcgugcaguacaaccugagccacgccuacgccguggacgccgccaaccacugcggcaccaucgccaacggcgugcugcagaccuucaugagaauggccuggggcggcagcuacaucgcccuggacagcggcaagggcagcugggacugcaucaugaccagcuaccaguaccugaucauccagaacaccagcugggaggaccacugccaguucagcagacccagccccaucggcuaccugggccugcugagccagagaaccagagacaucuacaucagcagaagacugcugggcaccuucaccuggacccugagcgacagcgagggcaacgagacccccggcggcuacugccugaccagauggaugcugaucgaggccgagcugaagugcuucggcaacaccgccguggccaagugcaacgagaagcacgacgaggaguucugcgacaugcugagacuguucgacuucaacaagcaggccaucagaagacugaagaccgaggcccagaugagcauccagcugaucaacaaggccgugaacgcccugaucaacgaccagcugaucaugaagaaccaccugagagacaucaugggcauccccuacugcaacuacagcaaguacugguaccugaaccacaccgugaccggcaagaccagccugcccagaugcuggcuggugagcaacggcagcuaccugaacgagacccacuucagcgacgacaucgagcagcaggccgacaacaugaucaccgagcugcugcagaaggaguacaucgacagacagggcaagaccccccugggccugguggaccuguucguguucagcaccagcuucuaccugaucagcaucuuccugcaccuggugaagauccccacccacagacacgugaucggcaagcccugccccaagccccacagacugaaccacaugggcaucugcagcugcggccuguacaagcaccccggcgugcccgugaaguggaagagauga

SEQ ID NO: 1284 - RNA, 1473 nt, Artificial Sequence
  derived and/or modified protein sequence (opt4) from LASV(ISTH0230-NIG-2011;Clade II)__AIT17420__GPC
augggccagaucaucaccuucuuccaggaggugccccacgugaucgaggaggugaugaacaucgugcugaucgcccugagccugcuggccauccugaagggcaucuacaacguggccaccugcggccuguucggccuggugagcuuccugcugcugugcggcagaagcugcagcaccaccuacaagggcguguacgagcugcagacccuggagcuggacauggccagccugaacaugaccaugccccugagcugcaccaagaacaacagccaccacuacaucauggugggcaacgagaccggccuggagcugacccugaccaacaccagcaucaucaaccacaaguucugcaaccugagcgacgcccacaagaagaaccuguacgaccacgcccugaugagcaucaucagcaccuuccaccugagcauccccaacuucaaccaguacgaggccaugagcugcgacuucaacggcggcaagaucagcgugcaguacaaccugagccacaccuacgccguggacgccgccaaccacugcggcaccaucgccaacggcgugcugcagaccuucaugagaauggccuggggcggcagcuacaucgcccuggacagcggcaagggcagcugggacugcaucaugaccagcuaccaguaccugaucauccagaacaccaccugggaggaccacugccaguucagcagacccagccccaucggcuaccugggccugcugagccagagaaccagagacaucuacaucagcagaagacugcugggcaccuucaccuggacccugagcgacagcgagggcaacgagacccccggcggcuacugccugaccagauggaugcugaucgaggccgagcugaagugcuucggcaacaccgccguggccaagugcaacgagaagcacgacgaggaguucugcgacaugcugagacuguucgacuucaacaagcaggccaucagaagacugaagaccgaggcccagaugagcauccagcugaucaacaaggccgugaacgcccugaucaacgaccagcugaucaugaagaaccaccugagagacaucaugggcauccccuacugcaacuacagcaaguacugguaccugaaccacaccgugaccggcaagaccagccugcccagaugcuggcuggugagcaacggcagcuaccugaacgagacccacuucagcgacgacaucgagcagcaggccgacaacaugaucaccgagcugcugcagaaggaguacauggacagacagggcaagaccccccugggccugguggaccuguucguguucagcaccagcuucuaccugaucagcaucuuccugcaccugaucaagauccccacccacagacacaucaccggcaagcccugccccaagccccacagacugaaccacaugggcaucugcagcugcggccuguacaagcaccccggcgugcccgugaaguggaagagauga

SEQ ID NO: 1285 - RNA, 1473 nt, Artificial Sequence
  derived and/or modified protein sequence (opt4) from LASV(ISTH0531-NIG-2011;Clade II)__AIT17424__GPC
augggccagaucaucaccuucuuccaggaggugccccacgugaucgaggaggugaugaacaucgugcugaucgcccugagccugcuggccauccugaagggcaucuacaacguggccaccugcggccuguucggccuggugagcuuccugcugcugugcggcagaagcugcagcaccaccuacaagggcguguacgagcugcagacccuggagcuggacaugaccaaccugaacaugaccaugccccugagcugcaccaagaacaacagccaccacuacaucauggugggcaacgagaccggccuggagcugacccugaccaacaccagcaucaucaaccacaaguucugcaaccugagcgacgcccacaagaagaaccuguacaaccacgcccugaugagcaucaucagcaccuuccaccugagcauccccaacuucaaccaguacgaggccaugagcugcgacuucaacggcggcaagaucagcgugcaguacaaccugagccacgccuacgccguggacgccgccaaccacugcggcaccaucgccaacggcgugcugcagaccuucaugagaauggccuggggcggcagcuacaucgcccuggacagcggcaagggcagcugggacugcaucaugaccagcuaccaguaccugaucauccagaacaccaccugggaggaccacugccaguucagcagacccagccccaucggcuaccugggccugcugagccagagaaccagagacaucuacaucagcagaagacugcugggcaccuucaccuggacccugagcgacagcgagggcaacgagacccccggcggcuacugccugaccagauggaugcugaucgaggccgagcugaagugcuucggcaacaccgccguggccaagugcaacgagaagcacgacgaggaguucugcgacaugcugagacuguucgacuucaacaagcaggccaucagaagacugaagaccgaggcccagaccaacauccagcugaucaacaaggccgugaacgcccugaucaacgaccagcugaucaugaagaaccaccugagagacaucaugggcauccccuacugcaacuacagcaaguacugguaccugaaccacaccgugaccggcaagaccagccugcccagaugcuggcuggugagcaacggcagcuaccugaacgagacccacuucagcgacgacaucgagcagcaggccgacaacaugaucaccgagcugcugcagaaggaguacauggacagacagggcaagaccccccugggccugguggaccuguucguguucagcaccagcuucuaccugaucagcaucuuccugcaccuggugaagauccccacccacagacacaucaucggcaagcccugccccaagccccacagacugaaccacaugggcaucugcagcugcggccuguacaagcaccccggcgugcccgugaaguggaagagauga

SEQ ID NO: 1286 - RNA, 1473 nt, Artificial Sequence
  derived and/or modified protein sequence (opt4) from LASV(ISTH0595-NIG-2011;Clade II)__AIT17428__GPC
augggccagaucaucaccuucuuccaggaggugccccacgugaucgaggaggugaugaacaucgugcugaucgcccugagccugcuggccauccugaagggcaucuacaacguggccaccugcggccuguucggccuggugagcuuccugcugcugugcggcagaagcugcagcaccaccuacaagggcguguacgagcugcagacccuggagcuggacauggccagccugaacaugaccaugccccugagcugcaccaagaacaacagccaccacuacaucauggugggcaacgagaccggccuggagcugacccugaccaacaccagcaucaucaaccacaaguucugcaaccugagcgacgcccacaagaagaaccuguacgaccacgcccugaugagcaucaucagcaccuuccaccugagcauccccaacuucaaccaguacgaggccaugagcugcgacuucaacggcggcaagaucagcgugcaguacaaccugagccacaccuacgccguggacgccgccaaccacugcggcaccaucgccaacggcgugcugcagaccuucaugagaauggccuggggcggcagcuacaucgcccuggacagcggcaagggcagcugggacugcaucaugaccagcuaccaguaccugaucauccagaacaccaccugggaggaccacugccaguucagcagacccagccccaucggcuaccugggccugcugagccagagaaccagagacaucuacaucagcagaagacugcugggcaccuucaccuggacccugagcgacagcgagggcaacgagacccccggcggcuacugccugaccagauggaugcugaucgccgccgaccugaagugcuucggcaacaccgccguggccaagugcaacgagaagcacgacgaggaguucugcgacaugcugagacuguucgacuucaacaagcaggccaucgagagacugaagaccgaggcccagaugagcauccagcugaucaacaaggccgugaacgcccugaucaacgaccagcugaucaugaagaaccaccugagagacaucaugggcauccccuacugcaacuacagcaaguacugguaccugaaccacaccgugaccggcagaaccagccugcccagaugcuggcuggugagcaacggcagcuaccugaacgagacccacuucagcgacgacaucgagcagcaggccgacaacaugaucaccgagcugcugcagaaggaguacauggacagacagggcaagaccccccugggccugguggaccuguucguguucagcaccagcuucuaccugaucagcaucuuccugcaccuggugagaauccccacccacagacacgugaucggcaagcccugccccaagccccacagacugaaccacaugggcaucugcagcugcggccuguacaagcaccccggcgugcccgugaaguggaagagauga

SEQ ID NO: 1287 - RNA, 1473 nt, Artificial Sequence
  derived and/or modified protein sequence (opt4) from LASV(ISTH0964-NIG-2011;Clade II)__AIT17430__GPC
augggccagaucaucaccuucuuccaggaggugccccacgugaucgaggaggugaugaacaucgugcugaucgcccugagccugcuggccauccugaagggcaucuacaacguggccaccugcggccuguucggccuggugagcuuccugcugcugugcggcagaagcugcagcaccaccuacaagggcguguacgagcugcagacccuggagcuggacauggccagccugaacaugaccaugccccugagcugcaccaagaacaacagccaccacuacaucauggugggcaacgagaccggccuggagcugacccugaccaacaccagcaucaucaaccacaaguucugcaaccugagcgacgcccacaagaagaaccuguacgaccacgcccugaugagcaucaucagcaccuuccaccugagcauccccaacuucaaccaguacgaggccaugagcugcgacuucaacggcggcagaaucagcgugcaguacaaccugagccacaccuacgccguggacgccgccaagcacugcggcaccaucgccaacggcgugcugcagaccuucaugagaauggccuggggcggcagcuacaucgcccuggacagcggcaagggcagcugggacugcaucaugaccagcuaccaguaccugaucauccagaacaccaccugggaggaccacugccaguucagcagacccagccccaucggcuaccugggccugcugagccagagaaccagagacaucuacaucagcagaagacugcugggcaccuucaccuggacccugagcgacagcgagggcaacgagacccccggcggcuacugccugaccagauggaugcugaucgaggccgagcugaagugcuucggcaacaccgccguggccaagugcaacgagaagcacgacgaggaguucugcgacaugcugagacuguucgacuucaacaagcaggccaucagaagacugaagaccgaggcccagaugagcauccagcugaucaacaaggccgugaacgcccugaucaacgaccagcugaucaugaagaaccaccugagagacaucaugggcauccccuacugcaacuacagcaaguacugguaccugaaccacaccgugaccggcaagaccagccugcccagaugcuggcuggugagcaacggcagcuaccugaacgagacccacuucagcgacgacaucgagcagcaggccgacaacaugaucaccgagcugcugcagaaggaguacaucgacagacagggcaagaccccccugggccugguggaccuguucguguucagcaccagcuucuaccugaucagcaucuuccugcaccuggugaagauccccacccacagacacgugaucggcaagcccugccccaagccccacagacugaaccacaugggcaucugcagcugcggccuguacaagcaccccggcgugcccgugaaguggaagagauga

SEQ ID NO: 1288 - RNA, 1473 nt, Artificial Sequence
  derived and/or modified protein sequence (opt4) from LASV(ISTH1038-NIG-2011;Clade II)__AIT17438__GPC
augggccagaucaucaccuucuuccaggaggugccccacgugaucgaggaggugaugaacaucgugcugaucgcccugagccugcuggccauccugaagggcaucuacaacguggccaccugcggccuguucggccuggugagcuuccugcugcugugcggcagaagcugcagcaccaccuacaagggcguguacgagcugcagacccuggagcuggacauggccaaccugaacaugaccaugccccugagcugcaccaagaacaacagccaccacuacaucagagugggcaacgagaccggccuggagcugacccugaccaacaccagcaucaucagccacaaguucugcaaccugagcgacgcccacaagaagaaccuguacgaccacgcccugaugagcaucaucagcaccuuccaccugagcauccccaacuucaaccaguacgaggccaugagcugcgacuucaacggcggcaagaucagcgugcaguacaaccugagccacaccuacgccguggacgccgccaaccacugcggcaccaucgccaacggcgugcugcagaccuucaugagaauggccuggggcggcagcuacaucgcccuggacagcggcaagggcagcugggacugcaucaugaccagcuaccaguaccugaucauccagaacaccaccugggaggaccacugccaguucagcagacccagccccaucggcuaccugggccugcugagccagagaaccagagacaucuacaucagcagaagacugcugggcaccuucaccuggacccugagcgacagcgagggcaaggagacccccggcggcuacugccugaccagauggaugcugaucgaggccgagcugaagugcuucggcaacaccgccguggccaagugcaacgagaagcacgacgaggaguucugcgacaugcugagacuguucgacuucaacaagcaggccaucagaagacugaagaccgaggcccagaugaacauccagcugaucaacaaggccgugaacgcccugaucaacgaccagcugaucaugaagaaccaccugagagacaucaugggcauccccuacugcaacuacagcaaguacugguaccugaaccacaccgugaccggcaagaccagccugcccagaugcuggcuggugagcaacggcagcuaccugaacgagacccacuucagcgacgacaucgagcagcaggccgacaacaugaucaccgagcugcugcagaaggaguacaucgacagacagggcaagaccccccugggccugguggaccuguucguguucagcaccagcuucuaccugaucagcaucuuccugcaccuggugaagauccccacccacagacacgugaucggcaagcccugccccaagccccacagacugaaccagaugggcaucugcagcugcggccuguacaagcagcccggcgugcccgugaaguggaagagauga

SEQ ID NO: 1289 - RNA, 1473 nt, Artificial Sequence
  derived and/or modified protein sequence (opt4) from LASV(ISTH1048-NIG-2011;Clade II)__AIT17442__GPC
augggccagaucaucaccuucuuccaggaggugccccacgugaucgaggaggugaugaacaucgugcugaucgcccugagccugcuggccauccugaagggcaucuacaacguggccaccugcggccuguucggccuggugagcuuccugcugcugugcggcagaagcugcagcaccaccuacaagggcguguacgagcugcagacccuggagcuggacauggccagccugaacaugaccaugccccugagcugcaccaagaacaacagccaccacuacaucauggugggcaacgagaccggccuggagcugacccugaccaacaccagcaucaucaaccacaaguucugcaaccugagcgacgcccacagaaagaaccuguacgaccacgcccugaugagcaucaucagcaccuuccaccugagcauccccaacuucaaccaguacgaggccaugagcugcgacuucaacggcggcaagaucagcgugcaguacaaccugagccacgccuacgccguggacgccgccaaccacugcggcaccaucgccaacggcgugcugcagaccuucaugagaauggccuggggcggcagcuacaucgcccuggacagcggcaagggcagcugggacugcaucaugaccagcuaccaguaccugaucauccagaacaccagcugggaggaccacugccaguucagcagacccagccccaucggcuaccugggccugcugagccagagaaccagagacaucuacaucagcagaagacugcugggcaccuucaccuggacccugagcgacagcgagggcaacgagacccccggcggcuacugccugaccagauggaugcugaucgaggccgagcugaagugcuucggcaacaccgccguggccaagugcaacgagaagcacgacgaggaguucugcgacaugcugagacuguucgacuucaacaagcaggccaucagaagacugaagaccgaggcccagaugagcauccagcugaucaacaaggccgugaacgcccugaucaacgaccagcugaucaugaagaaccaccugagagacaucaugggcauccccuacugcaacuacagcaaguacugguaccugaaccacaccgugaccggcaagaccagccugcccagaugcuggcuggugagcaacggcagcuaccugaacgagacccacuucagcgacgacaucgagcagcaggccgacaacaugaucaccgagcugcugcagaaggaguacaucgacagacagggcaagaccccccugggccugguggaccuguucguguucagcaccagcuucuaccugaucagcaucuuccugcaccuggugaagauccccacccacagacacgugaucggcaagcccugccccaagccccacagaaucaaccacaugggcaucugcagcugcggccuguacaagcaccccggcgugcccgugaaguggaagagauga

SEQ ID NO: 1290 - RNA, 1473 nt, Artificial Sequence
  derived and/or modified protein sequence (opt4) from LASV(ISTH1058-NIG-2011;Clade II)__AIT17446__GPC
augggccagaucaucaccuucuuccaggaggugccccacgugaucgaggaggugaugaacaucgugcugaucgcccugagccugcuggccauccugaagggcaucuacaacguggccaccugcggccuguucggccuggugagcuuccugcugcugugcggcagaagcugcagcaccaccuacaagggcguguacgagcugcagacccuggagcuggacauggccagccugaacaugaccaugccccugagcugcaccaagaacaacagccaccacuacaucauggugggcaacgagaccggccuggagcugacccugaccaacaccagcaucaucaaccacaaguucugcaaccugagcgacgcccacaagaagaaccuguacgaccacgcccugaugagcaucaucagcaccuuccaccugagcauccccaacuucaaccaguacgaggccaugagcugcgacuucaacggcggcaagaucagcgugcaguacaaccugagccacaccuacgccguggacgccgccagccacugcggcaccguggccaacggcgugcugcagaccuucaugagaauggccuggggcggcagcuacaucgcccuggacagcggcaagggcagcugggacugcaucaugaccagcuaccaguaccugaucauccagaacaccaccugggaggaccacugccaguucagcagacccagccccaucggcuaccugggccugcugagccagagaaccagagacaucuacaucagcagaagacugcugggcaccuucaccuggacccugagcgacagcgagggcaacgagacccccggcggcuacugccugaccagauggaugcugaucgaggccgagcugaagugcuucggcaacaccgccguggccaagugcaacgagaagcacgacgaggaguucugcgacaugcugagacuguucgacuucaacaagcaggccaucagaagacugaagaccgaggcccagaugagcauccagcugaucaacaaggccgugaacgcccugaucaacgaccagcugaucaugaagaaccaccugagagacaucaugggcauccccuacugcaacuacagcaaguacugguaccugaaccacaccgugaccggcaagaccagccugcccagaugcuggcuggugagcaacggcagcuaccugaacgagacccacuucagcgacgacaucgagcagcaggccgacaacaugaucaccgagcugcugcagaaggaguacauggacagacagggcaagaccccccugggccugguggaccuguucguguucagcaccagcuucuaccugaucagcaucuuccugcaccuggugaagauccccacccacagacacgugaucggcaagcccugccccaagccccacagacugaaccacaugggcaucugcagcugcggccuguacaagcaccccggcgugcccgugaaguggaagagauga

SEQ ID NO: 1291 - RNA, 1473 nt, Artificial Sequence
  derived and/or modified protein sequence (opt4) from LASV(ISTH1064-NIG-2011;Clade II)__AIT17450__GPC
augggccagaucaucaccuucuuccaggaggugccccacgugaucgaggaggugaugaacaucgugcugaucgcccugagccugcuggccauccugaagggcaucuacaacguggccaccugcggccuguucggccuggugagcuuccugcugcugugcggcagaagcugcagcaccaccuacaagggcguguacgagcugcagacccuggagcuggacauggccagccugaacaugaccaugccccugagcugcaccaagaacaacagccaccacuacaucauggugggcaacgagaccggccuggagcugacccugaccaacaccagcaucaucaaccacaaguucugcaaccugagcgacgcccacaagaagaaccuguacgaccacgcccugaugagcaucaucagcaccuuccaccugagcauccccaacuucaaccaguacgaggccaugagcugcgacuucaacggcggcaagaucagcgugcaguacaaccugagccacaccuacgccguggacgccgccaaccacugcggcaccaucgccaacggcgugcugcagaccuucaugagaauggccuggggcggcagcuacaucgcccuggacagcggcaagggcagcugggacugcaucaugaccagcuaccaguaccugaucauccagaacaccaccugggaggaccacugccaguucagcagacccagccccaucggcuaccugggccugcugagccagagaaccagagacaucuacaucagcagaagacugcugggcaccuucaccuggacccugagcgacagcgagggcaacgagacccccggcggcuacugccugaccagauggaugcugaucgaggccgagcugaagugcuucggcaacaccgccguggccaagugcaacgagaagcacgacgaggaguucugcgacaugcugagacuguucgacuucaacaagcaggccaucagaagacugaagaccgaggcccagaugagcauccagcugaucaacaaggccgugaacgcccugaucaacgaccagcugaucaugaagaaccaccugagagacaucaugggcauccccuacugcaacuacagcaaguacugguaccugaaccacaccgugaccggcaagaccagccugcccagaugcuggcuggugagcaacggcagcuaccugaacgagacccacuucagcgacgacaucgagcagcaggccgacaacaugaucaccgagcugcugcagaaggaguacaucgacagacagggcaagaccccccugggccugguggaccuguucguguucagcaccagcuucuaccugaucagcaucuuccugcaccuggugaagauccccacccacagacacaucaucggcaagcccugccccaagccccacagacugaaccacaugggcaucugcagcugcggccuguacaagcaccccggcgugcccgugaaguggaagagauga

SEQ ID NO: 1292 - RNA, 1473 nt, Artificial Sequence
  derived and/or modified protein sequence (opt4) from LASV(ISTH1069-NIG-2011;Clade II)__AIT17454__GPC
augggccagaucaucaccuucuuccaggaggugccccacgugaucgaggaggugaugaacaucgugcugaucgccuucagccugcuggccauccugaagggcaucuacaacguggccaccugcggccuguucggccuggugagcuuccugcugcugugcggcagaagcugcagcaccaccuacaagggcguguacgagcugcagacccuggagcuggacauggccagccugaacaugaccaugccccugagcugcaccaagaacaacagccaccacuacaucauggugggcaacgagaccggccuggagcugacccugaccaacaccagcaucaucaaccacaaguucugcaaccugagcgacgcccacaagagaaaccuguacgaccacgcccugaugagcaucaucagcaccuuccaccugagcauccccaacuucaaccaguacgaggccaugagcugcgacuucaacggcggcaagaucagcgugcaguacaaccugagccacaccuacgccguggacgccgccggccacugcggcaccaucgccaacggcgugcugcagaccuucaugagaauggccuggggcggcagcuacaucgcccuggacagcggcaagggcagcugggacugcaucaugaccagcuaccaguaccugaucauccagaacaccaccugggaggaccacugccaguucagcagacccagccccaucggcuaccugggccugcugagccagagaaccagagacaucuacaucagcagaagacugcugggcaccuucaccuggacccugagcgacagcgagggcaacgagacccccggcggcuacugccugaccagauggaugcugaucgaggccgagcugaagugcuucggcaacaccgccguggccaagugcaacgagaagcacgacgaggaguucugcgacaugcugagacuguucgacuucaacaagcaggccaucagaagacugaagaccgaggcccagaugagcauccagcugaucaacaaggccgugaacgcccugaucaacgaccagcugaucaugaagaaccaccugagagacaucaugggcauccccuacugcaacuacagcaaguacugguaccugaaccacaccaucaccggcaagaccagccugcccagaugcuggcuggugagcaacggcagcuaccugaacgagacccacuucagcgacgacaucgagcagcaggccgacaacaugaucaccgagcugcugcagaaggaguacauggacagacagggcaagaccccccugggccugguggaccuguucguguucagcaccagcuucuaccugaucagcaucuuccugcaccuggugaagauccccacccacagacacaucaucggcaagcccugccccaagccccacagacugaaccacaugggcaucugcagcugcggccuguacaagcaccccggcgugcccgugagauggaagagauga

SEQ ID NO: 1293 - RNA, 1473 nt, Artificial Sequence
  derived and/or modified protein sequence (opt4) from LASV(ISTH1096-NIG-2012;Clade II)__AIT17458__GPC
augggccagaucaucaccuucuuccaggaggugccccacgugaucgaggaggugaugaacaucgugcugaucgcccugagccugcuggccauccugaagggcaucuacaacguggccaccugcggccuguucggccuggugagcuuccugcugcugugcggcagaagcugcagcaccaccuacaagggcguguacgagcugcagacccuggagcuggacauggccagccugaacaugaccaugccccugagcugcaccaagaacaacagccaccacuacaucauggugggcaacgagaccggccuggagcugacccugaccaacaccagcaucaucaaccacaaguucugcaaccugagcgacgcccacaagaagaaccuguacgaccacgcccugaugagcaucaucagcaccuuccaccugagcauccccaacuucaaccaguacgaggccaugagcugcgacuucaacggcggcaagaucagcgugcaguacaaccugagccacaccuacgccaucgacgccgccaaccacugcggcaccaucgccaacggcgugcugcagaccuucaugagaauggccuggggcggcagcuacaucgcccuggacagcggcaagggcagcugggacugcaucaugaccaccuaccaguaccugaucauccagaacaccaccugggaggaccacugccaguucagcagacccagccccaucggcuaccugggccugcugagccagagaaccagagacaucuacaucagcagaagacugcugggcaccuucaccuggacccugagcgacagcgagggcaacgagacccccggcggcuacugccugaccagauggaugcugaucgaggccgagcugaagugcuucggcaacaccgccguggccaagugcaacgagaagcacgacgaggaguucugcgacaugcugagacuguucgacuucaacaagcaggccaucagaagacugaagaccgaggcccagaugagcauccagcugaucaacaaggccgugaacgcccugaucaacgaccagcugaucaugaagaaccaccugagagacaucaugggcauccccuacugcaacuacagcaaguacugguaccugaaccacaccgugaccggcaagaccagccugcccagaugcuggcuggugagcaacggcagcuaccugaacgagacccacuucagcgacgacaucgagcagcaggccgacaacaugaucaccgagcugcugcagaaggaguacauggacagacagggcaagaccccccugggccugguggaccuguucguguucagcaccagcuucuaccugaucagcaucuuccugcaccuggugaagauccccacccacagacacgugaucggcaagcccugccccaagccccacagacugaaccacaugggcaucugcagcugcggccuguacaagcaccccggcgugcccgugaaguggaagagauga

SEQ ID NO: 1294 - RNA, 1473 nt, Artificial Sequence
  derived and/or modified protein sequence (opt4) from LASV(ISTH1107-NIG-2012;Clade II)__AIT17462__GPC
augggccagaucaucaccuucuuccaggaggugccccacgugaucgaggaggugaugaacaucgugcugaucgcccugagccugcuggccauccugaagggcaucuacaacguggccaccugcggccuguucggccuggugagcuuccugcugcugugcggcagaagcugcagcaccaccuacaagggcguguacgagcugcagacccuggagcuggacauggccagccugaacaugaccaugccccugagcugcaccaagaacaacagccaccacuacaucauggugggcaacgagaccggccuggagcugacccugaccaacaccagcaucaucaaccacaaguucugcaaccugagcgacgcccacaagaagaaccuguacgaccacgcccugaugagcaucaucagcaccuuccaccugagcauccccaacuucaaccaguacgaggccaugagcugcgacuucaacggcggcaagaucagcgugcaguacaaccugagccacgccuacgccguggacgccgccaaccacugcggcaccaucgccaacggcgugcugcagaccuucaugagaauggccuggggcggcagcuacaucgcccuggacagcggcaagggcagcugggacugcaucaugaccagcuaccaguaccugaucauccagaacaccaccugggaggaccacugccaguucagcagacccagccccaucggcuaccugggccugcugagccagagaaccagagacaucuacaucagcagaagacugcugggcaccuucaccuggacccugagcgacagcgagggcaacgagacccccggcggcuacugccugaccagauggaugcugaucgaggccgagcugaagugcuucggcaacaccgccguggccaagugcaacgagaagcacgacgaggaguucugcgacaugcugagacuguucgacuucaacaagcaggccaucagaagacugaagaccgaggcccagaugagcauccagcugaucaacaaggccgugaacgcccugaucaacgaccagcugaucaugaagaaccaccugagagacaucaugggcauccccuacugcaacuacagcaaguacugguaccugaaccacaccgugaccggcaagaccagccugcccaagugcuggcuggugagcaacggcagcuaccugaacgagacccacuucagcgacgacaucgagcagcaggccgacaacaugaucaccgagcugcugcagaaggaguacaucgacagacagggcaagaccccccugggccugguggaccuguucguguucagcaccagcuucuaccugaucagcaucuuccugcaccuggugaagauccccacccacagacacgugaucggcaagcccugccccaagccccacagacugaaccacaugggcaucugcagcugcggccuguacaagcaccccggcgugcccgugaaguggaagagauga

SEQ ID NO: 1295 - RNA, 1473 nt, Artificial Sequence
  derived and/or modified protein sequence (opt4) from LASV(ISTH1111-NIG-2011;Clade II)__AIT17466__GPC
augggccagaucaucaccuucuuccaggaggugccccaggugaucgaggaggugaugaacaucgugcugaucgcccugagccugcuggccauccugaagggcaucuacaacguggccaccugcggccuguucggccuggugagcuuccugcugcugugcggcagaagcugcagcaccaccuacaagggcguguacgagcugcagacccuggagcuggacauggccagccugaacaugaccaugccccugagcugcaccaagaacaacagccaccacuacaucauggugggcaacgagaccggccuggagcugacccugaccaaccagagcaucaucaaccacaaguucugcaaccugagcgacgcccacaagaagaaccuguacgaccacgcccugaugagcaucaucagcaccuuccaccugagcauccccaacuucaaccaguacgaggccaugagcugcgacuucaacggcggcaagaucagcgugcaguacaaccugagccacaccuucgccguggacgccgccaaccacugcggcaccaucgccaacggcgugcugcagaccuucaugagaauggccuggggcggcagcuacaucgcccuggacagcggcagaggcagcugggacugcaucaugaccagcuaccaguaccugaucauccagaacaccaccugggaggaccacugccaguucagcagacccagccccaucggcuaccugggccugcugagccagagaaccagagacaucuacaucagcagaagacugcugggcaccuucaccuggacccugagcgacagcgagggcaacgagacccccggcggcuacugccugaccagauggaugcugaucgaggccgagcugaagugcuucggcaacaccgccguggccaagugcaacgagaagcacgacgaggaguucugcgacaugcugagacuguucgacuucaacaagcaggccaucagaagacugaagaccgaggcccagaugagcauccagcugaucaacaaggccgugaacgcccugaucaacgaccagcugaucaugaagaaccaccugagagacaucaugggcauccccuacugcaacuacagcaaguacugguaccugaaccacaccaucaccggcaagaccagccugcccagaugcuggcuggugagcaacggcagcuaccugaacgagacccacuucagcgacgacaucgagcagcaggccgacaacaugaucaccgagcugcugcagaaggaguacauggacagacagggcaagaccccccugggccugguggaccuguucguguucagcaccagcuucuaccugaucagcaucuuccugcaccuggugaagauccccacccacagacacgugaucggcaagcccugccccaagccccacagacugaaccacaugggcaucugcagcugcggccuguacaagcaccccggcgugcccgugaaguggaagagauga

SEQ ID NO: 1296 - RNA, 1473 nt, Artificial Sequence
  derived and/or modified protein sequence (opt4) from LASV(ISTH1121-NIG-2012;Clade II)__AIT17470__GPC
augggccagaucaucaccuucuuccaggaggugccccacgugaucgaggaggugaugaacaucgugcugaucgcccugagccugcuggccauccugaagggcaucuacaacguggccaccugcggccuguucggccuggugagcuuccugcugcugugcggcagaagcugcagcaccaccuacaagggcguguacgagcugcagacccuggagcuggacauggccagccugaacaugaccaugccccugagcugcaccaagaacaacagccaccacuacaucauggugggcaacgagaccggccuggagcugacccugaccaacaccagcaucaucaaccacaaguucugcaaccugagcgacgcccacagaaagaaccuguacgaccacgcccugaugagcaucaucagcaccuuccaccugagcauccccaacuucaaccaguacgaggccaugagcugcgacuucaacggcggcaagaucagcgugcaguacaaccugagccacaccuacgccguggacgccgccaaccacugcggcaccaucgccaacggcgugcugcagaccuucaugagaauggccuggggcggcagcuacaucgcccuggacagcggcaagggcagcugggacugcaucaugaccagcuaccaguaccugaucauccagaacaccaccugggaggaccacugccaguucagcagacccagccccaucggcuaccugggccugcugagccagagaaccagagacaucuacaucagcagaagacugcugggcaccuucaccuggacccugagcgacagcgagggcaacgagacccccggcggcuacugccugaccagauggaugcugaucgaggccgagcugaagugcuucggcaacaccgccguggccaagugcaacgagaagcacgacgaggaguucugcgacaugcugagacuguucgacuucaacaagcaggccaucagaagacugaagaccgaggcccagaugagcauccagcugaucaacaaggccgugaacgcccugaucaacgaccagcugaucaugaagaaccaccugagagacaucaugggcauccccuacugcaacuacagcaaguacugguaccugaaccacaccgugaccggcaagaccagccugcccagaugcuggcuggugagcaacggcagcuaccugaacgagacccacuucagcgacgacaucgagcagcaggccgacaacaugaucaccgagcugcugcagaaggaguacaucgacagacagggcaagaccccccugggccugguggaccuguucguguucagcaccagcuucuaccugaucagcaucuuccugcaccuggugaagauccccacccacagacacgugaucggcaagcccugccccaagccccacagacugaaccacaugggcaucugcagcugcggccuguacaagcaccccggcgugcccgugaaguggaagagauga

SEQ ID NO: 1297 - RNA, 1473 nt, Artificial Sequence
  derived and/or modified protein sequence (opt4) from LASV(ISTH1129-NIG-2012;Clade II)__AIT17474__GPC
augggccagaucaucaccuucuuccaggaggugccccacgugaucgaggaggugaugaacaucgugcugaucgcccugagccugcuggccauccugaagggcaucuacaacguggccaccugcggccuguucggccuggugagcuuccugcugcugugcggcagaagcugcagcaccaccuacaagggcguguacgagcugcagacccuggagcuggacauggccagccugaacaugaccaugccccugagcugcaccaagaacaacagccaccacuacaucauggugggcaacgagaccggccuggagcugacccugaccaacaccagcaucaucaaccacaaguucugcaaccugagcgacgcccacaagaagaaccuguacgaccacgcccugaugagcaucaucagcaccuuccaccugagcauccccaacuucaaccaguacgaggccaugagcugcgacuucaacggcggcaagaucagcauccaguacaaccugagccacaccuacgccguggacgccgccaaccacugcggcaccaucgccaacggcgugcugcagaccuucaugagaauggccuggggcggcagcuacaucgcccuggacagcggcaagggcagcugggacugcaucaugaccagcuaccaguaccugaucauccagaacaccaccugggaggaccacugccaguucagcagacccagccccaucggcuaccugggccugcugagccagagaaccagagacaucuacaucagcagaagacugcugggcaccuucaccuggacccugagcgacagcgagggcaacgagacccccggcggcuacugccugaccagauggaugcugaucgaggccgagcugaagugcuucggcaacaccgccguggccaagugcaacgagaagcacgacgaggaguucugcgacaugcugagacuguucgacuucaacaagcaggccaucagaagacugaagaccgaggcccagaugagcauccagcugaucaacaaggccgugaacgcccugaucaacgaccagcugaucaugaagaaccaccugagagacaucaugggcauccccuacugcaacuacagcaaguacugguaccugaaccacaccaucaccggcaagaccagccugcccagaugcuggcuggugagcaacggcagcuaccugaacgagacccacuucagcgacgacaucgagcagcaggccgacaacaugaucaccgagcugcugcagaaggaguacaucgacagacagggcaagaccccccugggccugguggaccuguucguguucagcaccagcuucuaccugaucagcaucuuccugcaccuggugaagauccccacccacagacacaucaccggcaagcccugccccaagccccacagacugaaccacaugggcaucugcagcugcggccuguacaagcaccccggcgugcccgugagauggaagagauga

SEQ ID NO: 1298 - RNA, 1473 nt, Artificial Sequence
  derived and/or modified protein sequence (opt4) from LASV(ISTH1137-NIG-2011;Clade II)__AIT17478__GPC
augggccagaucaucaccuucuuccaggaggugccccacgugaucgaggaggugaugaacaucgugcugaucgcccugagccugcuggccauccugaagggcaucuacaacguggccaccugcggccuguucggccuggugagcuuccugcugcugugcggcagaagcugcagcaccaccuacaagggcguguacgagcugcagacccuggagcuggacauggccagccugaacaugaccaugccccugagcugcaccaagaacaacagccaccacuacaucauggugggcaacgagaccggccuggagcugacccugaccaacaccagcaucaucaaccacaaguucugcaaccugagcgacgcccacaagaagaaccuguacgaccacgcccugaugagcaucaucagcaccuuccaccugagcauccccaacuucaaccaguacgaggccaugagcugcgacuucaacggcggcaagaucagcgugcaguacaaccugagccacaccuacgccguggacgccgccgaccacugcggcaccaucgccaacggcgugcugcagaccuucaugagaauggccuggggcggcagcuacaucgcccuggacagcggcaagggcagcugggacugcaucaugaccagcuaccaguaccugaucauccagaacaccaccugggaggaccacugccaguucagcagacccagccccaucggcuaccugggccugcugagccagagaaccagagacaucuacaucagcagaagacugcugggcaccuucaccuggacccugagcgacagcgagggcaacgagacccccggcggcuacugccugaccagauggaugcugaucgaggccgagcugaagugcuucggcaacaccgccguggccaagugcaacgagaagcacgacgaggaguucugcgacaugcugagacuguucgacuucaacaagcaggccaucagcagacugaagaccgaggcccagaugagcauccagcugaucaacaaggccgugaacgcccugaucaacgaccagcugaucaugaagaaccaccugagagacaucaugggcauccccuacugcaacuacagcaaguacugguaccugaaccacaccgugaccggcaagaccagccugcccagaugcuggcuggugagcaacggcagcuaccugaacgagacccacuucagcgacgacaucgagcagcaggccgacaacaugaucaccgagaugcugcagaaggaguacaucgacagacagggcaagaccccccugggccugguggaccuguucguguucagcaccagcuucuaccugaucagcaucuuccugcaccuggugaagauccccacccacagacacgugaucggcaagcccugccccaagccccacagacugaaccacaugggcaucugcagcugcggccuguacaagcaccccggcgugcccgugaaguggaagagauga

SEQ ID NO: 1299 - RNA, 1473 nt, Artificial Sequence
  derived and/or modified protein sequence (opt4) from LASV(ISTH2010-NIG-2012;Clade II)__AIT17482__GPC
augggccagaucaucaccuucuuccaggaggugccccacgugaucgaggaggugaugaacaucgugcugaucgcccugagccugcuggccauccugaagggcaucuacaacguggccaccugcggccuguucggccuggugagcuuccugcugcugugcggcagaagcugcagcaccaccuacaagggcguguacgagcugcagacccuggagcuggacauggccagccugaacaugaccaugccccugagcugcaccaagaacaacagccaccacuacaucauggugggcaacgagaccggccuggagcugacccugaccaacaccagcaucaucaaccacaaguucugcaaccugagcgacgcccacaagaagaaccuguacgaccacgcccugaugagcaucaucagcaccuuccaccugagcauccccaacuucaaccaguacgaggccaugagcugcgacuucaacggcggcaagaucagcgugcaguacaaccugagccacgccuacgccguggacgccgccaaccacugcggcaccaucgccaacggcgugcugcagaccuucaugagaauggccuggggcggcagcuacaucgcccuggacagcggcaagggcagcugggacugcaucaugaccagcuaccaguaccugaucauccagaacaucaccugggaggaccacugccaguucagcagacccagccccaucggcuaccugggccugcugagccagagaaccagagacaucuacaucagcagaagacugcugggcaccuucaccuggacccugagcgacagcgagggcaacgagacccccggcggcuacugccugaccagauggaugcugaucgaggccgagcugaagugcuucggcaacaccgccguggccaagugcaacgagaagcacgacgaggaguucugcgacaugcugagacuguucgacuucaacaagcaggccaucagaagacugaagaccgaggcccagaugagcauccagcugaucaacaaggccgugaacgcccugaucaacgaccagcugaucaugaagaaccaccugagagacaucaugggcauccccuacugcaacuacagcaaguacugguaccugaaccacaccgugaccggcaagaccagccugcccagaugcuggcuggugagcaacggcagcuaccugaacgagacccacuucagcgacgacaucgagcagcaggccgacaacaugaucaccgagcugcugcagaaggaguacaucgacagacagggcaagaccccccugggccugguggaccuguucguguucagcaccagcuucuaccugaucagcaucuuccugcaccuggugaagauccccacccacagacacguggugggcaagcccugccccaagccccacagacugaaccacaugggcaucugcagcugcggccuguacaagcaccccggcgugcccgugaaguggaagagauga

SEQ ID NO: 1300 - RNA, 1473 nt, Artificial Sequence
  derived and/or modified protein sequence (opt4) from LASV(ISTH2016-NIG-2012;Clade II)__AIT17486__GPC
augggccagaucaucaccuucuuccaggaggugccccacgugaucgaggaggugaugaacaucgugcugaucgcccugagccugcuggccauccugaagggcaucuacaacguggccaccugcggccuguucggccuggugagcuuccugcugcugugcggcagaagcugcagcaccaccuacaagggcguguacgagcugcagacccuggagcuggacauggccagccugaacaugaccaugccccugagcugcaccaagaacaacagccaccacuacaucauggugggcaacgagaccggccuggagcugacccugaccaacaccagcaucaucaaccacaaguucugcaaccugagcgacgcccacaagaagaaccuguacgaccacgcccugaugagcaucaucagcaccuuccaccugagcauccccaacuucaaccaguacgaggccaugagcugcgacuucaacggcggcaagaucagcgugcaguacaaccugagccacaccuacgccguggacgccgccaaccacugcggcaccaucgccaacggcgugcugcagaccuucaugagaauggccuggggcggcagcuacaucgcccuggacagcggcaagggcagcugggacugcaucaugaccagcuaccaguaccugaucauccagaacaccaccugggaggaccacugccaguucagcagacccagccccgugggcuaccugggccugcugagccagagaaccagagacaucuacaucagcagaagacugcugggcaccuucaccuggacccugagcgacagcgagggcaacgagacccccggcggcuacugccugaccagauggaugcugaucgaggccgagcugaagugcuucggcaacaccgccguggccaagugcaacgagaagcacgacgaggaguucugcgacaugcugagacuguucgacuucaacaagcaggccaucagaagacugaagaccgaggcccagaugagcauccagcugaucaacaaggccgugaacgcccugaucaacgaccagcugaucaugaagaaccaccugagagacaucaugggcauccccuacugcaacuacagcaaguacugguaccugaaccacaccgugaccggcaagaccagccugcccagaugcuggcuggugagcaacggcagcuaccugaacgagacccacuucagcgacgacaucgagcagcaggccgacaacaugaucaccgagcugcugcagaaggaguacaucgacagacagggcaagaccccccugggccugguggaccuguucguguucagcaccagcuucuaccugaucagcaucuuccugcaccuggugaagauccccacccacagacacgugaucggcaagcccugccccaagccccacagacugaaccacaugggcaucugcagcugcggccuguacaagcaccccggcgugcccgugaaguggaagagauga

SEQ ID NO: 1301 - RNA, 1473 nt, Artificial Sequence
  derived and/or modified protein sequence (opt4) from LASV(ISTH2020-NIG-2012;Clade II)__AIT17490__GPC
augggccagaucaucaccuucuuccaggaggugccccacgugaucgaggaggugaugaacaucgugcugaucacccugagccugcuggccauccugaagggcaucuacaacguggccaccugcggccuguucggccuggugagcuuccugcugcugugcggcagaagcugcagcaccaccuacaagggcguguacgagcugcagacccuggagcuggacauggccaaccugaacaugaccaugccccugagcugcaccaagaacaacagccaccacuacaucauggugggcaacgagaccggccuggagcugacccugaccaacaccagcaucaucaaccacaaguucugcaaccugagcgacgcccacaagaagaaccuguacgaccacgcccugaugagcaucaucagcaccuuccaccugagcauccccaacuucaaccaguacgaggccaugagcugcgacuucaacggcggcaagaucagcgugcaguacaaccugagccacaccuucgccguggacgccgccaaccacugcggcaccaucgccaacggcgugcugcagaccuucaugagaauggccuggggcggcagcuacaucgcccuggacagcggcaagggcagcugggacugcaucaugaccagcuaccaguaccugaucauccagaacaccaccugggaggaccacugccaguucagcagacccagccccaucggcuaccugggccugcugagccagagaaccagagacaucuacaucagcagaagacugcugggcaccuucaccuggacccugagcgacagcgagggcaacgagacccccggcggcuacugccugaccagauggaugcugaucgaggccgagcugaagugcuucggcaacaccgccguggccaagugcaacgagaagcacgacgaggaguucugcgacaugcugagacuguucgacuucaacaagcaggccaucagaagacugaagaccgaggcccagaugagcauccagcugaucaacaaggccgugaacgcccugaucaacgaccagcugaucaugaagaaccaccugagagacaucaugggcauccccuacugcaacuacagcaaguacugguaccugaaccacaccgugaccggcaagaccagccugcccagaugcuggcuggugagcaacggcagcuaccugaacgagacccacuucagcgacgacaucgagcagcaggccgacaacaugaucaccgagcugcugcagaaggaguacauggacagacagggcaagaccccccugggccugguggaccuguucguguucagcaccagcuucuaccugaucagcaucuuccugcaccuggugaagauccccacccacagacacaucaucggcaagcccugccccaagccccacagacugaaccacaugggcaucugcagcugcggccuguacaagcaccccggcgugcccgugaaguggaagagauga

SEQ ID NO: 1302 - RNA, 1473 nt, Artificial Sequence
  derived and/or modified protein sequence (opt4) from LASV(ISTH2025-NIG-2012;Clade II)__AIT17494__GPC
augggccagaucaucaccuucuuccaggaggugccccacgugaucgaggaggugaugaacaucgugcugaucgcccugagccugcuggccauccugaagggcguguacaacguggccaccugcggccuguucggccuggugagcuuccugcugcugugcggcagaagcugcagcaccaucuacaagggcguguacgagcugcagacccuggagcuggacauggccagccugaacaugaccaugccccugagcugcaccaagaacaacagccaccacuacaucauggugggcaacgagaccggccuggagcugacccugaccaacaccagcaucaucaaccacaaguucugcaaccugagcgacgcccacaagaagaaccuguacgaccacgcccugaugagcaucaucagcaccuuccaccugagcauccccaacuucaaccaguacgaggccaugagcugcgacuucaacggcggcaagaucagcgugcaguacaaccugagccacaccuacgccguggacgccgccaaccacugcggcaccaucgccaacggcgugcugcagaccuucaugagaauggccuggggcggcagcuacaucgcccuggacagcggcaagggcagcugggacugcaucaugaccagcuaccaguaccugaucauccagaacaccagcugggaggaccacugccaguucagcagacccagccccaucggcuaccugggccugcugagccagagaaccagagacaucuacaucagcagaagacugcugggcaccuucaccuggacccugagcgacagcgagggcaacgagacccccggcggcuacugccugaccagauggaugcugaucgaggccgagcugaagugcuucggcaacaccgccguggccaagugcaacgagaagcacgacgaggaguucugcgacaugcugagacuguucgacuucaacaagcaggccaucagaagacugaagaccgaggcccagaugagcauccagcugaucaacaaggccgugaacgcccugaucaacgaccagcugaucaugaagaaccaccugagagacaucaugggcauccccuacugcaacuacagcaaguacugguaccugaaccacaccgugaccggcaagaccagccugcccagaugcuggcuggugagcaacggcagcuaccugaacgagacccacuucagcgacgacaucgagcagcaggccgacaacaugaucaccgagcugcugcagaaggaguacaucgacagacagggcaagaccccccugggccugguggaccuguucguguucagcaccagcuucuaccugaucagcaucuuccugcaccuggugaagauccccacccacagacacgugaucggcaagcccugccccaagccccacagacugaaccacaugggcaucugcagcugcggccuguacaagcaccccggcgugcccgugaaguggaagagauga

SEQ ID NO: 1303 - RNA, 1473 nt, Artificial Sequence
  derived and/or modified protein sequence (opt4) from LASV(ISTH2031-NIG-2012;Clade II)__AIT17498__GPC
augggccagaucaucaccuucuuccaggaggugccccacgugaucgaggaggugaugaacaucgugcugaucgcccugagccugcuggccauccugaagggcaucuacaacguggccaccugcggccuguucggccuggugagcuuccugcugcugugcggcagaagcugcagcaccaccuacaagggcguguacgagcugcagacccuggagcuggacauggccagccugaacaugaccaugccccugagcugcaccaagaacaacagccaccacuacaucauggugggcaacgagaccggccuggagcugacccugaccaacaccagcaucaucaaccacaaguucugcaaccugagcgacgcccacaagaagaaccuguacgaccacgcccugaugagcaucaucagcaccuuccaccugagcauccccaacuucaaccaguacgaggccaugagcugcgacuucaacggcggcaagaucagcgugcaguacaaccugagccacaccuacgccguggacgccgccaaccacugcggcaccaucgccaacggcgugcugcagaccuucaugagaauggccuggggcggcagcuacaucgcccuggacagcggcaagggcaacugggacugcaucaugaccagcuaccaguaccugaucauccagaacaccaccugggaggaccacugccaguucagcagacccagccccaucggcuaccugggccugcugagccagagaaccagagacaucuacaucagcagaagacugcugggcaccuucaccuggacccugagcgacagcgagggcaacgagacccccggcggcuacugccugaccagauggaugcugaucgagaccgagcugaagugcuucggcaacaccgccguggccaagugcaacgagaagcacgacgaggaguucugcgacaugcugagacuguucgacuucaacaagcaggccaucagcagacugagaagcgaggcccagaugagcauccagcugaucaacaaggccgugaacgcccugaucaacgaccagcugaucaugaagaaccaccugagagacaucaugggcauccccuacugcaacuacagcaaguacugguaccugaaccacaccgugaccggcaagaccagccugcccaagugcuggcuggugagcaacggcagcuaccugaacgagacccacuucagcgacgacaucgagcagcaggccgacaacaugaucaccgagaugcugcagaaggaguacaucgacagacagggcaagaccccccugggccugguggaccuguucguguucagcaccagcuucuaccugaucagcaucuuccugcaccuggugaagauccccacccacagacacaucaccggcaagcccugccccaagccccacagacugaaccacaugggcaucugcagcugcggccuguacaagcaccccggcgugcccgugaaguggaagagauga

SEQ ID NO: 1304 - RNA, 1473 nt, Artificial Sequence
  derived and/or modified protein sequence (opt4) from LASV(ISTH2037-NIG-2012;Clade II)__AIT17502__GPC
augggccagaucaucaccuucuuccaggagaucccccacgugaucgaggaggugaugaacaucgugcugaucacccugagccugcuggccauccugaagggcaucuacaacguggccaccugcggccuguucggccuggugagcuuccugcugcugugcggcaagagcugcagcaccaccuacaagggcguguacgagcugcagacccuggagcuggacauggccagccugaacaugaccaugccccugagcugcaccaagaacaacagccaccacuacaucauggugggcaacgagaccggccuggagcugacccugaccaacaccagcaucaucaaccacaaguucugcaaccugagcgacgcccacagaaagaaccuguacgaccacacccugaugagcaucaucagcaccuuccaccugagcauccccaacuucaaccaguacgaggccaugagcugcgacuucaacggcggcaagaucagcgugcaguacaaccugagccacgccuacgccaucgacgccgccacccacugcggcaccaucgccaacggcgugcugcagaccuucaugagaauggccuggggcggcagcuacaucgcccuggacagcggcaagggcggcugggacugcaucaugaccagcuaccaguaccugaucauccagaacaccaccugggaggaccacugccaguucagcagacccagccccaucggcuaccugggccugcugagccagagaaccagagacaucuacaucagcagaagacugcugggcaccuucaccuggacccugagcgacagcgagggcaacgagacccccggcggcuacugccugaccagauggaugcugaucgaggccgagcugaagugcuucggcaacaccgccguggccaagugcaacgagaagcacgacgaggaguucugcgacaugcugagacuguucgacuucaacaagcaggccaucagaagacugaagaccgaggcccagaugagcauccagcugaucaacaaggccgugaacgcccugaucaacgaccagcugaucaugagaaaccaccugagagacaucaugggcauccccuacugcaacuacagcaaguacugguaccugaaccacaccgugaccggcaagaccagccugcccaagugcuggcuggugagcaacggcagcuaccugaacgagacccacuucagcgacgacaucgagcagcaggccgacaacaugaucaccgagcugcugcagaaggaguacauggacagacagggcaagaccccccugggccugguggaccuguucguguucagcaccagcuucuaccugaucagcaucuuccugcaccuggugaagauccccacccacagacacgugaucggcaagcccugccccaagccccacagacugaaccacaugggcgugugcagcugcggccuguacaagcaccccggcgugcccgugaaguggaagagauga

SEQ ID NO: 1305 - RNA, 1473 nt, Artificial Sequence
  derived and/or modified protein sequence (opt4) from LASV(ISTH2042-NIG-2012;Clade II)__AIT17506__GPC
augggccagaucaucaccuucuuccaggaggugccccacgugaucgaggaggugaugaacaucgugcugaucgcccugagccugcuggccauccugaagggcaucuacaacguggccaccugcggccuguucggccuggugagcuuccugcugcugugcggcagaagcugcagcaccaccuacaagggcguguacgagcugcagacccuggagcuggacauggccagccugaacaugaccaugccccugagcugcaccaagaacaacagccaccacuacaucauggugggcaacgagaccggccuggagcugacccugaccaacaccagcaucaucaaccacaaguucugcaaccugagcgacgcccacaagaagaaccuguacgaccacgcccugaugagcaucaucagcaccuuccaccugagcauccccaacuucaaccaguacgaggccaugagcugcgacuucaacggcggcaagaucagcgugcaguacaaccugagccacgccuacgccguggacgccgccgagcacugcggcaccaucgccaacggcgugcugcagaccuucaugagaauggccuggggcggcagcuacaucgcccuggacagcggcaagggcagcugggacugcgugaugaccagcuaccaguaccugaucauccagaacaccaccugggaggaccacugccaguucagcagacccagccccaucggcuaccugggccugcugagccagagaaccagagacaucuacaucagcagaagacugcugggcaccuucaccuggacccugagcgacagcgagggcaacgagacccccggcggcuacugccugaccagauggaugcugaucgaggccgagcugaagugcuucggcaacaccgccguggccaagugcaacgagaagcacgacgaggaguucugcgacaugcugagacuguucgacuucaacaagcaggccaucgagagacugaagaccgaggcccagaugagcauccagcugaucaacaaggccgugaacgcccugaucaacgaccagcugaucaugaagaaccaccugagagacaucaugggcauccccuacugcaacuacagcaaguacugguaccugaaccacaccgugaccggcaagaccagccugcccagaugcuggcuggugagcaacggcagcuaccugaacgagacccacuucagcgacgacaucgagcagcaggccgacaacaugaucaccgagaugcugcagaaggaguacaucgacagacagggcaagaccccccugggccugguggaccuguucguguucagcaccagcuucuaccugaucagcaucuuccugcaccuggugaagauccccacccacagacacgugaucggcaagcccugccccaagccccacagacugaaccacaugggcaucugcagcugcggccuguacaagcaccccggcgugcccgugaaguggaagagauga

SEQ ID NO: 1306 - RNA, 1473 nt, Artificial Sequence
  derived and/or modified protein sequence (opt4) from LASV(ISTH2046-NIG-2012;Clade II)__AIT17510__GPC
augggccagaucaucaccuucuuccaggaggugccccacgugaucgaggaggugaugaacaucgugcugaucgcccugagccugcuggccauccugaagggcaucuacaacguggccaccugcggccuguucggccuggugagcuuccugcugcugugcggcagaagcugcagcaccaccuacaagggcguguacgagcugcagacccuggagcuggacauggccagccugaacaugaccaugccccugagcugcaccaagaacaacagccaccacuacaucauggugggcaacgagaccggccuggagcugacccugaccaacaccagcaucaucaaccacaaguucugcaaccugagcgacgcccacaagaagaaccuguacgaccacgcccugaugagcaucaucagcaccuuccaccugagcauccccaacuucaaccaguacgaggccaugagcugcgacuucaacggcggcaagaucagcgugcaguacaaccugagccacaccuacgccguggacgccgccaaccacugcggcaccaucgccaacggcgugcugcagaccuucaugagaauggccuggggcggcagcuacaucgcccuggacagcggcaagggcagcugggacugcaucaugaccagcuaccaguaccugaucauccagaacaccaccugggaggaccacugccaguucagcagacccagccccaucggcuaccugggccugcugagccagagaaccaaggacaucuacaucagcagaagacugcugggcaccuucaccuggacccugagcgacagcgagggcaacgagacccccggcggcuacugccugaccagauggaugcugaucgaggccgagcugaagugcuucggcaacaccgccguggccaagugcaacgagaagcacgacgaggaguucugcgacaugcugagacuguucgacuucaacaagcaggccaucagaagacugaagaccgaggcccagaugagcauccagcugaucaacaaggccgugaacgcccugaucaacgaccagcugaucaugaagaaccaccugagagacaucaugggcauccccuacugcaacuacagcaaguacugguaccugaaccacaccgugaccggcaagaccagccugcccagaugcuggcuggugagcaacggcagcuaccugaacgagacccacuucagcgacgacaucgagcagcaggccgacaacaugaucaccgagcugcugcagaaggaguacaucgacagacagggcaagaccccccugggccugguggaccuguucguguucagcaccagcuucuaccugaucagcaucuuccugcaccuggugaagauccccacccacagacacgugaucggcaagcccugccccaagccccacagacugaaccacaugggcaucugcagcugcggccuguacaagcaccccggcgugcccgugaaguggaagagauga

SEQ ID NO: 1307 - RNA, 1473 nt, Artificial Sequence
  derived and/or modified protein sequence (opt4) from LASV(ISTH2050-NIG-2012;Clade II)__AIT17514__GPC
augggccagaucaucaccuucuuccaggaggugccccacgugaucgaggaggugaugaacaucgugcugaucgcccugagccugcuggccgugcugaagggcaucuacaacguggccaccugcggccuguucggccuggugagcuuccugcugcugugcggcagaagcugcagcaccaccuacaagggcguguacgagcugcagacccuggagcuggacauggccagccugaacaugaccaugccccugagcugcaccaagaacaacagccaccacuacaucauggugggcaacgagaccggccuggagcugacccugaccaacaccagcaucaucaaccacaaguucugcaaccugagcgacgcccacaagaagaaccuguacgaccacgcccugaugagcaucaucagcaccuuccaccugagcauccccaacuucaaccaguacgaggccaugagcugcgacuucaacggcggcaagaucagcgugcaguacaaccugagccacaccuacgccguggacgccgccaaccacugcggcaccaucgccaacggcgugcugcagaccuucaugagaauggccuggggcggcagcuacaucgcccuggacagcggcaagggcagcugggacugcaucaugaccagcuaccaguaccugaucauccagaacaccaccugggaggaccacugccaguucagcagacccagccccaucggcuaccugggccugcugagccagagaaccagagacaucuacaucagcagaagacugcugggcaccuucaccuggacccugagcgacagcgagggcaacgagacccccggcggcuacugccugaccagauggaugcugaucgaggccgagcugaagugcuucggcaacaccgccguggccaagugcaacgagaagcacgacgaggaguucugcgacaugcugagacuguucgacuucaacaagcaggccaucagaagacugaagaccgaggcccagaugagcauccagcugaucaacaaggccgugaacgcccugaucaacgaccagcugaucaugaagaaccaccugagagacaucaugggcauccccuacugcaacuacagcaaguacugguaccugaaccacaccgugaccggcaagaccagccugcccagaugcuggcuggugagcaacggcagcuaccugaacgagacccacuucagcgacgacaucgagcagcaggccgacaacaugaucaccgagcugcugcagaaggaguacaucgacagacagggcaagaccccccugggccugguggaccuguucguguucagcaccagcuucuaccugaucagcaucuuccugcaccuggugaagauccccacccacagacacgugaucggcaagcccugccccaagccccacagacugaaccacaugggcaucugcagcugcggccuguacagacaccccggcgugcccgugaaguggaagagauga

SEQ ID NO: 1308 - RNA, 1473 nt, Artificial Sequence
  derived and/or modified protein sequence (opt4) from LASV(ISTH2057-NIG-2012;Clade II)__AIT17518__GPC
augggccagaucaucaccuucuuccaggaggugccccacgugaucgaggaggugaugaacaucgugcugaucgcccugagccugcuggccauccugaagggcaucuacaacguggccaccugcggccuguucggccuggugagcuuccugcugcugugcggcagaagcugcagcaccaccuacaagggcguguacgagcugcagacccuggagcuggacauggccagccugaacaugaccaugccccugagcugcaccaagaacaacagccaccacuacaucauggugggcaacgagaccggccuggagcugacccugaccaacaccagcaucaucaaccacaaguucugcaaccugagcgacgcccacaagaagaaccuguacgaccacgcccugaugagcaucaucagcaccuuccaccugagcauccccaacuucaaccaguacgaggccaugagcugcgacuucaacggcggcaagaucagcgugcaguacaaccugagccacgccuacgccguggacgccgccaaccacugcggcaccaucgccaacggcgugcugcagaccuucaugagaauggccuggggcggcagcuacaucgcccuggacagcggcaagggcagcugggacugcaucaugaccagcuaccaguaccugaucauccagaacaccaccugggaggaccacugccaguucagcagacccagccccaucggcuaccugggccugcugagccagagaaccagagacaucuacaucagcagaagacugcugggcaccuucaccuggacccugagcgacagcgagggcaacgagacccccggcggcuacugccugaccagauggaugcugaucgaggccgagcugaagugcuucggcaacaccgccguggccaagugcaacgagaagcacgacgaggaguucugcgacaugcugagacuguucgacuucaacaagcaggccaucagaagacugaagaccgaggcccagaugagcauccagcugaucaacaaggccgugaacgcccugaucaacgaccagcugaucaugaagaaccaccugagagacaucaugggcauccccuacugcaacuacagcaaguacugguaccugaaccacaccgugaccggcaagaccagccugcccagaugcuggcuggugagcaacggcagcuaccugaacgagacccacuucagcgacgacaucgagcagcaggccgacaacaugaucaccgagcugcugcagaaggaguacauggacagacagggcaagaccccccugggccugguggaccuguucguguucagcaccagcuucuaccugaucagcaucuuccugcaccuggugaagauccccacccacagacacgugaucggcaagcccugccccaagccccacagacugaaccacaugggcaucugcagcugcggccuguacaagcaccccggcgugcccgugaaguggaagagauga

SEQ ID NO: 1309 - RNA, 1473 nt, Artificial Sequence
  derived and/or modified protein sequence (opt4) from LASV(ISTH2064-NIG-2012;Clade II)__AIT17524__GPC
augggccagaucaucaccuucuuccaggaggugccccacgugaucgaggaggugaugaacaucgugcugaucgcccugagccugcuggccauccugaagggcaucuacaacguggccaccugcggccuguucggccuggugagcuuccugcugcugugcggcagaagcugcagcaccaccuacaagggcguguacgagcugcagacccuggagcuggacauggccagccugaacaugaccaugccccugagcugcaccaagaacaacagccaccacuacaucauggugggcaacgagaccggccuggagcugacccugaccaacaccagcaucaucaaccacaaguucugcaaccugagcgacgcccacaagaagaaccuguacgaccacgcccugaugagcaucaucagcaccuuccaccugagcauccccaacuucaaccaguacgaggccaugagcugcgacuucaacggcggcaagaucagcgugcaguacaaccugagccacaccuacgccaucgacgccgccaaccacugcggcaccaucgccaacggcgugcugcagaccuucaugagaauggccuggggcggcagcuacaucgcccuggacagcggcaagggcagcugggacugcaucaugaccagcuaccaguaccugaucauccagaacaccaccugggaggaccacugccaguucagcagacccagccccaucggcuaccugggccugcugagccagagaaccagagacaucuacaucagcagaagacugcugggcaccuucaccuggacccugagcgacagcgagggcaacgagacccccggcggcuacugccugaccagauggaugcugaucgaggccgagcugaagugcuucggcaacaccgccguggccaagugcaacgagaagcacgacgaggaguucugcgacaugcugagacuguucgacuucaacaagcaggccaucagaagacugaagaccgaggcccagaugagcauccagcugaucaacaaggccgugaacgcccugaucaacgaccagcugaucaugaagaaccaccugagagacaucaugggcauccccuacugcaacuacagcaaguacugguaccugaaccacaccgugaccggcaagaccagccugcccagaugcuggcuggugagcaacggcagcuaccugaacgagacccacuucagcgacgacaucgagcagcaggccgacaacaugaucaccgagaugcugcagaaggaguacauggacagacagggcaagaccccccugggccugguggaccuguucguguucagcaccagcuucuaccugaucagcaucuuccugcaccuggugaagauccccacccacagacacgugaucggcaagcccugccccaagccccacagacugaaccacaugggcaucugcagcugcggccuguacaagcaccccggcgugcccgugaaguggaagagauga

SEQ ID NO: 1310 - RNA, 1473 nt, Artificial Sequence
  derived and/or modified protein sequence (opt4) from LASV(ISTH2065-NIG-2012;Clade II)__AIT17528__GPC
augggccagaucaucaccuucuuccaggaggugccccacgugaucgaggaggugaugaacaucgugcugaucgcccugagccugcuggccaugcugaagggcaucuacaacaucgccaccugcggccuguucggccugaucagcuuccugcugcugugcggcagaagcugcagcaccaccuacaagggcguguacgagcugcaggcccuggagcuggacauggccaaccugaacaugaccaugccccugagcugcaccaagaacaacagccaccacuacaucauggugggcaacgagaccggccuggagcugacccugaccaacaccagcaucaucaaccacaaguucugcaaccugagcgacgcccacaagaagaaccuguacgaccacgcccugaugagcaucaucagcaccuuccaccugagcauccccaacuucaaccaguacgaggccaugagcugcgacuucaacggcggcaagaucagcgugcaguacaaccugagccacaccuacgccggcgacgccgccaagcacugcggcaccaucgccaacggcgugcugcagaccuucaugagaauggccuggggcggcagcuacaucgcccuggacagcggcaagggcaacugggacugcaucaugaccagcuaccaguaccugaucauccagaacaccaccugggaggaccacugccaguucagcagacccagccccaucggcuaccugggccugcugagccagagaaccagagacaucuacaucagcagaagacugcugggcaccuucaccuggacccugagcgacagcgagggcaacgagacccccggcggcuacugccugaccagauggaugcugaucgaggccgagcugaagugcuucggcaacaccgccguggccaagugcaacgagaagcacgacgaggaguucugcgacaugcugagacuguucgacuucaacaagcaggccaucagaagacugaagaccgaggcccagaugagcauccagcugaucaacaaggccgugaacgcccugaucaacgaccagcugaucaugaagaaccaccugagagacaucaugggcauccccuacugcaacuacagcaaguacugguaccugaaccacagcgugaccggcagaaccagccugcccagaugcuggcuggugagcaacggcagcuaccugaacgagacccaguucagcgacgacaucgagcagcaggccgacaacaugaucaccgagaugcugcagaaggaguacaucgacagacagggcaagaccccccugggccugguggaccuguucguguucagcaccagcuucuaccugaucagcaucuuccugcaccugaucaagauccccacccacagacacaucgugggcaagcccugccccaagccccacagacugaaccacaugggcaucugcagcugcggccuguacaagcaccccggcauccccgugaaguggaagagauga

SEQ ID NO: 1311 - RNA, 1473 nt, Artificial Sequence
  derived and/or modified protein sequence (opt4) from LASV(ISTH2094-NIG-2012;Clade II)__AIT17538__GPC
augggccagaucaucaccuucuuccaggaggugccccacgugaucgaggaggugaugaacaucgugcugaucgcccugagccugcuggccauccugaagggcaucuacaacaucgccaccugcggccuguucggccugaucagcuuccugcugcugugcggcagaagcugcagcaccaccuacaagggcguguacgagcugcagacccuggagcuggacauggccaaccugaacaugaccaugccccugagcugcaccaagaacaacagccaccacuacaucauggugggcaacgagaccggccuggagcugacccugaccaacaccagcaucaucaaccacaaguucugcaaccugagcgacgcccacaagaagaaccuguacgaccacgcccugaugagcaucaucagcaccuuccaccugagcauccccaacuucaaccaguacgaggccaugagcugcgacuucaacgagggcaagaucagcgugcaguacaaccugagccacagcuacgccaucgacgccgccggccacugcggcaccaucgccaacggcgugcugcagaccuucaugagaauggccuggggcggcagcuacaucgcccuggacagcggcaagggcaacugggacugcaucaugaccagcuaccaguaccugaucauccagaacaccaccugggaggaccacugccaguucagcagacccagccccaucggcuaccugggccugcugagccagagaaccagagacaucuacaucagcagaagacugcugggcaccuucaccuggacccugagcgacagcgagggcaacgaggcccccggcggcuacugccugaccagauggaugcugaucgaggccgagcugaagugcuucggcaacaccgccaucgccaagugcaacgagaagcacgacgaggaguucugcgacaugcugagacuguucgacuucaacaagcaggccaucaagagacugaaggccgaggcccagaugagcauccaccugaucaacaaggccgugaacgcccugaucaacgaccagcugaucaugaagaaccaccugagagacaucaugggcauccccuacugcaacuacagcaaguacugguaccugaaccacaccgugaccggcaagaccagccugcccaagugcuggcuggugagcaacggcagcuaccugaacgagacccacuucagcgacgacaucgagcagcaggccgacaacaugaucaccgagcugcugcagaaggaguacauggacagacagggcaagaccccccugggccugguggaccuguucguguucagcaccagcuucuaccugaucagcaucuuccugcaccuggugaagauccccacccacagacacaucgugggcagacccugccccaagccccacagacugaaccacaugggcaucugcagcugcggccuguacaagcaccccggcgugcccgugaaguggaagagauga

SEQ ID NO: 1312 - RNA, 1473 nt, Artificial Sequence
  derived and/or modified protein sequence (opt4) from LASV(ISTH2129-NIG-2012;Clade II)__AIT17544__GPC
augggccagaucaucaccuucuuccaggaggugccccacgugaucgaggaggugaugaacaucgugcugaucgcccugagccugcuggccauccugaagggcaucuacaacguggccaccugcggccuguucggccuggugagcuuccugcugcugugcggcagaagcugcagcaccaccuacaagggcguguacgagcugcagacccuggagcuggacaugggcagccugaacaugaccaugccccugagcugcaccaagaacaacagccaccacuacaucauggugggcaacgagaccggccuggagcugacccugaccaacaccagcaucaucaaccacaaguucugcaaccugagcgacgcccacaagaagaaccuguacgaccacgcccugaugagcaucaucagcaccuuccaccugagcauccccaacuucaaccaguacgaggccaugagcugcgacuucaacggcggcaagaucagcgugcaguacaaccugagccacagcuacgccguggacgccgccaaccacugcggcaccaucgccaacggcgugcugcagaccuucaugagaauggccuggggcggcagcuacaucgcccuggacagcggcaagggcagcugggacugcaucaugaccagcuaccaguaccugaucauccagaacaccaccugggaggaccacugccaguucagcagacccagccccaucggcuaccugggccugcugagccagagaaccagagacaucuacaucagcagaagacugcugggcaccuucaccuggacccugagcgacagcgagggcaacgagacccccggcggcuacugccugaccagauggaugcugaucgaggccgagcugaagugcuucggcaacaccgccguggccaagugcaacgagaagcacgacgaggaguucugcgacaugcugagacuguucgacuucaacaagcaggccaucagaagacugaagaccgaggcccagaugagcauccagcugaucaacaaggccgugaacgcccugaucaacgaccagcugaucaugaagaaccaccugagagacaucaugggcauccccuacugcaacuacagcaaguacugguaccugaaccacaccgugaccggcaagaccagccugcccagaugcuggcuggugagcaacggcagcuaccugaacgagacccacuucagcgacgacaucgagcagcaggccgacaacaugaucaccgagcugcugcagaaggaguacauggacagacagggcaagaccccccugggccugguggaccuguucguguucagcaccagcuucuaccugaucagcaucuuccugcaccuggugaagauccccacccacagacacaucaucggcaagcccugccccaagccccacagacugaaccacaugggcaucugcagcugcggccuguacaagcaccccggcgugcccgugaaguggaagagauga

SEQ ID NO: 1313 - RNA, 1473 nt, Artificial Sequence
  derived and/or modified protein sequence (opt4) from LASV(ISTH2217-NIG-2012;Clade II)__AIT17548__GPC
augggccagaucaucaccuucuuccaggaggugccccacgugaucgaggaggugaugaacaucgugcugaucgcccugagccugcuggccauccugaagggcaucuacaacguggccaccugcggccuguucggccuggugagcuuccuguuccugugcggcagaagcugcagcaccaccuacaagggcguguacgagcugcagacccuggagcuggacauggccagccugaacaugaccaugccccugagcugcaccaagaacaacagccaccacuacaucauggugggcaacgagaccggccuggagcugacccugaccaacaccagcaucaucaaccacaaguucugcaaccugagcgacgcccacaagagaaaccuguacgaccacgcccugaugagcaucaucagcaccuuccaccugagcauccccaacuucaaccaguacgaggccaugagcugcgacuucaacggcggcaagaucagcgugcaguacaaccugagccacgccuacgccggcgacgccgccaagcacugcggcaccaucgccaacggcgugcugcagaccuucaugagaauggccuggggcggcagcuacaucgcccuggacagcggcaagggcagcugggacugcaucaugaccagcuaccaguaccugaucauccagaacaccaccugggaggaccacugccaguucagcagacccagccccaucggcuaccugggccugcugagccagagaaccagagacaucuacaucagcagaagacugcugggcaccuucaccuggacccugagcgacagcgagggcaacgagacccccggcggcuacugccugaccagauggaugcugaucgaggccgagcugaagugcuucggcaacaccgccguggccaagugcaacgagaagcacgacgaggaguucugcgacaugcugagacuguucgacuucaacaagcaggccaucagaagacugagaaccgaggcccagaugagcauccagcugaucaacaaggccgugaacgcccugaucaacgaccagcugaucaugaagaaccaccugagagacaucaugggcauccccuacugcaacuacagcaaguacugguaccugaaccacaccgugaccggcaagaccagccugcccaagugcuggcuggugagcaacggcagcuaccugaacgagacccacuucagcgacgacaucgagcagcaggccgacaacaugaucaccgagaugcugcagaaggaguacaucgacagacagggcaagaccccccugggccugguggaccuguucguguucagcaccagcuucuaccugaucagcaucuuccugcaccuggugaagauccccacccacagacacgugaucggcaagcccugccccaagccccacagacugaaccacaugggcaucugcagcugcggccuguacaagcaccccggcgugcccgugaaguggaagagauga

SEQ ID NO: 1314 - RNA, 1473 nt, Artificial Sequence
  derived and/or modified protein sequence (opt4) from LASV(ISTH2271-NIG-2012;Clade II)__AIT17552__GPC
augggccagaucaucaccuucuuccaggaggugccccacgugaucgaggaggugaugaacaucgugcugaucgcccugagccugcuggccauccugaagggcaucuacaacguggccaccugcggccuguucggccuggugagcuuccugcugcugugcggcagaagcugcagcaccaccuacaagggcguguacgagcugcagacccuggagcuggacauggccagccugaacaugaccaugccccugagcugcaccaagaacaacagccaccacuacaucauggugggcaacgagaccggccuggagcugacccugaccaacaccagcaucaucaaccacaaguucugcaaccugagcgacgcccacaagaagaaccuguacgaccacgcccugaugagcaucaucagcaccuuccaccugagcauccccaacuucaaccaguacgaggccaugagcugcgacuucaacggcggcaagaucagcgugcaguacaaccugagccacgccuacgccgugaacgccgccaaccacugcggcaccaucgccaacggcgugcugcagaccuucaugagaauggccuggggcggcagcuacaucgcccuggacagcggcaagggcagcugggacugcaucaugaccagcuaccaguaccugaucauccagaacaccaccugggaggaccacugccaguucagcagacccagccccaucggcuaccugggccugcugagccagagaaccagagacaucuacaucagcagaagacugcugggcaccuucaccuggacccugagcgacagcgagggcaacgagacccccggcggcuacugccugaccagauggaugcugaucgaggccgagcugaagugcuucggcaacaccgccguggccaagugcaacgagaagcacgacgaggaguucugcgacaugcugagacuguucgacuucaacaagcaggccaucagaagacugaagaccgaggcccagaugagcauccagcugaucaacaaggccgugaacgcccugaucaacgaccagcugaucaugaagaaccaccugagagacaucaugggcauccccuacugcaacuacagcaaguacugguaccugaaccacaccgugaccggcaagaccagccugcccagaugcuggcuggugagcaacggcagcuaccugaacgagacccacuucagcgacgacaucgagcagcaggccgacaacaugaucaccgagcugcugcagaaggaguacauggacagacagggcaagaccccccugggccugguggaccuguucguguucagcaccagcuucuaccugaucagcaucuuccugcaccuggugaagauccccacccacagacacgugaucggcaagcccugccccaagccccacagacugaaccacaugggcaucugcagcugcggccuguacaagcaccccggcgugcccgugaaguggaagaaguga

SEQ ID NO: 1315 - RNA, 1473 nt, Artificial Sequence
  derived and/or modified protein sequence (opt4) from LASV(ISTH2304-NIG-2012;Clade II)__AIT17556__GPC
augggccagaucaucaccuucuuccaggaggugccccacgugaucgaggaggugaugaacaucgugcugaucgcccugagccugcuggccauccugaagggcaucuacaacguggccaccugcggccuguucggccuggugagcuuccugcugcugugcggcagaagcugcagcaccaccuacaagggcguguacgagcugcagacccuggagcuggacauggccagccugaacaugaccaugccccugagcugcaccaagaacaacagccaccacuacaucauggugggcaacgagaccggccuggagcugacccugaccaacaccagcaucaucaaccacaaguucugcaaccugagcgacgcccacaagaagaaccuguacgaccacgcccugaugagcaucaucagcaccuuccaccugagcauccccaacuucaaccaguacgaggccaugagcugcgacuucaacggcggcaagaucagcgugcaguacaaccugagccacaccuacgccguggacgccgccaaccacugcggcaccaucgccaacggcgugcugcagaccuucaugagaauggccuggggcggcagcuacaucgcccuggacagcggcagaggcagcugggacugcaucaugaccagcuaccaguaccugaucauccagaacaccaccugggaggaccacugccaguucagcagacccagccccaucggcuaccugggccugcugagccagagaaccagagacaucuacaucagcagaagacugcugggcaccuucaccuggacccugagcgacagcgagggcaacgagacccccggcggcuacugccugaccagauggaugcugaucgaggccgagcugaagugcuucggcaacaccgccguggccaagugcaacgagaagcacgacgaggaguucugcgacaugcugagacuguucgacuucaacaagcaggccaucagaagacugaagaccgaggcccagaugagcauccagcugaucaacaaggccgugaacgcccugaucaacgaccagcugaucaugaagaaccaccugagagacaucaugggcauccccuacugcaacuacagcaaguacugguaccugaaccacaccaucaccggcaagaccagccugcccagaugcuggcuggugagcaacggcagcuaccugaacgagacccacuucagcgacgacaucgagcagcaggccgacaacaugaucaccgagcugcugcagaaggaguacaucgacagacagggcaagaccccccugggccugguggaccuguucguguucagcaccagcuucuaccugaucagcaucuuccugcaccuggugaagauccccacccacagacacaucaccggcaagcccugccccaagccccacagacugaaccacaugggcaucugcagcugcggccuguacaagcaccccggcgugcccgugagauggaagagauga

SEQ ID NO: 1316 - RNA, 1473 nt, Artificial Sequence
  derived and/or modified protein sequence (opt4) from LASV(ISTH2312-NIG-2012;Clade II)__AIT17560__GPC
augggccagaucaucaccuucuuccaggaggugccccacgugaucgaggaggugaugaacaucgugcugaucgcccugagccugcuggccgugcugaagggcaucuacaacguggccaccugcggccuguucggccuggugagcuuccugcugcugugcggcagaagcugcagcaccaccuacaagggcguguacgagcugcagacccuggagcuggacauggccagccugaacaugaccaugccccugagcugcaccaccaacaacagccaccacuacaucauggugggcaacgagaccggccuggagcugacccugaccaacaccagcaucaucaaccacaaguucugcaaccugagcgacgcccacaagaagaaccuguacgaccacgcccugaugagcaucaucagcaccuuccaccugagcauccccaacuucaaccaguacgaggccaugagcugcgacuucaacggcggcaagaucagcgugcaguacaaccugagccacgccuacgccggcgaggccgccaaccacugcggcaccaucgccaacggcgugcugcagaccuucaugagaauggccuggggcggcagcuacaucgcccuggacagcggcaagggcagcugggacugcaucaugaccagcuacaaguaccugaucauccagaacaccaccuggggcgaccacugccaguucagcagacccagccccaucggcuaccugggccugcugagccagagaaccagagacaucuacaucagcagaagacugcugggcaccuucaccuggacccugagcgacagcgagggcaacgagacccccggcggcuacugccugaccagauggaugcugaucgaggccgagcugaagugcuucggcaacaccgccguggccaagugcaacgagaagcacgacgaggaguucugcgacaugcugagacuguucgacuucaacaagcaggccaucagaaagcugaagaccgaggcccagaugagcauccagcugaucaacaaggccgugaacgcccugaucaacgaccagcugaucaugaagaaccaccugagagacaucaugggcauccccuacugcaacuacagcagauacugguaccugaaccacaccgugaccggcagaaccagccugcccagaugcuggcuggugagcaacggcagcuaccugaacgagacccacuucagcgacgacaucgagcagcaggccgacaacaugaucaccgagcugcugcagaaggaguacaucgacagacagggcaagaccccccugggccugguggaccuguucguguucagcaccagcuucuaccugaucagcaucuuccugcaccuggugaagauccccacccacagacacaucaucggcaagcccugccccaagccccacagacugaaccacaugggcaucugcagcugcggccuguacaagcaccccggcgugcccgugaaguggaagagauga

SEQ ID NO: 1317 - RNA, 1473 nt, Artificial Sequence
  derived and/or modified protein sequence (opt4) from LASV(ISTH2316-NIG-2012;Clade II)__AIT17564__GPC
augggccagaucaucaccuucuuccaggaggugccccacgugaucgaggaggugaugaacaucgugcugaucgcccugagccugcuggccauccugaagggcaucuacaacguggccaccugcggccuguucggccugcugagcuuccugcugcugugcggcagaagcugcagcaccaccuacaagggcguguacgagcugcagacccuggagcuggacauggccagccugaacaugaccaugccccugagcugcaccaagaacaacagccaccacuacaucauggugggcaacgagaccggccuggagcugacccugaccaacaccagcaucaucaaccacaaguucugcaaccugagcgacgcccacaagaaggaccuguacgaccacgcccugaugagcaucaucagcaccuuccaccugagcauccccaacuucaaccaguacgaggccaugagcugcgacuucaacggcggcaagaucagcgugcaguacaaccugagccacgccuacgccguggacgccgccaagcacugcggcaccaucgccaacggcgugcugcagaccuucaugagaauggccuggggcggcagcuacaucgcccuggacagcggcaagggcagcugggacugcaucaugaccagcuaccaguaccugaucauccagaacaccagcugggaggaccacugccaguucagcagacccagccccaucggcuaccugggccugcugagccagagaaccagagacaucuacaucagcagaagacugcugggcaccuucaccuggacccugagcgacagcgagggcaacgagacccccggcggcuacugccugaccagauggaugcugaucgaggccgagcugaagugcuucggcaacaccgccguggccaagugcaacgagaagcacgacgaggaguucugcgacaugcugagacuguucgacuucaacaagcaggccaucaagagacugaagaccgaggcccagaugagcauccagcugaucaacaaggccgugaacgcccugaucaacgaccagcugaucaugaagaaccaccugagagacaucaugggcauccccuacugcaacuacagcaaguacugguaccugaaccacaccgugaccggcaagaccagccugcccagaugcuggcuggugagcaacggcagcuaccugaacgagacccacuucagcgacgacaucgagcagcaggccgacaacaugaucaccgagcugcugcagaaggaguacaucgacagacagggcaagaccccccugggccugguggaccuguucguguucagcaccagcuucuaccugaucagcaucuuccugcaccuggugaagauccccacccacagacacgugaucggcaagcccugccccaagccccacagacugaaccacaugggcaucugcagcugcggccuguacaagcaccccggcgugcccgugaaguggaagagauga

SEQ ID NO: 1318 - RNA, 1473 nt, Artificial Sequence
  derived and/or modified protein sequence (opt4) from LASV(ISTH2358-NIG-2012;Clade II)__AIT17572__GPC
augggccagaucaucaccuucuuccaggaggugccccacgugaucgaggaggugaugaacaucgugcugaucgcccugagccugcuggccauccugaagggcaucuacaacguggccaccugcggccuguucggccuggugagcuuccugcugcugugcggcagaagcugcagcaccaccuacaagggcguguacgagcugcagacccuggagcuggacauggccaaccugaacaugaccaugccccugagcugcaccaagaacaacagccaccacuacaucauggugggcaacgagaccggccuggagcugacccugaccaacaccagcaucaucaaccacaaguucugcaaccugagcgacgcccacaagaagaaccuguacgaccacgcccugaugagcaucaucagcaccuuccaccugagcauccccaacuucaaccaguacgaggccaugagcugcgacuucaacggcggcaagaucagcgugcaguacaaccugagccacaacuacgccguggacgccgccaaccacugcggcaccaucgccaacggcgugcugcagaccuucaugagaauggccuggggcggcagcuacaucgcccuggacagcggcaagggcaacugggacugcaucaugaccagcuaccaguaccugaucauccagaacaccaccugggaggaccacugccaguucagcagacccagccccaucggcuaccugggccugcugagccagagaaccagagacaucuacaucagcagaagacugcugggcaccuucaccuggacccugagcgacagcgagggcaacgacaugcccggcggcuacugccugaccagauggaugcugaucgaggccgagcugaagugcuucggcaacaccgccguggccaagugcaacgagaagcacgacgaggaguucugcgacaugcugagacuguucgacuucaacaagcaggccaucagaagacugaagaccgaggcccagaugaacauccagcugaucaacaaggccgugaacgcccugaucaacgaccagcugaucaugaagaaccaccugagagacaucaugggcauccccuacugcaacuacagcaaguacugguaccugaaccacaccgugaccggcaagaccagccugcccagaugcuggcuggugagcaacggcagcuaccugaacgagacccacuucagcgacgacaucgagcagcaggccgacaacaugaucaccgagcugcugcagaaggaguacauggacagacagggcaagaccccccugggccugguggaccuguucguguucagcaccagcuucuaccugaucagcaucuuccugcaccuggugaagauccccacccacagacacaucaucggcaagcccugccccaagccccacagacugaaccacaugggcaucugcagcugcggccuguacaagcaccccggcgugcccgugaaguggaagagauga

SEQ ID NO: 1319 - RNA, 1473 nt, Artificial Sequence
  derived and/or modified protein sequence (opt4) from LASV(ISTH2376-NIG-2012;Clade II)__AIT17576__GPC
augggccagaucaucaccuucuuccaggaggugccccacgugaucgaggaggugaugaacaucgugcugaucgcccugagccugcuggccauccugaagggcaucuacaacguggccaccugcggccuguucggccuggugagcuuccugcugcugugcggcagaagcugcagcaccaccuacaagggcguguacgagcugcagacccuggagcuggacauggccagccugaacaugaccaugccccugagcugcaccaagaacaacagccaccacuacaucauggugggcaacgagaccggccuggagcugacccugaccaacaccagcaucaucaaccacaaguucugcaaccugagcgacgcccacaagaagaaccuguacgaccacgcccugaugagcaucaucagcaccuuccaccugagcauccccaacuucaaccaguacgaggccaugagcugcgacuucaacggcggcaagaucagcgugcaguacaaccugagccacaccuacgccguggacgccgccaaccacugcggcaccaucgccaacggcgugcugcagaccuucaugagaauggccuggggcggcagcuacaucgcccuggacagcggcaagggcaacugggacugcaucaugaccagcuaccaguaccugaucauccagaacaccaccugggaggaccacugccaguucagcagacccagccccaucggcuaccugggccugcugagccagagaaccagagacaucuacaucagcagaagacugcugggcaccuucaccuggacccugagcgacagcgagggcaacgagacccccggcggcuacugccugaccagauggaugcugaucgaggccgagcugaagugcuucggcaacaccgccguggccaagugcaacgagaagcacgacgaggaguucugcgacaugcugagacuguucgacuucaacaagcaggccaucagcagacugaagaccgaggcccagaugagcauccagcugaucaacaaggccgugaacgcccugaucaacgaccagcugaucaugaagaaccaccugagagacaucaugggcauccccuacugcaacuacagcaaguacugguaccugaaccacaccgugaccggcaagaccagccugcccagaugcuggcuggugagcaacggcagcuaccugaacgagacccacuucagcgacgacaucgagcagcaggccgacaacaugaucaccgagaugcugcagaaggaguacaucgacagacagggcaagaccccccugggccugguggaccuguucguguucagcaccagcuucuaccugaucagcaucuuccugcaccuggugaagauccccacccacagacacaucaccggcaagcccugccccaagccccacagacugaaccacaugggcaucugcagcugcggccuguacaagcaccccggcgugcccgugaaguggaagagauga

SEQ ID NO: 1320 - RNA, 1473 nt, Artificial Sequence
  derived and/or modified protein sequence (opt4) from LASV(Lassa virus/H.sapiens-wt/NGA/2015/ISTH_0543;Clade II)__AVO03639__GPC
augggccagaucaucaccuucuuccaggaggugccccacgugaucgaggaggugaugaacaucgugcugaucgcccugagccugcuggccauccugaagggcaucuacaacguggccaccugcggccuguucggccuggugagcuuccugcugcugugcggcagaagcugcagcaccaccuacaagggcguguacgagcugcagacccuggagcuggacauggccaaccugaacaugaccaugccccugagcugcaccaagaacaacagccaccacuacaucauggugggcaacgagaccggccuggagcugacccugaccaacaccagcaucaucaaccacaaguucugcaaccugagcgacgcccacaagaagaaccuguacgaccacgcccugaugagcaucaucagcaccuuccaccugagcauccccaacuucaaccaguacgaggccaugagcugcgacuucaacggcggcaagaucagcgugcaguacaaccugagccacaccuacgccguggacgccgccaaccacugcggcaccaucgccaacggcgugcugcagaccuucaugagaauggccuggggcggcagcuacaucgcccuggacagcggcaagggcagcugggacugcaucaugaccagcuaccaguaccuggugauccagaacaccaccugggaggaccacugccaguucagcagacccagccccaucggcuaccugggccugcugagccagagaaccagagacaucuacaucagcagaagacugcugggcaccuucaccuggacccugagcgacagcgagggcaacgagacccccggcggcuacugccugaccagauggaugcugaucgaggccgagcugaagugcuucggcaacaccgccguggccaagugcaacgagaagcacgacgaggaguucugcgacaugcugagacuguucgacuucaacaagcaggccaucagaagacugaagaccgaggcccagaugagcauccagcugaucaacaaggccgugaacgcccugaucaacgaccagcugaucaugaagaaccaccugagagacaucaugggcauccccuacugcaacuacagcaaguacugguaccugaaccacaccgugaccggcaagaccagccugcccagaugcuggcuggugagcaacggcagcuaccugaacgagacccacuucagcgacgacaucgagcagcaggccgacaacaugaucaccgagcugcugcagaaggaguacaucgacagacagggcaagaccccccugggccugguggaccuguucguguucagcaccagcuucuaccugaucagcaucuuccugcaccuggugaagauccccacccacagacacaucaccggcaagcccugccccaagccccacagacugaaccacaugggcaucugcagcugcggccuguacaagcaccccggcgugcccgugaaguggaagagauga

SEQ ID NO: 1321 - RNA, 1473 nt, Artificial Sequence
  derived and/or modified protein sequence (opt4) from LASV(Lassa virus/H.sapiens-wt/NGA/2015/ISTH_0547;Clade II)__AVO03583__GPC
augggccagaucaucaccuucuuccaggaggugccccacgugaucgaggaggugaugaacaucgugcugaucgcccugagccugcuggccauccugaagggcaucuacaacguggccaccugcggccuguucggccuggugagcuuccugcugcugugcggcagaagcugcagcaccaccuacaagggcguguacgagcugcagacccuggagcuggacauggccagccugaacaugaccaugccccugagcugcaccaagaacaacagccaccacuacaucauggugggcaacgagaccggccuggagcugacccugaccaacaccagcaucaucaaccacaaguucugcaaccugagcgacgcccacaagaagaaccuguacgaccacgcccugaugagcaucaucagcaccuuccaccugagcauccccaacuucaaccaguacgaggccaugagcugcgacuucaacggcggcaagaucagcgugcaguacaaccugagccacaccuacgccguggacgccgccaaccacugcggcaccaucgccaacggcgugcugcagaccuucaugagaauggccuggggcggcagcuacaucgcccuggacagcggcaagggcagcugggacugcaucaugaccagcuaccaguaccugaucauccagaacaccaccugggaggaccacugccaguucagcagacccagccccaucggcuaccugggccugcugagccagagaaccagagacaucuacaucagcagaagacugcugggcaccuucaccuggacccugagcgacagcgagggcaacgagacccccggcggcuacugccugaccagauggaugcugaucgaggccgagcugaagugcuucggcaacaccgccguggccaagugcaacgagaagcacgacgaggaguucugcgacaugcugagacuguucgacuucaacaagcaggccaucagaagacugaagaccgaggcccagaugagcauccagcugaucaacaaggccgugaacgcccugaucaacgaccagcugaucaugaagaaccaccugagagacaucaugggcauccccuacugcaacuacagcaaguacugguaccugaaccacaccgugaccggcaagaccagccugcccagaugcuggcuggugagcaacggcagcuaccugaacgagacccacuucagcgacgacaucgagcagcaggccgacaacaugaucaccgagcugcugcagaaggaguacaucgagagacagggcaagaccccccugggccugguggaccuguucguguucagcaccagcuucuaccugaucagcaucuuccugcaccuggugaagauccccacccacagacacaucaccggcaagcccugccccaagccccacagacugaaccacaugggcaucugcagcugcggccuguacaagcaccccggcgugcccgugaaguggaagagauga

SEQ ID NO: 1322 - RNA, 1473 nt, Artificial Sequence
  derived and/or modified protein sequence (opt4) from LASV(Lassa virus/H.sapiens-wt/NGA/2015/ISTH_0574;Clade II)__AVO03657__GPC
augggccagaucaucaccuucuuccaggaggugccccacgugaucgaggaggugaugaacaucgugcugaucgcccugagccugcuggccauccugaagggcaucuacaacguggccaccugcggccuguucggccugguggccuuccugcugcugugcggcagaagcugcagcaccaccuacaagggcguguacgagcugcagacccuggagcuggacauggccagccugaacaugaccaugccccugagcugcaccaagaacaacagccaccacuacaucauggugggcaacgagaccggccuggagcugacccugaccaacaccagcaucaucaaccacaaguucugcaaccugagcgacgcccacaagaagaaccuguacgaccacgcccugaugagcaucaucagcaccuuccaccugagcauccccaacuucaaccaguacgaggccaugagcugcgacuucaacggcggcaagaucagcgugcaguacaaccugagccacaccuacgccguggacgccgccaaccacugcggcaccaucaccaacggcgugcugcagaccuucaugagaauggccuggggcggcagcuacaucgcccuggacagcggcaagggcagcugggacugcaucaugaccagcuaccaguaccugaucauccagaacaccaccugggaggaccacugccaguucagcagacccagccccaucggcuaccugggccugcugagccagagaaccagagacaucuacaucagcagaagacugcugggcaccuucaccuggacccugagcgacagcgagggcaacgagacccccggcggcuacugccugaccagauggaugcugaucgaggccgagcugaagugcuucggcaacaccgccguggccaagugcaacgagaagcacgacgaggaguucugcgacaugcugagacuguucgacuucaacaagcaggccaucagaagacugaagaccgaggcccagaugagcauccagcugaucaacaaggccgugaacgcccugaucaacgaccagcugaucaugaagaaccaccugagagacaucaugggcauccccuacugcaacuacagcaaguacugguaccugaaccacaccgugaccggcagaaccagccugcccagaugcuggcuggugagcaacggcagcuaccugaacgagacccacuucagcgacgacaucgagcagcaggccgacaacaugaucaccgagcugcugcagaaggaguacauggacagacagggcaagaccccccugggccugguggaccuguucguguucagcaccagcuucuaccugaucagcaucuuccugcaccugaucaagauccccacccacagacacgugaucggcaagcccugccccaagccccacagacugaaccacaugggcaucugcagcugcggccuguacaagcaccccggcgugcccgugaaguggaagagauga

SEQ ID NO: 1323 - RNA, 1473 nt, Artificial Sequence
  derived and/or modified protein sequence (opt4) from LASV(Lassa virus/H.sapiens-wt/NGA/2015/ISTH_0681;Clade II)__AVO03617__GPC
augggccagaucaucaccuucuuccaggaggugccccacgugaucgaggaggugaugaacaucgugcugaucgcccugagccugcuggccauccugaagggcaucuacaacguggccaccugcggccuguucggccuggugagcuuccugcugcugugcggcagaagcugcagcaccaccuacaagggcguguacgagcugcagacccuggagcuggacauggccagccugaacaugaccaugccccugagcugcaccaagaacaacagccaccacuacaucauggugggcaacgagaccggccuggagcugacccugaccaacaccagcaucaucaaccacaaguucugcaaccugagcgacgcccacaagaagaaccuguacgaccacgcccugaugagcaucaucagcaccuuccaccugagcauccccaacuucaaccaguacgaggccaugagcugcgacuucaacggcggcaagaucagcgugcaguacaaccugagccacaccuacgccgagggcgccgccaaccacugcggcaccaucgccaacggcgugcugcagaccuucaugagaauggccuggggcggcagcuacaucgcccuggacagcggcaagggcagcugggacugcaucaugaccagcuaccaguaccugaucauccagaacaccaccugggaggaccacugccaguucagcagacccagccccaucggcuaccugggccugcugagccagagaaccagagacaucuacaucagcagaagacugcugggcaccuucaccuggacccugagcgacagcgagggcaacgagacccccggcggcuacugccugaccagauggaugcugaucgaggccgagcugaagugcuucggcaacaccgccguggccaagugcaacgagaagcacgacgaggaguucugcgacaugcugagacuguucgacuucaacaagcaggccaucaugagacugaagaccgaggcccagaugagcauccagcugaucaacaaggccgugaacgcccugaucaacgaccagcugaucaugaagaaccaccugagagacaucaugggcauccccuacugcaacuacagcaaguacugguaccugaaccacaccgugaccggcaagaccagccugcccagaugcuggcuggugagcaacggcagcuaccugaacgagacccacuucagcgacgacaucgagcagcaggccgacaacaugaucaccgagaugcugcagaaggaguacauggacagacagggcaagaccccccugggccugguggaccuguucguguucagcaccagcuucuaccugaucagcaucuuccugcaccuggugaagauccccacccacagacacgugaucggcaagcccugccccaagccccacagacugaaccacaugggcaucugcagcugcggccuguacaagcaccccggcgugcccgugaaguggaagagauga

SEQ ID NO: 1324 - RNA, 1473 nt, Artificial Sequence
  derived and/or modified protein sequence (opt4) from LASV(Lassa virus/H.sapiens-wt/NGA/2015/ISTH_0682;Clade II)__AVO03625__GPC
augggccagaucaucaccuucuuccaggaggugccccacgugaucgaggaggugaugaacaucgugcugaucgcccugagccugcuggccauccugaagggcaucuacaacguggccaccugcggccuguucggccuggugagcuuccugcugcugugcggcagaagcugcagcaccaccuacaagggcguguacgagcugcagacccuggagcuggacauggccagccugaacaugaccaugccccugagcugcaccaagaacaacagccaccacuacaucauggugggcaacgagaccggccuggagcugacccugaccaacaccagcaucaucaaccacaaguucugcaaccugagcgacgcccacaagaagaaccuguacgaccacgcccugaugagcaucaucagcaccuuccaccugagcauccccaacuucaaccaguacgaggccaugagcugcgacuucaacggcggcaagaucagcgugcaguacaaccugagccacgccuacgccguggacgccgccaaccacugcggcaccaucgccaacggcgugcugcagaccuucaugagaauggccuggggcggcagcuacaucgcccuggacagcggcaagggcagcugggacugcaucaugaccagcuaccacuaccugaucauccagaacaccaccugggaggaccacugccaguucagcagacccagccccaucggcuaccugggccugcugagccagagaaccagagacaucuacaucagcagaagacugcugggcaccuucaccuggacccugagcgacagcgagggcaacgagacccccggcggcuacugccugaccagauggaugcugaucgaggccgagcugaagugcuucggcaacaccgccguggccaagugcaacgagaagcacgacgaggaguucugcgacaugcugagacuguucgacuucaacaagcaggccaucagaagacugaagaccgaggcccagaugagcauccagcugaucaacaaggccgugaacgcccugaucaacgaccagcugaucaugaagaaccaccugagagacaucaugggcauccccuacugcaacuacagcaaguacugguaccugaaccacaccgugaccggcaagaccagccugcccagaugcuggcuggugagcaacggcagcuaccugaacgagacccacuucagcgacgacaucgagcagcaggccgacaacaugaucaccgagcugcugcagaaggaguacaucgacagacagggcaagaccccccugggccugguggaccuguucguguucagcaccagcuucuaccugaucagcaucuuccugcaccuggugaagauccccacccacagacacgugaucggcaagcccugccccaagccccacagacugaaccacaugggcaucugcagcugcggccuguacaagcaccccggcgugcccgugaaguggaagagauga

SEQ ID NO: 1325 - RNA, 1473 nt, Artificial Sequence
  derived and/or modified protein sequence (opt4) from LASV(Lassa virus/H.sapiens-wt/NGA/2015/ISTH_0687;Clade II)__AVO03581__GPC
augggccagaucaucaccuucuuccaggaggugccccacgugaucgaggaggugaugaacaucgugcugaucgcccugagccugcuggccauccugaagggcaucuacaacguggccaccugcggccuguucggccuggugagcuuccugcugcugugcggcagaagcugcagcaccaccuacaagggcguguacgagcugcagacccuggagcuggacaugaccaaccugaacaugaccaugccccugagcugcaccaagaacaacagccaccacuacaucauggugggcaacgagaccggccuggagcugacccugaccaacaccagcaucaucaaccacaaguucugcaaccugagcgacgcccacaagaagaaccuguacaaccacgcccugaugagcaucaucagcaccuuccaccugagcauccccaacuucaaccaguacgaggccaugagcugcgacuucaacggcggcaagaucagcgugcaguacaaccugagccacaccuacgccguggacgccgccaaccacugcggcaccguggccaacggcgugcugcagaccuucaugagaauggccuggggcggcagcuacaucgcccuggacagcggcaagggcggcugggacugcaucaugaccagcuaccaguaccugaucauccagaacaccaccugggaggaccacugccaguucagcagacccagccccaucggcuaccugggccugcugagccagagaaccagagacaucuacaucagcagaagacugcugggcaccuucaccuggacccugagcgacagcgagggcaacgagacccccggcggcuacugccugaccagauggaugcugaucgaggccgagcugaagugcuucggcaacaccgccguggccaagugcaacgagaagcacgacgaggaguucugcgacaugcugagacuguucgacuucaacaagcaggccaucagaaagcugaaggccgaggcccagaugagcauccagcugaucaacaaggccgugaacgcccugaucaacgaccagcugaucaugaagaaccaccugagagacaucaugggcauccccuacugcaacuacagcaaguacugguaccugaaccacaccgugaccggcaagaccagccugcccaagugcuggcuggugagcaacggcagcuaccugaacgagacccacuucagcgacgacaucgagcagcaggccgacaacaugaucaccgagcugcugcagaaggaguacauggacagacagggcaagaccccccugggccugguggaccuguucguguucagcaccagcuucuaccugaucagcaucuuccugcaccuggugaagauccccacccacagacacaucaucggcaagcccugccccaagccccacagacugaaccacaugggcaucugcagcugcggccuguacaagcaccccggcgugcccgugaaguggaagagauga

SEQ ID NO: 1326 - RNA, 1473 nt, Artificial Sequence
  derived and/or modified protein sequence (opt4) from LASV(Lassa virus/H.sapiens-wt/NGA/2015/ISTH_0736;Clade II)__AVO03573__GPC
augggccagaucaucaccuucuuccaggaggugccccacgugaucgaggaggugaugaacaucgugcugaucgcccugagccugcuggccgugcugaagggcaucuacaacguggccaccugcggccuguucggccuggugagcuuccugcugcugugcggcagaagcugcagcaccaccuacaagggcguguacgagcugcagacccuggagcuggacauggccagccugaacaugaccaugccccugagcugcaccaagaacaacagccaccacuacaucauggugggcaacgagaccggccuggagcugacccugaccaacaccagcaucaucaaccacaaguucugcaaccugagcgacgcccacaagaagaaccuguacgaccacgcccugaugagcaucaucagcaccuuccaccugagcauccccaacuucaaccaguacgaggccaugagcugcgacuucaacggcggcaagaucagcgugcaguacaaccugagccacacccacgccguggacgccgccaaccacugcggcaccaucgccaacggcgugcugcagaccuucaugagaauggccuggggcggcagcuacaucgcccuggacagcggcaagggcagcugggacugcaucaugaccagcuaccaguaccugaucauccagaacaccaccugggaggaccacugccaguucagcagacccagccccaucggcuaccugggccugcugagccagagaaccagagacaucuacaucagcagaagacugcugggcaccuucaccuggacccugagcgacagcgagggcaacgagacccccggcggcuacugccugaccagauggaugcugaucgaggccgagcugaagugcuucggcaacaccgccguggccaagugcaacgagaagcacgacgaggaguucugcgacaugcugagacuguucgacuucaacaagcaggccaucagaagacugaagaccgaggcccagaugagcauccagcugaucaacaaggccgugaacgcccugaucaacgaccagcugaucaugaagaaccaccugagagacaucaugggcauccccuacugcaacuacagcagauacugguaccugaaccacaccgugaccggcaagaccagccugcccagaugcuggcuggugagcaacggcagcuaccugaacgagacccacuucagcgacgacaucgagcagcaggccgacaacaugaucaccgagcugcugcagaaggaguacaucgacagacagggcagaaccccccugggccugguggaccuguucguguucagcaccagcuucuaccugaucagcaucuuccugcaccuggugaagauccccacccacagacacgugaucggcaagcccugccccaagccccacagacugaaccacaugggcaucugcagcugcggccuguacaagcaccccggcgugcccgugaaguggaagagauga

SEQ ID NO: 1327 - RNA, 1473 nt, Artificial Sequence
  derived and/or modified protein sequence (opt4) from LASV(Lassa virus/H.sapiens-wt/NGA/2015/ISTH_0789;Clade II)__AVO03551__GPC
augggccagaucgugaccuucuuccaggaggugccccacgugaucgaggagaucaugaacaucgugcugaucacccugagccugcuggccauccugaagggcguguacaaccuggccaccugcggccugaucggccugaucaccuuccuguuccugugcggcagaagcugcagcaccaucuacaagggcagcuaccaguuccagacccuggagcugaacauggagacccugaacaugaccaugccccugagcugcaccaagaacagcagccaccacuacaucagagugagcaacgagaccggccuggagcugacccugaccaacaccagcaucaucaaccacaaguucugcaaccugagcgacgcccacaagaagaaccuguacgaccacacccugaugagcaucaucagcaccuuccaccugagcauccccaacuucaaccaguacgaggccaugagcugcgacuucaacggcggcaagaucagcgugcaguacaaccugagccacagcuacgccguggacgccgccaaccacugcggcaccguggccaacggcgugcugcagaccuucaugagaauggccuggggcggcagcuacaucgcccuggacagcggcagaggcaacugggacugcaucaugaccagcuaccaguaccugaucauccagaacaccaccugggaggaccacugccaguucagcagacccagccccaucggcuaccugggccugcugagccagagaaccagagacaucuacaucagcagaagacugcugggcaccuucaccuggacccugagcgacagcgagggcaaggagacccccggcggcuacugccugaccagauggaugcugaucgaggccgagcugaagugcuucggcaacaccgccguggccaagugcaacgagaagcacgacgaggaguucugcgacaugcugagacuguucgacuucaacaagcaggccauccagagacugaaggccgaggcccagaugagcauccagcugaucaacaaggccgugaacgcccugaucaacgaccagcugaucaugaagaaccaccugagagacaucaugggcauccccuacugcaacuacagcaaguacugguaccugaaccacaccagcaccggcagaaccagccugcccaagugcuggcuggugagcaacggcagcuaccugaacgagacccacuucagcgacgacaucgagcagcaggccgacaacaugaucaccgagaugcugcagaaggaguacaucgacagacagggcaagaccccccugggccugguggaccuguucguguucagcaccagcuucuaccugaucagcaucuuccugcaccuggugaagauccccacccacagacacaucgugggcaagagcugccccaagccccacagacugaaccacaugggcaucugcagcugcggccuguacaagagacccggcgugcccgugaaguggaagagauga

SEQ ID NO: 1328 - RNA, 1473 nt, Artificial Sequence
  derived and/or modified protein sequence (opt4) from LASV(Lassa virus/H.sapiens-wt/NGA/2015/ISTH_0821;Clade II)__AVO03641__GPC
augggccagaucaucaccuucuuccaggaggugccccacgugaucgaggaggugaugaacaucgugcugaucgcccugagccugcuggccauccugaagggcaucuacaacguggccaccugcggccuguucggccuggugagcuuccugcugcugugcggcagaagcugcagcaccaccuacaagggcguguacgagcugcagacccuggagcuggacauggccagccugaacaugaccaugccccugagcugcaccaagaacaacagccaccacuacaucauggugggcaacgagaccggccuggagcugacccugaccaacaccagcaucaucaaccacaaguucugcaaccugagcgacgcccacaagaagaaccuguacgaccacacccugaugagcaucaucagcaccuuccaccugagcauccccaacuucaaccaguacgaggccaugagcugcgacuucaacggcggcaagaucagcgugcaguacaaccugagccacaccuacgccguggacgccgccaaccacugcggcaccaucgccaacggcgugcugcagaccuucaugagaauggccuggggcggcagcuacaucgcccuggacagcggcaagggcaacugggacugcaucaugaccagcuaccaguaccugaucauccagaacaccaccugggaggaccacugccaguucagcagacccagccccaucggcuaccugggccugcugagccagagaaccagagacaucuacaucagcagaagacugcugggcaccuucaccuggacccugagcgacagcgagggcaacgagacccccggcggcuacugccugaccagauggaugcugaucgaggccgagcugaagugcuucggcaacaccgccguggccaagugcaacgagaagcacgacgaggaguucugcgacaugcugagacuguucgacuucaacaagcaggccaucagcagacugaagaccgaggcccagaugagcauccagcugaucaacaaggccgugaacgcccugaucaacgaccagcugaucaugaagaaccaccugagagacaucaugggcauccccuacugcaacuacagcaaguacugguaccugaaccacaccgugaccggcaagaccagccugcccagaugcuggcuggugagcaacggcagcuaccugaacgagacccacuucagcgacgacaucgagcagcaggccgacaacaugaucaccgagaugcugcagaaggaguacaucgacagacagggcaagaccccccugggccugguggaccuguucguguucagcaccagcuucuaccugaucagcaucuuccugcaccuggugaagauccccacccacagacacgugaucggcaagcccugccccaagccccacagacugaaccacaugggcaucugcagcugcggccuguacaagcaccccggcgugcccgugaaguggaagagauga

SEQ ID NO: 1329 - RNA, 1473 nt, Artificial Sequence
  derived and/or modified protein sequence (opt4) from LASV(Lassa virus/H.sapiens-wt/NGA/2015/ISTH_0831;Clade II)__AVO03545__GPC
augggccagaucgugaccuucuuccaggaggugccccacgugaucgaggagaucaugaacaucgugcugaucacccugagccugcuggccauccugaagggcguguacaaccuggccaccugcggccugaucggccugaucaccuuccuguuccugugcggcagaagcugcagcaugaccuacaagggcagcuaccagcuggagacccuggagcugaacauggagacccugaacaugaccaugccccugagcugcaccaagaacaccagccaccacuacaucagagugggcaacgagaccggccuggagcugacccugaccaacaccagcaucaucaaccacaaguucugcaaccugagcgacgcccacaagaagaaccuguacgaccacagccugaugagcaucgugagcaccuuccaccugagcauccccaacuucaaccaguacgaggccaugagcugcgacuucaacggcggcaagaucagcauccaguacaaccugagccacgccuacgccggcgacgccgccaagcacugcggcacccuggccaacggcgugcugcagaccuucaugagaauggccuggggcggcagcuacaucgcccuggacagcggcagaggcaacugggacugcaucaugaccagcuaccaguaccugaucauccagaacaccaccugggacgaccacugccaguucagcagacccagccccaucggcuaccugggccugcugagccagagaaccagagagaucuacaucagcagaagacugcugggcaccuucaccuggacccugagcgacagcgagggcaacgaggcccccggcggcuacugccugaccagauggaugcugaucgaggccgagcugaagugcuucggcaacaccgccguggccaagugcaacgagaagcacgacgaggaguucugcgacaugcugagacuguucgacuucaacaagcaggccauccagagacugaagaccgaggcccagaugagcauccagcugaucaacaaggccgugaacgcccugaucaacgaccagcugaucaugaagaaccaccugagagacaucaugggcauccccuacugcaacuacagcaaguacugguaccugaaccacaccaccaccggcagaaccagccugcccagaugcuggcuggugagcaacggcagcuaccugaacgagacccacuucagcgacgacaucgagcagcaggccgacaacaugaucaccgagaugcugcagaaggaguacaucgacagacagggcaagaccccccugggccugguggaccuguucguguucagcaccagcuucuaccugaucagcaucuuccugcaccuggugaagauccccacccacagacacaucgugggcaagagcugccccaagccccacagacugaaccacaugggcaucugcagcugcggccuguacaagcagcccggcgugcccgugagauggaagagauga

SEQ ID NO: 1330 - RNA, 1473 nt, Artificial Sequence
  derived and/or modified protein sequence (opt4) from LASV(Lassa virus/H.sapiens-wt/NGA/2016/ISTH_0009;Clade II)__AVO03571__GPC
augggccagaucaucaccuucuuccaggaggugccccacgugaucgaggaggugaugaacaucgugcugaucgcccugagccugcuggccauccugaagggcaucuacaacguggccaccugcggccugcugggccuggugagcuuccugcugcugugcggcagaagcugcagcaccaccuacaagggcguguacgagcugcagacccuggagcuggacauggccagccugaacaugaccaugccccugagcugcaccaagaacaacagccaccacuacaucauggugggcaacgagaccggccuggagcugacccugaccaacaccagcaucaucaaccacaaguucugcaaccugagcgacgcccacaagaagaaccuguacgaccacgcccugaugagcaucaucagcaccuuccaccugagcauccccaacuucaaccaguacgaggccaugagcugcgacuucaacggcggcagaaucagcgugcaguacaaccugagccacagcuacgccguggacgccgccaaccacugcggcaccaucgccaacggcgugcugcagaccuucaugagaauggccuggggcggcagcuacaucgcccuggacagcggcaagggcagcugggacugcaucaugaccagcuaccaguaccugaucauccagaacaccaccugggaggaccacugccaguucagcagacccagccccaucggcuaccugggccugcugagccagagaaccagagacaucuacaucagcagaagacugcugggcaccuucaccuggacccugagcgacagcgagggcaacgagacccccggcggcuacugccugaccagauggaugcugaucgaggccgagcugaagugcuucggcaacaccgccguggccaagugcaacgagaagcacgacgaggaguucugcgacaugcugagacuguucgacuucaacaagcaggccaucagaagacugaagaccgaggcccagaugagcauccagcugaucaacaaggccgugaacgcccugaucaacgaccagcugaucaugaagaaccaccugagagacaucaugggcauccccuacugcaacuacagcaaguacugguaccugaaccacaccgugaccggcaagaccagccugcccagaugcuggcuggugagcaacggcagcuaccugaacgagacccacuucagcgacgacaucgagcagcaggccgacaacaugaucaccgagcugcugcagaaggaguacaucgacagacagggcaagaccccccugggccugguggaccuguucguguucagcaccagcuucuaccugaucagcaucuuccugcaccuggugaagauccccacccacagacacaucaccggcaagcccugccccaagccccacagacugaaccacaugggcaucugcagcugcggccuguacaaccaccccggcgugcccgugaaguggaagagauga

SEQ ID NO: 1331 - RNA, 1473 nt, Artificial Sequence
  derived and/or modified protein sequence (opt4) from LASV(Lassa virus/H.sapiens-wt/NGA/2016/ISTH_0017;Clade II)__AVO03567__GPC
augggccagaucaucaccuucuuccaggaggugccccacgugaucgaggaggugaugaacaucgugcugaucgcccugagccugcuggccauccugaagggcaucuacaacguggccaccugcggccuguucggccuggugagcuuccugcugcugugcggcagaagcugcagcaccaccuacaagggcguguacgagcugcagacccuggagcuggacauggccagccugaacaugaccaugccccugagcugcaccaagaacaacagccaccacuacaucauggugggcaacgagaccggccuggagcugacccugaccaacaccagcaucaucaaccacaaguucugcaaccugagcgacgcccacaagaagaaccuguacgaccacgcccugaugagcaucaucagcaccuuccaccugagcauccccaacuucaaccaguacgaggccaugagcugcgacuucaacggcggcaagaucagcgugcaguacaaccugagccacaccuacgccaucgacgccgccaaccacugcggcaccaucgccaacggcgugcugcagaccuucaugagaauggccuggggcggcagcuacaucgcccuggacagcggcaagggcagcugggacugcaucaugaccagcuaccaguaccugaucauccagaacaccaccugggaggaccacugccaguucagcagacccagccccaucggcuaccugggccugcugagccagagaaccagagacaucuacaucagcagaagacugcugggcaccuucaccuggacccugagcgacagcgagggcaacgagacccccggcggcuacugccugaccagauggaugcugaucgaggccgagcugaagugcuucggcaacaccgccguggccaagugcaacgagaagcacgacgaggaguucugcgacaugcugagacuguucgacuucaacaagcaggccaucagaagacugaagaccgaggcccagaugagcauccagcugaucaacaaggccgugaacgcccugaucaacgaccagcugaucaugaagaaccaccugagagacaucaugggcauccccuacugcaacuacagcaaguacugguaccugaaccacaccgugaccggcaagaccagccugcccagaugcuggcuggugagcaacggcagcuaccugaacgagacccacuucagcgacgacaucgagcagcaggccgacaacaugaucaccgagcugcugcagaaggaguacauggacagacagggcaagaccccccugggccugguggaccuguucguguucagcaccagcuucuaccugaucagcaucuuccugcaccuggugagaauccccacccacagacacgugaucggcaagcccugccccaagccccacagacugaaccacaugggcaucugcagcugcggccuguacaagcaccccggcgugcccgugaaguggaagagauga

SEQ ID NO: 1332 - RNA, 1473 nt, Artificial Sequence
  derived and/or modified protein sequence (opt4) from LASV(Lassa virus/H.sapiens-wt/NGA/2016/ISTH_0035;Clade II)__AVO03619__GPC
augggccagaucaucaccuucuuccaggaggugccccacgugaucgaggaggugaugaacaucgugcugaucgcccugagccugcuggccauccugaagggcaucuacaacguggccaccugcggccuguucggccuggugagcuuccugcugcugugcggcagaagcugcagcaugaccuacaagggcguguacgagcugcagacccuggagcuggacauggccagccugaacaugaccaugccccugagcugcaccaagaacaacagccaccacuacaucauggugggcaacgagaccggccuggagcugacccugaccaacaccagcaucaucaaccacaaguucugcaaccugagcgacgcccacaagaagaaccuguacgaccacgcccugaugagcaucaucagcaccuuccaccugagcauccccaacuucaaccaguacgaggccaugagcugcgacuucaacggcggcaagaucagcgugcaguacaaccugagccacaccuacgccguggacgccgccaaccacugcggcaccaucgccaacggcgugcugcagaccuucaugagaauggccuggggcggcagcuacaucgcccuggacagcggcaagggcagcugggacugcaucaugaccagcuaccaguaccugaucauccagaacaccaccugggaggaccacugccaguucagcagacccagccccaucggcuaccugggccugcugagccagagaaccagagacaucuacaucagcagaagacugcugggcaccuucaccuggacccugagcgacagcgagggcaacgagacccccggcggcuacugccugaccagauggaugcugaucgaggccgagcugaagugcuucggcaacaccgccguggccaagugcaacgagaagcacgacgaggaguucugcgacaugcugagacuguucgacuucaacaagcaggccaucagaagacugaagaccgaggcccagaugagcauccagcugaucaacaaggccgugaacgcccugaucaacgaccagcugaucaugaagaaccaccugagagacaucaugggcauccccuacugcaacuacagcaaguacugguaccugaaccacaccaucaccggcaagaccagccugcccagaugcuggcuggugagcaacggcagcuaccugaacgagacccacuucagcgacgacaucgagcagcaggccgacaacaugaucaccgagcugcugcagaaggaguacauggacagacagggcaagaccccccugggccugguggaccuguucguguucagcaccagcuucuaccugaucagcaucuuccugcaccuggugaagauccccacccacagacacgugaucggcaagcccugccccaagccccacagacugaaccacaugggcaucugcagcugcggccuguacaagcaccccggcgugcccgugaaguggaagagauga

SEQ ID NO: 1333 - RNA, 1473 nt, Artificial Sequence
  derived and/or modified protein sequence (opt4) from LASV(Lassa virus/H.sapiens-wt/NGA/2016/ISTH_0104;Clade II)__AVO03631__GPC
augggccaggugaucaccuucuuccaggaggugccccacgugaucgaggaggugaugaacaucgugcugaucgcccugagccugcuggccauccugaagggcaucuacaacguggccaccugcggccuguucggccugaucagcuuccugcugcugugcggcagaagcugcagcaccaccuacaagggcguguacgagcugcagacccuggagcugaacaugcagaaccugaacaugaccaugccccugagcugcaccaagaacagcagccaccacuacaucauggugggcaacgagaccggccuggagcugacccugaccaacaccagcaucaucaaccacaaguucugcaaccugagcgacgcccacaagaagaaccuguacgaccacgcccugaugagcaucaucagcaccuuccaccugagcauccccaacuucaaccaguacgaggccaugagcugcgacuucaacggcggcaagaucagcgugcaguacaaccugagccacaccuacgccaucgacgccgccaaccacugcggcaccguggccaacggcgugcugcagaccuucaugagaauggccuggggcggcagcuacaucgcccuggacagcggcagaggcaacugggacugcaucaugaccagcuaccaguaccugaucauccagaacaccaccugggaggaccacugccaguucagcagacccagccccaucggcuaccugggccugcugagccagagaaccagagacaucuacaucagcagaagacugcugggcaccuucaccuggacccugagcgacagcgagggcaacgaggcccccggcggcuacugccugaccagauggaugcugaucgaggccgagcugaagugcuucggcaacaccgccguggccaagugcaacgagaagcacgacgaggaguucugcgacaugcugagacuguucgacuucaacaagcaggccaucaagagacugaagaccgaggcccagaugagcauccagcugaucaacaaggccgugaacgcccugaucaacgaccagcugaucaugaagaaccaccugagagacaucaugggcauccccuacugcaacuacagcaaguacugguaccugaaccacaccgugaccggcagaaccagccugcccagaugcuggcuggugagcaacggcagcuaccugaacgacacccaguucagcgacgacaucgagcagcaggccgacaacaugaucaccgagaugcugcagaaggaguacauggacagacagggcaagaccccccugggccugguggaccuguucguguucagcaccagcuucuaccugaucagcaucuuccugcaccuggugaagauccccacccacagacacaucgugggcagacccugccccaagccccacagacugaaccacaugggcaucugcagcugcggccuguacaagcaccccggcgugcccgugaaguggaagagauga

SEQ ID NO: 1334 - RNA, 1476 nt, Artificial Sequence
  derived and/or modified protein sequence (opt4) from LASV(Lassa virus/H.sapiens-wt/NGA/2016/ISTH_0133;Clade II)__AVO03635__GPC
augggccagaucaucaccuucuuccaggaggugccccacgugaucgaggaggugaugaacaucgugcugaucgcccugagccugcuggccgugcugaaggccaucuacaacguggccaccugcggcguguucggccugaucagcuuccugcugcugugcggcagaagcugcagcaccaccuacaagggcguguacgagcugcagacccuggagcuggacauggccaaccugaacaugaccaugccccugagcugcaccaagaacaacagccaccacuacaucauggugggcaacgagaccggccuggagcugacccugaccaacaccagcaucaucaaccacaaguucugcaaccugagcgacgcccacaagaagaaccuguacgaccacagccugaugagcaucaucagcaccuuccaccugagcauccccaacuucaaccaguacgaggccaugagcugcgacuucaacggcggcaagaucagcgugcaguacaaccugagccacagcuacgccguggacgccgccaagcacugcggcaccaucgccaacggcgugcugcagaccuucaugagaauggccuggggcggcagcuacaucgcccuggacagcggcaagggcggcugggacugcaucaugaccagcuaccaguaccugaucauccagaacaccaccugggaggaccacugccaguucagcagacccagccccaucggcuaccugggccugcugagccagagaaccagagacaucuacaucagcagaagacugcugggcaccuucaccuggacccugagcgacagcgagggcaacgacgcccccggcggcuacugccugaccagauggaugcugaucgaggccgagcugaagugcuucggcaacaccgccaucgccaagugcaacgagaagcacgacgaggaguucugcgacaugcugagacuguucgacuucaacagacaggccaucaagagacugaagaccgaggcccagaugagcauccagcugaucaacaaggccgugaacgcccugaucaacgaccagcugaucaugaagaaccaccugagagacaucaugggcauccccuacugcaacuacagcaaguacugguaccugaaccacaccaucaccggcaagaccagccugcccagaugcuggcuggugagcaacggcagcuaccugaacgagacccacuucagcgacgacaucgagcagcaggccgacaacaugaucaccgagcugcugcagaaggaguacauggacagacagggcaagaccccccugggccugguggaccuguucguguucagcaccagcuucuaccugaucagcaucuuccugcaccuggugaagauccccacccacagacacaucgugggcaagcccugccccaagccccacagacugaaccacaugggcaucugcagcugcggccuguacaagcaccccggcgugcccgugaaguggaagagacaguga

SEQ ID NO: 1335 - RNA, 1473 nt, Artificial Sequence
  derived and/or modified protein sequence (opt4) from LASV(Lassa virus/H.sapiens-wt/NGA/2016/ISTH_0141;Clade II)__AVO03649__GPC
augggccagaucaucaccuucuuccaggaggugccccacgugaucgaggaggugaugaacaucgugcugaucacccugagccugcuggccauccugaagggcaucuacaacguggccaccugcggccuguucggccuggugagcuuccugcugcugugcggcagaagcugcagcaccaucuacaagggcguguacgagcugcagacccuggagcuggacauggccagccugaacaugaccaugccccugagcugcaccaagaacaacagccaccacuacaucauggugggcaacgagaccggccuggagcugacccugaccaacaccagcaucaucaaccacaaguucugcaaccugagcgacgcccacaagaagaaccuguacgaccacgcccugaugagcaucaucagcaccuuccaccugagcauccccaacuucaaccaguacgaggccaugagcugcgacuucaacggcggcaagaucagcgugcaguacaaccugagccacaccuacgccguggacgccgccgagcacugcggcaccaucgccaacggcgugcugcagaccuucaugagaauggccuggggcggcagcuacaucgcccuggacagcggcaagggcagcugggacugcaucaugaccagcuaccaguaccugaucauccagaacaccaccugggaggaccacugccaguucagcagacccagccccaucggcuaccugggccugcugagccagagaaccagagacaucuacaucagcagaagacugcugggcaccuucaccuggacccugagcgacagcgagggcaacgagacccccggcggcuacugccugaccagauggaugcugaucgaggccgagcugaagugcuucggcaacaccgccguggccaagugcaacgagaagcacgacgaggaguucugcgacaugcugagacuguucgacuucaacaagcaggccaucagaagacugaagaccgaggcccagaugagcauccagcugaucaacaaggccgugaacgcccugaucaacgaccagcugaucaugaagaaccaccugagagacaucaugggcauccccuacugcaacuacagcaaguacugguaccugaaccacaccgugaccggcaagaccagccugcccagaugcuggcuggugagcaacggcagcuaccugaacgagaccagauucagcgacgacaucgagcagcaggccgacaacaugaucaccgagcugcugcagaaggaguacaucgacagacagggcaagaccccccugggccugguggaccuguucguguucagcaccagcuucuaccugaucagcaucuuccugcaccuggugaagauccccacccacagacacaucaucggcaagcccugccccaagccccacagacugaaccacaugggcaucugcagcugcggccuguacaagcaccccggcauccccgugaaguggaagagauga

SEQ ID NO: 1336 - RNA, 1473 nt, Artificial Sequence
  derived and/or modified protein sequence (opt4) from LASV(Lassa virus/H.sapiens-wt/NGA/2016/ISTH_0146;Clade II)__AVO03633__GPC
augggccagaucaucaccuucuuccaggaggugccccacgugaucgaggaggugaugaacaucgugcugaucgcccugagccugcuggccauccugaagggcaucuacaacguggccaccugcggccuguucggccuggugagcuuccugcugcugugcggcagaagcugcagcaccaccuacaagggcguguacgagcugcagacccuggagcuggacauggccagccugaacaugaccaugccccugagcugcaccaagaacaacagccaccacuacaucauggugggcaacgagaccggccuggagcugacccugaccaacaccagcaucaucaaccacaaguucugcaaccugagcgacgcccacaagaagaaccuguacgaccacgcccugaugagcaucaucagcaccuuccaccugagcauccccaacuucaaccaguacgaggccaugagcugcgacuucaacggcggcaagaucagcgugcaguacaaccugagccacaccuacgccguggacgccgccaaccacugcggcaccaucgccaacggcgugcugcagaccuucaugagaauggccuggggcggcagcuacaucgcccuggacagcggcaagggcagcugggacugcaucaugaccagcuaccaguaccugaucauccagaacaccaccugggaggaccacugccaguucagcagacccagccccaucggcuaccugggccugcugagccagagaaccagagacaucuacaucagcagaagacugcugggcaccuucaccuggacccugagcgacagcgagggcaacgagacccccggcggcuacugccugaccagauggaugcugaucgaggccgagcugaagugcuucggcaacaccgccguggccaagugcaacgagaagcacgacgaggaguucugcgacaugcugagacuguucgacuucaacaagcaggccaucagaagacugaagaccgaggcccagaugagcauccagcugaucaacaaggccgugaacgcccugaucaacgaccagcugaucaugaagaaccaccugagagacaucaugggcauccccuacugcaacuacagcaaguacugguaccugaaccacaccgugaccggcaagaccagccugcccagaugcuggcuggugagcaacggcagcuaccugaacgagacccacuucagcgacgacaucgagcagcaggccgacaacaugaucaccgagcugcugcagaaggaguacauggacagacagggcaagaccccccugggccugguggaccuguucguguucagcaccagcuucuaccugaucagcaucuuccugcaccuggugaagauccccacccacagacacgugaucggcaagcccugccccaagccccacagacugaaccacaugggcaucugcagcugcggccuguacaagcaccccggcgugcccgugaaguggaagagauga

SEQ ID NO: 1337 - RNA, 1473 nt, Artificial Sequence
  derived and/or modified protein sequence (opt4) from LASV(Lassa virus/H.sapiens-wt/NGA/2016/ISTH_0187;Clade II)__AVO03549__GPC
augggccagaucgugaccuucuuccaggaggugccccacgugaucgaggaggugaugaacaucgugcugaucgcccugagcgugcuggccauccugaagggccuguacaacuucgccaccugcggccugaucggccuggugaccuuccugcugcugagcggcagaagcugcagcaugguguacaagggcguguacgagcugcagacccuggagcugaacauggagacccugaacaugaccaugccccugagcugcaccaagaacaacagccaccacuacaucagagugggcaacgacaccggccuggagcugacccugaccaacaacacccugcugaaccacaaguucugcaaccugagcgacgcccacaagaagaaccuguacgaccacgcccugaugagcaucaucagcaccuuccaccugagcauccccaacuucaaccaguacgaggccaugagcugcgacuucaacggcggcagaaucaccgugcaguacaaccugagccacagcuacgccguggacgccgccaaccacugcggcaccguggccaacggcgugcugcagaccuucaugagaauggccuggggcggcagcuacaucgcccuggacagcagacacggcaacugggacugcaucaugaccagcuaccaguaccugaucauccagaacaccaccugggaggaccacugccaguucagcagacccagccccaucggcuaccugggccugcugagccagagaaccagagacaucuacaucagcagaagacugcugggcaccuucaccuggacccugagcgacagcgagggcaacgagacccccggcggcuacugccugaccagauggaugcugaucgaggccgagcugaagugcuucggcaacaccgccguggccaagugcaacgagaagcacgacgaggaguucugcgacaugcugagacuguucgacuucaacaagcaggccaucagaagacugaaggccgaggcccagaugagcauccagcugaucaacaaggccgugaacgcccugaucaacgaccagcugaucaugaagaaccaccugagagacaucaugggcauccccuacugcaacuacagcaaguacugguaccugaaccacaccagcaccggcaagaccagccugcccagaugcuggcuggugagcaacggcagcuaccugaacgagacccacuucagcgacgacaucgagcagcaggccgacaacaugaucaccgagaugcugcagaaggaguaccuggacagacagggcaagaccccccugggccugguggacaucuucguguucagcaccagcuucuaccugaucagcaucuuccugcaccugaucaagauccccacccacagacacaucgugggcaagcccugccccaagccccacagacugaaccacaugggcaucugcagcugcggccuguacaagcagcccggcgugcccgugagauggaagagauga

SEQ ID NO: 1338 - RNA, 1473 nt, Artificial Sequence
  derived and/or modified protein sequence (opt4) from LASV(Lassa virus/H.sapiens-wt/NGA/2016/ISTH_0199;Clade II)__AVO03653__GPC
augggccagaucaucaccuucuuccaggaggugccccacgugaucgaggaggugaugaacaucgugcugaucgcccugagccugcuggccauccugaagggcaucuacaacguggccaccugcggccuguucggccuggugagcuuccugcugcugugcggcagaagcugcagcaccaccuacaagggcguguacgagcugcagacccuggagcuggacauggccagccugaacaugaccaugccccugagcugcaccaagaacaacagccaccacuacaucauggugggcaacgagaccggccuggagcugacccugaccaacaccagcaucaucaaccacaaguucugcaaccugagcgacgcccacaagaagaaccuguacgaccacgcccugaugagcaucaucagcaccuuccaccugagcauccccaacuucaaccaguacgaggccaugagcugcgacuucaacggcggcaagaucagcgugcaguacaaccugagccacaccuacgccguggacgccgccaaccacugcggcaccaucgccaacggcgugcugcagaccuucaugagaauggccuggggcggcagcuacaucgcccuggacagcggcaagggcaacugggacugcaucaugaccagcuaccaguaccugaucauccagaacaccaccugggaggaccacugccaguucagcagacccagccccaucggcuaccugggccugcugagccagagaaccagagacaucuacaucagcagaagacugcugggcaccuucaccuggacccugagcgacagcgagggcaacgagacccccggcggcuacugccugaccagauggaugcugaucgaggccgagcugaagugcuucggcaacaccgccguggccaagugcaacgagaagcacgacgaggaguucugcgacaugcugagacuguucgacuucaacaagcaggccaucagcagacugaagaccgaggcccagaugagcauccagcugaucaacaaggccgugaacgcccugaucaacgaccagcugaucaugaagaaccaccugagagacaucaugggcauccccuacugcaacuacagcaaguacugguaccugaaccacaccgugaccggcaagaccagccugcccagaugcuggcuggugagcaacggcagcuaccugaacgagacccacuucagcgacgacaucgagcagcaggccgacaacaugaucaccgagaugcugcagaaggaguacaucgacagacagggcaagaccccccugggccugguggaccuguucguguucagcaccagcuucuaccugaucagcaucuuccugcaccuggugaagauccccacccacagacacgugaucggcaagcccugccccaagccccacagacugaaccacaugggcaucugcagcugcggccuguacaagcaccccggcgugcccgugaaguggaagagauga

SEQ ID NO: 1339 - RNA, 1473 nt, Artificial Sequence
  derived and/or modified protein sequence (opt4) from LASV(Lassa virus/H.sapiens-wt/NGA/2016/ISTH_0419;Clade II)__AVO03539__GPC
augggccagaucgugaccuucuuccaggaggugccccacgugaucgaggaggugaugaacaucgugcugaucgcccugagccugcuggccauccugaagggcaucuacaacuucgccaccugcggccugaucggccugaucaccuuccuguuccugugcggcagaagcugcagcgccaucuacaagggcagcuaccagcugcagaccaucgagcugaacauggagacccugaacaugaccaugccccugagcugcaccaagaacagcagccaccacuacaucagagugggcaacgagaccggccuggagcugacccugaccaacaucagcaucaucgaccacaaguucugcaaccugagcgacgcccacaagaagaaccuguacgaccacgcccugaugagcaucaucagcaccuuccaccugagcauccccaacuucaaccaguacgaggccaugagcugcgacuucaacggcggcaagaucagcgugcaguacaaccugagccacaccuacgccguggacgccgccaaccacugcggcaccguggccaacggcgugcugcagaccuucaugagaauggccuggggcggcagcuacaucgcccuggacagcggcagaggcaacugggacugcaucaugaccagcuaccaguaccugaucauccagaacaccaccugggaggaccacugccaguucagcagacccagccccaucggcuaccugggccugcugagccagagaaccagagacaucuacaucagcagaagacugcugggcaccuucaccuggacccugagcgacagcgagggcaaggagacccccggcggcuacugccugaccagauggaugcugaucgaggccgagcugaagugcuucggcaacaccgccguggccaagugcaacgagaagcacgacgaggaguucugcgacaugcugagacuguucgacuucaacaagcaggccauccagagacugaaggccgaggcccagaugagcauccagcugaucaacaaggccgugaacgcccugaucaacgaccagcugaucaugaagaaccaccugagagacaucaugggcauccccuacugcaacuacagcaaguacugguaccugaaccacaccagcaccggcagaaccagccugcccagaugcuggcuggugagcaacggcagcuaccugaacgagacccacuucagcgacgacaucgagcagcaggccgacaacaugaucaccgagaugcugcagaaggaguacaucgacagacagggcaagaccccccugggccugguggaccuguucguguucagcaccagcuucuaccugaucagcaucuuccugcaccugaucaagauccccacccacagacacaucgugggcaagagcugccccaagccccacagacugaaccacaugggcaucugcagcugcggccuguacaagcagcccggcgugcccgugaaguggaagagauga

SEQ ID NO: 1340 - RNA, 1473 nt, Artificial Sequence
  derived and/or modified protein sequence (opt4) from LASV(Lassa virus/H.sapiens-wt/NGA/2016/ISTH_0447;Clade II)__AVO03559__GPC
augggccagaucaucaccuucuuccaggaggugccccacgugaucgaggaggugaugaacaucgugcugaucgcccugagccugcuggccauccugaagggcaucuacaacaucgccaccugcggccuguucggccuggugagcuuccugcugcugugcggcagaagcugcagcaccaccuacaagggcguguacgagcugcagacccuggagcuggacauggccagccugaacaugaccaugccccugagcugcaccaagaacaacagccaccacuacaucauggugggcaacgagaccggccuggagcugacccugaccaacaccagcaucaucaaccacaaguucugcaaccugagcgacgcccacaagaagaaccuguacgaccacacccugaugagcaucaucagcaccuuccaccugagcauccccaacuucaaccaguacgaggccaugagcugcgacuucaacggcggcaagaucagcgugcaguacaaccugagccacgccuacgccguggacgccgccaaccacugcggcaccaucgccaacggcgugcugcagaccuucaugagaauggccuggggcggcagcuacaucgcccuggacagcggcaagggcaacugggacugcaucaugaccagcuaccaguaccugaucauccagaacaccaccugggaggaccacugccaguucagcagacccagccccaucggcuaccugggccugcugagccagagaaccagagacaucuacaucagcagaagacugcugggcaccuucaccuggacccugagcgacagcgagggcaacgagacccccggcggcuacugccugaccagauggaugcugaucgaggccgagcugaagugcuucggcaacaccgccguggccaagugcaacgagaagcacgacgaggaguucugcgacaugcugagacuguucgacuucaacaagcaggccaucagaagacugaagaccgaggcccagaugagcauccagcugaucaacaaggccgugaacgcccugaucaacgaccagcugaucaugaagaaccaccugagagacaucaugggcauccccuacugcaacuacagcaaguacugguaccugaaccacaccgugaccggcaagaccagccugcccagaugcuggcuggugagcaacggcagcuaccugaacgagacccacuucagcgacgacaucgagcagcaggccgacaacaugaucaccgagcugcugcagaaggaguacaucgacagacagggcaagaccccccugggccugguggaccuguucguguucagcaccagcuucuaccugaucagcaucuuccugcaccuggugaagauccccacccacagacacguggugggcaagcccugccccaagccccacagacugaaccacaugggcaucugcagcugcggccuguacaagcaccccggcgugcccgugaaguggaagagauga

SEQ ID NO: 1341 - RNA, 1473 nt, Artificial Sequence
  derived and/or modified protein sequence (opt4) from LASV(Lassa virus/H.sapiens-wt/NGA/2016/ISTH_0543;Clade II)__AVO03595__GPC
augggccagaucaucaccuucuuccaggaggugccccacgugaucgaggaggugaugaacaucgugcugaucgcccugagccugcuggccauccugaagggcaucuacaacaucgccaccugcggccuguucggccugaucagcuuccugcugcugugcggcagaagcugcagcaccaccuacaagggcguguacgagcugcagacccuggagcuggacauggccaaccugaacaugaccaugccccugagcugcaccaagaacaacagccaccacuacaucauggugggcaacgagaccggccuggagcugacccugaccaacaccagcaucaucaaccacaaguucugcaaccugagcgacgcccacaagaagaaccuguacgaccacgcccugaugagcaucaucagcaccuuccaccugagcauccccaacuucaaccaguacgaggccaugagcugcgacuucaacggcggcaagaucagcgugcaguacaaccugagccacagcuacgccguggacgccgccggccacugcggcaccaucgccaacggcgugcugcagaccuucaugagaauggccuggggcggcagcuacaucgcccuggacagcggcaagggcaacugggacugcaucaugaccagcuaccaguaccuggugauccagaacaccaccugggaggaccacugccaguucagcagacccagccccaucggcuaccugggccugcugagccagagaaccagagacaucuacaucagcagaagacugcugggcaccuucaccuggacccugagcgacagcgagggcaacgaggcccccggcggcuacugccugaccagauggaugcugaucgaggccgagcugaagugcuucggcaacaccgccaucgccaagugcaacgagaagcacgacgaggaguucugcgacaugcugagacuguucgacuucaacaagcaggccaucagaagacugaaggccgaggcccagaugagcauccagcugaucaacaaggccgugaacgcccugaucaacgaccagcugaucaugaagaaccaccugagagacaucaugggcauccccuacugcaacuacagcaaguacugguaccugaaccacaccgugaccggcaagaccagccugcccaagugcuggcuggugagcaacggcagcuaccugaacgagacccacuucagcgacgacaucgagcagcaggccgacaacaugaucaccgagcugcugcagaaggaguacauggacagacagggcaagaccccccugggccugguggaccuguucguguucagcaccagcuucuaccugaucagcaucuuccugcaccuggugaagauccccacccacagacacaucgugggcagacccugccccaagccccacagacugaaccacaugggcaucugcagcugcggccuguacaagcaccccggcgugcccgugaaguggaagagauga

SEQ ID NO: 1342 - RNA, 1473 nt, Artificial Sequence
  derived and/or modified protein sequence (opt4) from LASV(Lassa virus/H.sapiens-wt/NGA/2016/ISTH_0565;Clade II)__AVO03637__GPC
augggccagaucgugaccuucuuccaggaggugccccacgugaucgaggaggugaugaacaucgugcugaucgcccugagccugcuggccauccugaagggcaucuacaacguggccaccugcggccuguucggccugaucagcuuccugcugcugugcggcagaagcugcagcaccaccuacaagggcguguacgagcugcagacccuggagcuggacauggccaaccugaacaugaccaugccccugagcugcaccaagaacagcagccaccacuacaucauggugggcaacgagaccggccuggagcugacccugaccaacaccagcaucaucaaccacaaguucugcaaccugagcgacgcccacaagaagaaccuguacgaccacgcccugaugagcaucaucagcaccuuccaccugagcauccccaacuucaaccaguacgaggccaugagcugcgacuucaacggcggcaagaucagcgugcaguacaaccugagccacaccuacgccguggacgccgccaaccacugcggcaccaucgccaacggcgugcugcagaccuucaugagaauggccuggggcggcagcuacaucgcccuggacagcggcaagggcaacugggacugcaucaugaccagcuaccaguaccugaucauccagaacaccaccugggaggaccacugccaguucagcagacccagccccaucggcuaccugggccugcugagccagagaaccagagacaucuacaucagcagaagacugcugggcaccuucaccuggacccugagcgacagcgagggcaacgaggcccccggcggcuacugccugaccagauggaugcugaucgaggccgagcugaagugcuucggcaacaccgccaucgccaagugcaacgagaagcacgacgaggaguucugcgacaugcugagacuguucgacuucaacaagcaggccaucaagagacugaagagcgaggcccagaugagcauccagcugaucaacaaggccgugaacgcccugaucaacgaccagcugaucaugaagaaccaccugagagacaucaugggcauccccuacugcaacuacagcagauacugguaccugaaccacaccgugaccggcaagaccagccugcccagaugcuggcugaucagcaacggcagcuaccugaacgagacccacuucagcgacgacaucgagcagcaggccgacaacaugaucaccgagcugcugcagaaggaguacauggacagacagggcaagaccccccugggccugguggaccuguucguguucagcaccagcuucuaccugaucagcaucuuccugcaccuggugaagauccccacccacagacacaucgugggcagacccugccccaagccccacagacugaaccacaugggcaucugcagcugcggccuguacaagcaccccggcgugcccgugaaguggaagagauga

SEQ ID NO: 1343 - RNA, 1473 nt, Artificial Sequence
  derived and/or modified protein sequence (opt4) from LASV(Lassa virus/H.sapiens-wt/NGA/2016/ISTH_0572;Clade II)__AVO03611__GPC
augggccagaucaucaccuucuuccaggaggugccccacgugaucgaggaggugaugaacaucgugcugaucgcccugagccugcuggccauccugaagggcaucuacaacguggccaccugcggccuguucggccugguggccuuccugcugcugugcggcagaagcugcagcaccaccuacaagggcguguacgagcugcagacccuggagcuggacauggccagccugaacaugaccaugccccugagcugcaccaagaacaacagccaccacuacaucauggugggcaacgagaccggccuggagcugacccugaccaacaccagcaucaucaaccacaaguucugcaaccugagcgacgcccacaagaagaaccuguacgaccacgcccugaugagcaucaucagcaccuuccaccugagcauccccaacuucaaccagcacgaggccaugagcugcgacuucaacggcggcaagaucagcgugcaguacaaccugagccacaccuacgccguggacgccgccaaccacugcggcaccaucgccaacggcgugcugcagaccuucaugagaauggccuggggcggcagcuacaucgcccuggacagcggcaagggcagcugggacugcaucaugaccagcuaccaguaccugaucauccagaacaccaccugggaggaccacugccaguucagcagacccagccccaucggcuaccugggccugcugagccagagaaccagagacaucuacaucagcagaagacugcugggcaccuucaccuggacccugagcgacagcgagggcaacgagacccccggcggcuacugccugaccagauggaugcugaucgaggccgagcugaagugcuucggcaacaccgccguggccaagugcaacgagaagcacgacgaggaguucugcgacaugcugagacuguucgacuucaacaagcaggccaucagaagacugaagaccgaggcccagaugagcauccagcugaucaacaaggccgugaacgcccugaucaacgaccagcugaucaugaagaaccaccugagagacaucaugggcauccccuacugcaacuacagcaaguacugguaccugaaccacaccgugaccggcagaaccagccugcccagaugcuggcuggugagcaacggcagcuaccugaacgagacccacuucagcgacgacaucgagcagcaggccgacaacaugaucaccgagcugcugcagaaggaguacauggacagacagggcaagaccccccugggccugguggaccuguucguguucagcaccagcuucuaccugaucagcaucuuccugcaccugaucaagauccccacccacagacacgugaucggcaagcccugccccaagccccacagacugaaccacaugggcaucugcagcugcggccuguacaagcaccccggcgugcccgugaaguggaagagauga

SEQ ID NO: 1344 - RNA, 1473 nt, Artificial Sequence
  derived and/or modified protein sequence (opt4) from LASV(Lassa virus/H.sapiens-wt/NGA/2016/ISTH_0610;Clade II)__AVO03585__GPC
augggccagaucaucaccuucuuccaggaggugccccacgugaucgaggaggugaugaacaucgugcugaucgcccugagccugcuggccauccugaagggcguguacaacguggccaccugcggccuguucggccuggugagcuuccugcugcugugcggcagaagcugcagcaccaccuacaagggcguguacgagcugcagacccuggagcuggacauggccagccugaacaugaccaugccccugagcugcaccaagaacaacagccaccacuacaucauggugggcaacgagaccggccuggagcugacccugaccaacaccagcaucaucaaccacaaguucugcaaccugagcgacgcccacaagaagaaccuguacgaccacgcccugaugagcaucaucagcaccuuccaccugagcauccccaacuucaaccaguacgaggccaugagcugcgacuucaacggcggcaagaucagcgugcaguacaaccugagccacaccuacgccguggacgccgccaaccacugcggcaccaucgccaacggcgugcugcagaccuucaugagaauggccuggggcggcagcuacaucgcccuggacagcggcagaggcagcugggacugcaucaugaccagcuaccaguaccugaucauccagaacaccaccugggaggaccacugccaguucagcagacccagccccaucggcuaccugggccugcugagccagagaaccagagacaucuacaucagcagaagacugcugggcaccuucaccuggacccugagcgacagcgagggcaacgagacccccggcggcuacugccugaccagauggaugcugaucgaggccgagcugaagugcuucggcaacaccgccguggccaagugcaacgagaagcacgacgaggaguucugcgacaugcugagacuguucgacuucaacaagcaggccaucagaagacugaaggccgaggcccagaugagcauccagcugaucaacaaggccgugaacgcccugaucaacgaccagcugaucaugaagaaccaccugagagacaucaugggcauccccuacugcaacuacagcaaguacugguaccugaaccacaccgugaccggcagaaccagccugcccagaugcuggcuggugagcaacggcagcuaccugaacgagacccacuucagcgacgacaucgagcagcaggccgacaacaugaucaccgagcugcugcagaaggaguacaucgacagacagggcaagaccccccugggccugguggaccuguucguguucagcaccagcuucuaccugaucagcaucuuccugcaccuggugaagauccccacccacagacacaucaucggcaagcccugccccaagccccacagacugaaccacaugggcaucugcagcugcggccuguacaagcaccccggcgugcccgugaaguggaagagauga

SEQ ID NO: 1345 - RNA, 1473 nt, Artificial Sequence
  derived and/or modified protein sequence (opt4) from LASV(Lassa virus/H.sapiens-wt/NGA/2016/ISTH_0621;Clade II)__AVO03543__GPC
augggccagaucgugaccuucuuccaggagaucccccacgugguggaggagaucaugaacaucgugcugaucacccugagccugcuggccauccugaagggccuguacaacuucgccaccugcggccugaucggccugaucaccuuccuguuccugugcggcagaagcugcagcaccaucuacaagggcagcuaccagcugcaggcccuggagcugaacauggagacccugaacaugaccaugccccugagcugcaccaagaacaacagccaccacuacaucagagugggcaacgagaccggccuggagcugacccugaccaacaccagcaucaucgaccacaaguucugcaaccugagcgacgcccacaagagaaaccuguacgaccacacccugaugagcaucaucagcaccuuccaccugagcauccccaacuucaaccaguacgaggccaugagcugcgacuucaacggcggcaagaucagcgugcaguacaaccugagccacagcuacgccggcgacgccgccagacacugcggcaccguggccaacggcgugcugcagaccuucaugagaauggccuggggcggcagcuacaucgcccuggacagcggcaagggcaacugggacugcaucaugaccagcuaccaguaccugaucauccagaacaccaccugggagaaccacugccaguucagcagacccagccccaucggcuaccugggccugcugagccagagaaccagagacaucuacaucagcagaagacugcugggcaccuucaccuggacccugagcgacagcgagggcaaggagacccccggcggcuacugccugaccagauggaugcugaucgaggccgagcugaagugcuucggcaacaccgccguggccaagugcaacgagaagcacgacgaggaguucugcgacaugcugagacuguucgacuucaacaagcaggccauccagagacugaagaccgaggcccagaugagcauccagcugaucaacaaggccgugaacgcccugaucaacgaccagcugaucaugaagaaccaccugagagacaucaugggcauccccuacugcaacuacagcaaguacugguaccugaaccacaccaccaccggcaagaccagccugcccaagugcuggcuggugagcaacggcagcuaccugaacgagacccacuucagcgacgacaucgagcagcaggccgacaacaugaucaccgagaugcugcagaaggaguacaucgacagacagggcaagaccccccugggccugguggaccuguucguguucagcaccagcuucuaccugaucagcaucuuccugcaccugaucaagauccccacccacagacacaucgugggcaagagcugccccaagccccacagacugaaccacaugggcaucugcagcugcggccuguacaagcagcccggcgugcuggugaaguggaagagauga

SEQ ID NO: 1346 - RNA, 1473 nt, Artificial Sequence
  derived and/or modified protein sequence (opt4) from LASV(Lassa virus/H.sapiens-wt/NGA/2016/ISTH_0701;Clade II)__AVO03629__GPC
augggccagaucaucaccuucuuccaggaggugccccacgugaucgaggaggugaugaacaucgugcugaucgcccugagccugcuggccauccugaagggcaucuacaacguggccaccugcggccuguucggccuggugagcuuccugcugcugugcggcagaagcugcagcaccaccuacaagggcguguacgagcugcagacccuggagcuggacauggccagccugaacaugaccaugccccugagcugcaccaagaacaacagccaccacuacaucauggugggcaacgagaccggccuggagcugacccugaccaacaccagcaucaucggccacaaguucugcaaccugagcgacgcccacaagaagaaccuguacgaccacgcccugaugagcaucaucagcaccuuccaccugagcauccccaacuucaaccaguacgaggccaugagcugcgacuucaacggcggcaagaucagcgugcaguacaaccugagccacgccuacgccguggacgccgccaaccacugcggcaccaucgccaacggcgugcugcagaccuucaugagaauggccuggggcggcagcuacaucgcccuggacagcggcaagggcagcugggacugcaucaugaccagcuaccaguaccugaucauccagaacaccaccugggaggaccacugccaguucagcagacccagccccaucggcuaccugggccugcugagccagagaaccagagacaucuacaucagcagaagacugcugggcaccuucaccuggacccugagcgacagcgagggcaacgagacccccggcggcuacugccugaccagauggaugcugaucgaggccgagcugaagugcuucggcaacaccgccguggccaagugcaacgagaagcacgacgaggaguucugcgacaugcugagacuguucgacuucaacaagcaggccaucagaagacugaagaccgaggcccagaugagcauccagcugaucaacaaggccgugaacgcccugaucaacgaccagcugaucaugaagaaccaccugagagacaucaugggcauccccuacugcaacuacagcaaguacugguaccugaaccacaccgugaccggcaagaccagccugcccagaugcuggcuggugagcaacggcagcuaccugaacgagacccacuucagcgacgacaucgagcagcaggccgacaacaugaucaccgagcugcugcagaaggaguacaucgacagacagggcaagaccccccugggccugguggaccuguucguguucagcaccagcuucuaccugaucagcaucuuccugcaccuggugaagauccccacccacagacacgugaucggcaagcccugccccaagccccacagacugaaccacaugggcaucugcagcugcggccuguacaagcaccccggcgugcccgugaaguggaagagauga

SEQ ID NO: 1347 - RNA, 1473 nt, Artificial Sequence
  derived and/or modified protein sequence (opt4) from LASV(Lassa virus/H.sapiens-wt/NGA/2016/ISTH_0702;Clade II)__AVO03557__GPC
augggccagaucaucaccuucuuccaggaggugccccacgugaucgaggaggugaugaacaucgugcugaucgcccugagccugcuggccgugcugaagggcaucuacaacguggccaccugcggccuguucggccugguggccuuccugcugcugugcggcagaagcugcagcaccaccuacaagggcguguacgagcugcagacccuggagcuggacauggccaaccugaacaugaccaugccccugagcugcaccaagaacaacagccaccacuacaucauggugggcaacgagaccggccuggagcugacccugaccaacaccagcaucaucaaccacaaguucugcaaccugagcgacgcccacaagaagaaccuguacgaccacgcccugaugagcaucaucagcaccuuccaccugagcauccccaacuucaaccaguacgaggccaugagcugcgacuucaacggcggcaagaucagcgugcaguacaaccugagccacaccuacgccguggacgccgccaaccacugcggcaccaucgccaacggcgugcugcagaccuucaugagaauggccuggggcggcagcuacaucgcccuggacagcggcaagggcagcugggacugcaucaugaccagcuaccaguaccugaucauccagaacaccaccugggaggaccacugccaguucagcagacccagccccaucggcuaccugggccugcugagccagagaaccagagacaucuacaucagcagaagacugcugggcaccuucaccuggacccugagcgacagcgagggcaacgagacccccggcggcuacugccugaccagauggaugcugaucgaggccgagcugaagugcuucggcaacaccgccguggccaagugcaacgagaagcacgacgaggaguucugcgacaugcugagacuguucgacuucaacaagcaggccaucagaagacugaagaccgaggcccagaugagcauccagcugaucaacaaggccgugaacgcccugaucaacgaccagcugaucaugaagaaccaccugagagacaucaugggcauccccuacugcaacuacagcaaguacugguaccugaaccacaccgugaccggcagaaccagccugcccagaugcuggcuggugagcaacggcagcuaccugaacgagacccacuucagcgacgacaucgagcagcaggccgacaacaugaucaccgagcugcugcagaaggaguacauggacagacagggcaagaccccccugggccugguggaccuguucguguucagcaccagcuucuaccugaucagcaucuuccugcaccugaucaagauccccacccacagacacgugaucggcaagcccugccccaagccccacagacugaaccacaugggcaucugcagcugcggccuguacaagcaccccggcgugcccgugaaguggaagagauga

SEQ ID NO: 1348 - RNA, 1473 nt, Artificial Sequence
  derived and/or modified protein sequence (opt4) from LASV(Lassa virus/H.sapiens-wt/NGA/2016/ISTH_0703;Clade II)__AVO03597__GPC
augggccagaucaucaccuucuuccaggaggugccccacgugaucgaggaggugaugaacaucgugcugaucgcccugagccugcuggccauccugaagggcaucuacaacguggccaccugcggccuguucggccuggugagcuuccugcugcugugcggcagaagcugcagcaccaccuacaagggcguguacgagcugcagacccuggagcuggacauggccagccugaacaugaccaugccccugagcugcaccaagaacaacagccaccacuacaucauggugggcaacgagaccggccuggagcugacccugaccaacaccagcaucaucaaccacaaguucugcaaccugagcgacgcccacaagaagaaccuguacgaccacgcccugaugagcaucaucagcaccuuccaccugagcauccccaacuucaaccaguacgaggccaugagcugcgacuucaacggcggcaagaucagcgugcaguacaaccugagccacaccuacgccguggacgccgccagccacugcggcaccaucgccaacggcgugcugcagaccuucaugagaauggccuggggcggcagcuacaucgcccuggacagcggcaagggcagcugggacugcaucaugaccagcuaccaguaccugaucauccagaacaccaccugggaggaccacugccaguucagcagacccagccccaucggcuaccugggccugcugagccagagaaccagagacaucuacaucagcagaagacugcugggcaccuucaccuggacccugagcgacagcgagggcaacgagacccccggcggcuacugccugaccagauggaugcugaucgaggccgagcugaagugcuucggcaacaccgccguggccaagugcaacgagaagcacgacgaggaguucugcgacaugcugagacuguucgacuucaacaagcaggccaucagaagacugaagaccgaggcccagaugagcauccagcugaucaacaaggccgugaacgcccugaucaacgaccagcugaucaugaagaaccaccugagagacaucaugggcauccccuacugcaacuacagcaaguacugguaccugaaccacaccgugaccggcagaaccagccugcccagaugcuggcuggugagcaacggcagcuaccugaacgagacccacuucagcgacgacaucgagcagcaggccgacaacaugaucaccgagcugcugcagaaggaguacaucgagagacagggcaagaccccccugggccugguggaccuguucguguucagcaccagcuucuaccugaucagcaucuuccugcaccugaucaagauccccacccacagacacgugaucggcaagcccugccccaagccccacagacugaaccacaugggcaucugcagcugcggccuguacaagcaccccggcgugcccgugaaguggaagagauga

SEQ ID NO: 1349 - RNA, 1473 nt, Artificial Sequence
  derived and/or modified protein sequence (opt4) from LASV(Lassa virus/H.sapiens-wt/NGA/2016/ISTH_0717;Clade II)__AVO03547__GPC
augggccagaucgugaccuucuuccaggaggugccccacgugaucgaggaggugaugaacaucgugcugaucgcccugagcauccuggccauccugaagggccuguacaacguggccaccugcggccugaucggccuggugaccuuccugcugcugagcggcagaagcugcagcaugaucuacaagggcguguacgagcugcagacccuggagcugaacauggagacccugaacaugaccaugccccugagcugcaccaagaacaacagccaccacuacaucauggugggcaacgagaccggccuggagcugacccugaccaacaccagccugcugaaccacaaguucugcaaccugagcgacgcccacaagaagaaccuguacgaccacacccugaugagcaucaucagcaccuuccaccugagcauccccaacuucaaccaguacgaggccaugagcugcgacuucaacggcggcaagaucaccgugcaguacaaccugagccacaccuacgccguggacgccgugaaccacugcggcacccuggccaacggcauccugcagaccuucaugagaauggccuggggcggcagcuacaucgcccuggacagcagacacggcagcugggacugcaucaugaccagcuaccaguaccugaucauccagaacaccaccugggaggaccacugccaguucagcagacccagccccaucggcuaccugggccugcugagccagagaaccagagacaucuacaucagcagaagacugcugggcaccuucaccuggacccugagcgacagcgagggcaacgagacccccggcggcuacugccugaccagauggaugcugaucgaggccgagcugaagugcuucggcaacaccgccguggccaagugcaacgagaagcacgacgaggaguucugcgacaugcugagacuguucgacuucaacaagcaggccaucagaagacugaaggccgaggcccagaugagcauccagcugaucaacaaggccgugaacgcccugaucaacgaccagcugaucaugaagaaccaccugagagacaucaugggcauccccuacugcaacuacagcaaguacugguaccugaaccacaccagcaccggcagaaccagccugcccagaugcuggcuggugagcaacggcagcuaccugaacgagacccacuucagcgacgacaucgagcagcaggccgacaacaugaucaccgagaugcugcagaaggaguaccuggacagacagggcaagaccccccugggccugguggaccuguucguguucagcaccagcuucuaccugaucagcaucuuccugcaccugaucaagauccccacccacagacacaucgugggcaagcccugccccaagccccacagacugaaccacaugggcaucugcagcugcggccuguacaagcagcccggcgugcccgugagauggaagagauga

SEQ ID NO: 1350 - RNA, 1473 nt, Artificial Sequence
  derived and/or modified protein sequence (opt4) from LASV(Lassa virus/H.sapiens-wt/NGA/2016/ISTH_0753;Clade II)__AVO03609__GPC
augggccagaucaucaccuucuuccaggaggugccccacgugaucgaggaggugaugaacaucgugcugaucgcccugagccugcuggccauccugaagggcaucuacaacguggccaccugcggccuguucggccuggugagcuuccugcugcugugcggcagaagcugcagcaccaccuacaagggcguguacgagcugcagacccuggagcuggacauggccagccugaacaugaccaugccccugagcugcaccaagaacaacagccaccacuacaucauggugggcaacgagaccggccuggagcugacccugaccaacaccagcaucaucaaccacaaguucugcaaccugagcgacgcccacaagaagaaccuguacgaccacgcccugaugagcaucaucagcaccuuccaccugagcauccccaacuucaaccaguacgaggccaugagcugcgacuucaacggcggcaagaucagcgugcaguacaaccugagccacaccuacgccguggacgccgccaaccacugcggcaccaucgccaacggcgugcugcagaccuucaugagaauggccuggggcggcagcuacaucgcccuggacagcggcaagggcaacugggacugcaucaugaccagcuaccaguaccugaucauccagaacaccaccugggaggaccacugccaguucagcagacccagccccaucggcuaccugggccugcugagccagagaaccagagacaucuacaucagcagaagacugcugggcaccuucaccuggacccugagcgacagcgagggcaacgagacccccggcggcuacugccugaccagauggaugcugaucgaggccgagcugaagugcuucggcaacaccgccguggccaagugcaacgagaagcacgacgaggaguucugcgacaugcugagacuguucgacuucaacaagcaggccaucagcagacugaagaccgaggcccagaugagcauccagcugaucaacaaggccgugaacgcccugaucaacgaccagcugaucaugaagaaccaccugagagacaucaugggcauccccuacugcaacuacagcaaguacugguaccugaaccacaccgugaccggcagaaccagccugcccagaugcuggcuggugagcaacggcagcuaccugaacgagacccacuucagcgacgacaucgagcagcaggccgacaacaugaucaccgagcugcugcagaaggaguacauggacagacagggcaagaccccccugggccugguggaccuguucguguucagcaccagcuucuaccugaucagcaucuuccugcaccuggugaagauccccacccacagacacgugaucggcaagcccugccccaagccccacagacugaaccacaugggcaucugcagcugcggccuguacaagcaccccggcgugcccgugaaguggaagagauga

SEQ ID NO: 1351 - RNA, 1473 nt, Artificial Sequence
  derived and/or modified protein sequence (opt4) from LASV(Lassa virus/H.sapiens-wt/NGA/2016/ISTH_0759;Clade II)__AVO03593__GPC
augggccagaucaucaccuucuuccaggaggugccccacgugaucgaggaggugaugaacaucgugcugaucgcccugagccugcuggccauccugaagggcaucuacaacguggccaccugcggccuguucggccuggugagcuuccugcugcugugcggcagaagcugcagcaccaccuacaagggcguguacgagcugcagacccuggagcuggacauggccagccugaacaugaccaugccccugagcugcaccaagaacaacagccaccacuacaucauggugggcaacgagaccggccuggagcugacccugaccaacaccagcaucaucaaccacaaguucugcaaccugagcgacgcccacaagaagaaccuguacgaccacacccugaugagcaucaucagcaccuuccaccugagcauccccaacuucaaccaguacgaggccaugagcugcgacuucaacggcggcaagaucagcgugcaguacaaccugagccacaccuacgccguggacgccgccaaccacugcggcaccaucgccaacggcgugcugcagaccuucaugagaauggccuggggcggcagcuacaucgcccuggacagcggcaagggcagcugggacugcaucaugaccagcuaccaguaccugaucauccagaacaccagcugggaggaccacugccaguucagcagacccagccccaucggcuaccugggccugcugagccagagaaccagagacaucuacaucagcagaagacugcugggcaccuucaccuggacccugagcgacagcgagggcaacgagacccccggcggcuacugccugaccagauggaugcugaucgaggccgagcugaagugcuucggcaacaccgccguggccaagugcaacgagaagcacgacgaggaguucugcgacaugcugagacuguucgacuucaacaagcaggccaucagaagacugaagaccgaggcccagaugagcauccagcugaucaacaaggccgugaacgcccugaucaacgaccagcugaucaugaagaaccaccugagagacaucaugggcauccccuacugcaacuacagcaaguacugguaccugaaccacaccgugaccggcaagaccagccugcccagaugcuggcuggugagcaacggcagcuaccugaacgagacccacuucagcgacgacaucgagcagcaggccgacaacaugaucaccgagcugcugcagaaggaguacaucgacagacagggcaagaccccccugggccugguggaccuguucguguucagcaccagcuucuaccugaucagcaucuuccugcaccuggugaagauccccacccacagacacgugaucggcaagcccugccccaagccccacagacugaaccacaugggcaucugcagcugcggccuguacaagcaccccggcgugcccgugaaguggaagagauga

SEQ ID NO: 1352 - RNA, 1473 nt, Artificial Sequence
  derived and/or modified protein sequence (opt4) from LASV(Lassa virus/H.sapiens-wt/NGA/2016/ISTH_0777;Clade II)__AVO03615__GPC
augggccagaucaucaccuucuuccaggaggugccccacgugaucgaggaggugaugaacaucgugcugaucgcccugagccugcuggccauccugaagggcaucuacaacguggccaccugcggccugcugggccugaucagcuuccugcugcugugcggcagaagcugcagcaccaccuacaagggcguguacgagcugcagacccuggagcuggacauggccaaccugaacaugaccaugccccugagcugcaccaagaacagcagccaccacuacaucauggugggcaacgagaccggccuggagcugacccugaccaacaccagcaucaucaaccacaaguucugcaaccugagcgacgcccacaagaagaaccuguacgaccacgcccugaugagcaucaucagcaccuuccaccugagcauccccaacuucaaccaguacgaggccaugagcugcgacuucaacggcggcaagaucagcgugcaguacaaccugagccacgccuacgccguggacgccgccaaccacugcggcaccaucgccaacggcgugcugcagaccuucaugagaauggccuggggcggcagcuacaucgcccuggacagcggcaagggcaacugggacugcaucaugaccagcuaccaguaccugaucauccagaacaccaccugggaggaccacugccaguucagcagacccagccccaucggcuaccugggccugcugagccagagaaccagagacaucuacaucagcagaagacugcugggcaccuucaccuggacccugagcgacagcgagggcaacgaggcccccggcggcuacugccugaccagauggaugcugaucgaggccgagcugaagugcuucggcaacaccgccaucgccaagugcaacgagaagcacgacgaggaguucugcgacaugcugagacuguucgacuucaacaagcaggccaucagaagacugaagaccgaggcccagaugagcauccagcugaucaacaaggccgugaacgcccugaucaacgaccagcugaucaugaagaaccaccugagagacaucaugggcauccccuacugcaacuacagcaaguacugguaccugaaccacaccgugaccggcaagaccagccugcccagaugcuggcugaucagcaacggcagcuaccugaacgagacccacuucagcgacgacaucgagcagcaggccgacaacaugaucaccgagcugcugcagaaggaguacauggacagacagggcaagaccccccugggccugguggaccuguucguguucagcaccagcuucuaccugaucagcaucuuccugcaccuggugaagauccccacccacagacacaucgugggcaagcccugccccaagccccacagacugaaccacaugggcaucugcagcugcggccuguacaagcaccccggcgugcccgugaaguggaagagauga

SEQ ID NO: 1353 - RNA, 1473 nt, Artificial Sequence
  derived and/or modified protein sequence (opt4) from LASV(Lassa virus/H.sapiens-wt/NGA/2016/ISTH_0779;Clade II)__AVO03655__GPC
augggccagaucaucaccuucuuccaggaggugccccacgugguggaggaggugaugaacguggugcugaucgcccugagccugcuggccauccugaagggcaucuacaacaucgccaccugcggccuguucggccugaucagcuuccugcugcugugcggcagaagcugcagcaccaccuacaagggcguguacgagcugcagacccuggagcuggacauggccaaccugaacaugaccaugccccugagcugcaccaagaacaacagccaccacuacaucauggugggcaacgagaccggccuggagcugacccugaccaacaccagcaucaucaaccacaaguucugcaaccugagcgacgcccacaagaagaaccuguacgaccacacccugaugagcaucaucagcaccuuccaccugagcauccccaacuucaaccaguacgaggccaugagcugcgacuucaacggcggcaagaucagcgugcaguacaaccugagccacggcuacgccguggacgccgccaaccacugcggcaccaucgccaacggcgugcugcagaccuucaugagaauggccuggggcggcagcuacaucgcccuggacagcggcaagggcaacugggacugcaucaugaccagcuaccaguaccuggugauccagaacaccaccugggaggaccacugccaguucagcagacccagccccaucggcuaccugggccugcugagccagagaaccagagacaucuacaucagcagaagacugcugggcaccuucaccuggacccugagcgacagcgagggcaacgacgcccccggcggcuacugccugaccagauggaugcugaucgaggccgagcugaagugcuucggcaacaccgccaucgccaagugcaacgagaagcacgacgaggaguucugcgacaugcugagacuguucgacuucaacagacaggccaucaagagacugaagaccgaggcccagaugagcauccagcugaucaacaaggccgugaacgcccugaucaacgaccagcugaucaugaagaaccaccugagagacaucaugggcauccccuacugcaacuacagcaaguacugguaccugaacaacaccgugaccggcaagagcagccugcccaagugcuggcuggugagcaacggcagcuaccugaacgagacccacuucagcgacgacaucgagcagcaggccgacaacaugaucaccgagaugcugcagaaggaguacaucgacagacagggcaagaccccccugggccugguggaccuguucguguucagcaccagcuucuaccugaucagcaucuuccugcaccuggugagaauccccacccacagacacaucaccggcaagcccugccccaagccccacagacugaaccacaugggcaucugcagcugcggccuguacaagcagcccggcgugcccgugaaguggaagagauga

SEQ ID NO: 1354 - RNA, 1473 nt, Artificial Sequence
  derived and/or modified protein sequence (opt4) from LASV(Lassa virus/H.sapiens-wt/NGA/2016/ISTH_0917;Clade II)__AVO03535__GPC
augggccagaucgugaccuucuuccaggaggugccccacgugaucgaggagaucaugaacaucgugcugaucacccugagccugcuggccauccugaagggcguguacaaccuggccaccugcggccugaucggccugaucaccuuccuguuccugugcggcagaagcugcagcaugaccuacaagggcaacuaccagcuggagacccuggagcugaacauggagaugcugaacaugaccaugccccugagcugcaccaagaacaacagccaccacuacaucagagugggcaacgagaccggccuggagcugacccugaccaacaccagcaucauccagcacaaguucugcaaccugagcgacgcccacaagagaaaccuguacgaccacagccugaugagcaucgugagcaccuuccaccugagcauccccaacuucaaccaguacgaggccaugagcugcgacuucaacggcggcaagaucagcauccaguacaaccugagccacaccuacgccggcgacgccgccaagcacugcggcacccuggccaacggcauccugcagaccuucaugagaauggccuggggcggcagcuacaucgcccuggacagcggcagaggcggcugggacugcaucaugaccaacuaccaguaccugaucauccagaacgugaccugggaggaccacugccaguucagcagacccagccccaucggcuaccugggccugcugagccagagaaccagagagguguacaucagcagaagacugcugggcaccuucaccuggacccugagcgacagcgagggcaacgaggcccccggcggcuacugccugaccagauggaugcugaucgaggccgagcugaagugcuucggcaacaccgccguggccaagugcaacgagaagcacgacgaggaguucugcgacaugcugagacuguucgacuucaacaagcaggccaucagaagacugaaggccgagacccagaugagcauccagcugaucaacaaggccgugaacgcccugaucaacgaccagcugaucaugaagaaccaccugagagacaucaugggcauccccuacugcaacuacagcaaguacugguaccugaaccacaccaucaccggcagaaccagccugcccagaugcuggcuggugagcaacggcagcuaccugaacgagacccacuucagcgacgacaucgagcagcaggccgacaacaugaucaccgagaugcugcagaaggaguacaucgacagacagggcaagaccccccugggccugguggaccuguucguguucagcaccagcuucuaccugaucagcaucuuccugcaccuggugaagauccccacccacagacacaucgugggcaagagcugccccaagccccacagacugaaccacaugggcaucugcagcugcggccuguacaagagacccggcgugagcgugagauggaagagauga

SEQ ID NO: 1355 - RNA, 1473 nt, Artificial Sequence
  derived and/or modified protein sequence (opt4) from LASV(Lassa virus/H.sapiens-wt/NGA/2016/ISTH_1006;Clade II)__AVO03643__GPC
augggccagaucaucaccuucuuccaggaggugccccacgugaucgaggaggugaugaacaucgugcugaucgcccugagccugcuggccauccugaagggcaucuacaacguggccaccugcggccuguucggccugguggccuuccugcugcugugcggcagaagcugcagcaccaccuacaagggcguguacgagcugcagacccuggagcuggacauggccagccugaacaugaccaugccccugagcugcaccaagaacaacagccaccacuacaucauggugggcaacgagaccggccuggagcugacccugaccaacaccagcaucaucaaccacaaguucugcaaccugagcgacgcccacaagaagaaccuguacgaccacgcccugaugagcaucaucagcaccuuccaccugagcauccccaacuucaaccaguacgaggccaugggcugcgacuucaacggcggcaagaucagcgugcaguacaaccugagccacagcuacgccguggacgccgccaaccacugcggcaccaucgccaacggcgugcugcagaccuucaugagaauggccuggggcggcagcuacaucgcccuggacagcggcaagggcagcugggacugcaucaugaccagcuaccaguaccugaucauccagaacaccaccugggaggaccacugccaguucagcagacccagccccaucggcuaccugggccugcugagccagagaaccagagacaucuacaucagcagaagacugcugggcaccuucaccuggacccugagcgacagcgagggcaacgagacccccggcggcuacugccugaccagauggaugcugaucgaggccgagcugaagugcuucggcaacaccgccguggccaagugcaacgagaagcacgacgaggaguucugcgacaugcugagacuguucgacuucaacaagcaggccaucagaagacugaagaccgaggcccagaugagcauccagcugaucaacaaggccgugaacgcccugaucaacgaccagcugaucaugaagaaccaccugagagacaucaugggcauccccuacugcaacuacagcaaguacugguaccugaaccacaccgugaccggcagaaccagccugcccagaugcuggcuggugagcaacggcagcuaccugaacgagacccacuucagcgacgacaucgagcagcaggccgacaacaugaucaccgagcugcugcagaaggaguacauggacagacagggcaagaccccccugggccugguggaccuguucguguucagcaccagcuucuaccugaucagcaucuuccugcaccugaucaagauccccacccacagacacgugaucggcaagcccugccccaagccccacagacugaaccacaugggcaucugcagcugcggccuguacaagcaccccggcgugcccgugaaguggaagagauga

SEQ ID NO: 1356 - RNA, 1473 nt, Artificial Sequence
  derived and/or modified protein sequence (opt4) from LASV(Lassa virus/H.sapiens-wt/NGA/2016/ISTH_1026;Clade II)__AVO03589__GPC
augggccagaucaucaccuucuuccaggaggugccccacgugaucgaggaggugaugaacaucgugcugaucgcccugagccugcuggccauccugaagggcaucuacaacguggccaccugcggccuguucggccuggugagcuuccugcugcugugcggcagaagcugcagcaccaccuacaagggcguguacgagcugcagacccuggagcuggacauggccagccugaacaugaccaugccccugagcugcaccaagaacaacagccaccacuacaucauggugggcaacgagaccggccuggagcugacccugaccaacaccagcaucaucaaccacaaguucugcaaccugagcgacgcccacaagaagaaccuguacgaccacgcccugaugagcaucaucagcaccuuccaccugagcauccccaacuucaaccaguacgaggccaugagcugcgacuucaacggcggcaagaucagcgugcaguacaaccugagccacgccuacgccaucgacgccgccagccacugcggcaccaucgccaacggcgugcugcagaccuucaugagaauggccuggggcggcagcuacaucgcccuggacagcggcaagggcagcugggacugcaucaugaccagcuaccaguaccugaucauccagaacaccaccugggaggaccacugccaguucagcagacccagccccaucggcuaccugggccugcugagccagagaaccagagacaucuacaucagcagaagacugcugggcaccuucaccuggacccugagcgacagcgagggcaacgagacccccggcggcuacugccugaccagauggaugcugaucgaggccgagcugaagugcuucggcaacaccgccguggccaagugcaacgagaagcacgacgaggaguucugcgacaugcugagacuguucgacuucaacaagcaggccaucagaagacugaagaccgaggcccagaugagcauccagcugaucaacaaggccgugaacgcccugaucaacgaccagcugaucaugaagaaccaccugagagacaucaugggcauccccuacugcaacuacagcaaguacugguaccugaaccacaccgugaccggcaagaccagccugcccagaugcuggcuggugagcaacggcagcuaccugaacgagacccacuucagcgacgacaucgagcagcaggccgacaacaugaucaccgagcugcugcagaaggaguaccuggacagacagggcaagaccccccugggccugguggaccuguucguguucagcaccagcuucuaccugaucagcaucuuccugcaccuggugaagauccccacccacagacacgugaucggcagacccugccccaagccccacagacugaaccacaugggcaucugcagcugcggccuguacaagcaccccggcgugcccgugaaguggaagagauga

SEQ ID NO: 1357 - RNA, 1473 nt, Artificial Sequence
  derived and/or modified protein sequence (opt4) from LASV(Lassa virus/H.sapiens-wt/NGA/2016/ISTH_1070;Clade II)__AVO03651__GPC
augggccagaucaucaccuucuuccaggaggugccccacgugaucgaggaggugaugaacaucgugcugaucgcccugagccugcuggccauccugaagggcaucuacaacguggccaccugcggccuguucggccuggugagcuuccugcugcugugcggcagaagcugcagcaccaccuacaagggcguguacgagcugcagacccuggagcuggacauggccagccugaacaugaccaugccccugagcugcaccaagaacaacagccaccacuacaucauggugggcaacgagaccggccuggagcugacccugaccaacaccagcaucaucaaccacaaguucugcaaccugagcgacgcccacaagaagaaccuguacgaccacgcccugaugagcaucaucagcaccuuccaccugagcauccccaacuucaaccaguacgaggccaugagcugcgacuucaacggcggcaagaucagcgugcaguacaaccugagccacaccuucgccguggacgccgccaaccacugcggcaccaucgccaacggcgugcugcagaccuucaugagaauggccuggggcggcagcuacaucgcccuggacagcggcaagggcagcugggacugcaucaugaccagcuaccaguaccugaucauccagaacaccaccugggaggaccacugccaguucagcagacccagccccaucggcuaccugggccugcugagccagagaaccagagacaucuacaucagcagaagacugcugggcaccuucaccuggacccugagcgacagcgagggcaacgagacccccggcggcuacugccugaccagauggaugcugaucgaggccgagcugaagugcuucggcaacaccgccguggccaagugcaacgagaagcacgacgaggaguucugcgacaugcugagacuguucgacuucaacaagcaggccaucagaagacugaagaccgaggcccagaugagcauccagcugaucaacaaggccgugaacgcccugaucaacgaccagcugaucaugaagaaccaccugagagacaucaugggcauccccuacugcaacuacagcaaguacugguaccugaaccacaccgugaccggcaagaccagccugcccagaugcuggcuggugagcaacggcagcuaccugaacgagacccacuucagcgacgacaucgagcagcaggccgacaacaugaucaccgagcugcugcagaaggaguacauggacagacagggcaagaccccccugggccugguggaccuguucguguucagcaccagcuucuaccugaucagcaucuuccugcaccuggugaagauccccacccacagacacaucaucggcaagcccugccccaagccccacagacugaaccacaugggcaucugcagcugcggccuguacaagcaccccggcgugcccgugaaguggaagagauga

SEQ ID NO: 1358 - RNA, 1473 nt, Artificial Sequence
  derived and/or modified protein sequence (opt4) from LASV(Lassa virus/H.sapiens-wt/NGA/2016/ISTH_1123;Clade II)__AVO03645__GPC
augggccagaucaucaccuucuuccaggaggugccccacgugaucgaggaggugaugaacaucgugcugaucgcccugagccugcuggccauccugaagggcaucuacaacguggccaccugcggccuguucggccuggugagcuuccugcugcugugcggcagaagcugcagcaccaccuacaagggcguguacgagcugcagacccuggagcuggacaugggcagccugaacaugaccaugccccugagcugcaccaagaacaacagccaccacuacaucauggugggcaacgagaccggccuggagcugacccugaccaacaccagcaucaucaaccacaaguucugcaaccugagcgacgcccacaagaagaaccuguacgaccacgcccugaugagcaucaucagcaccuuccaccugagcauccccaacuucaaccaguacgaggccaugagcugcgacuucaacggcggcaagaucagcgugcaguacaaccugagccacgccuacgccguggacgccgccaaccacugcggcaccaucgccaacggcgugcugcagaccuucaugagaauggccuggggcggcagcuacaucgcccuggacagcggcaagggcagcugggacugcaucaugaccagcuaccaguaccugaucauccagaacaccagcugggaggaccacugccaguucagcagacccagccccaucggcuaccugggccugcugagccagagaaccagagacaucuacaucagcagaagacugcugggcaccuucaccuggacccugagcgacagcgagggcaacgagacccccggcggcuacugccugaccagauggaugcugaucgaggccgagcugaagugcuucggcaacaccgccguggccaagugcaacgagaagcacgacgaggaguucugcgacaugcugagacuguucgacuucaacaagcaggccaucagaagacugaagaccgaggcccagaugagcauccagcugaucaacaaggccgugaacgcccugaucaacgaccagcugaucaugaagaaccaccugagagacaucaugggcauccccuacugcaacuacagcaaguacugguaccugaaccacaccgugaccggcaagaccagccugcccagaugcuggcuggugagcaacggcagcuaccugaacgagacccacuucagcgacgacaucgagcagcaggccgacaacaugaucaccgagcugcugcagaaggaguacaucgacagacagggcaagaccccccugggccugguggaccuguucguguucagcaccagcuucuaccugaucagcaucuuccugcaccuggugaagauccccacccacagacacgugaucggcaagcccugccccaagccccacagacugaaccacaugggcaucugcagcugcggccuguacaagcaccccggcgugcccgugaaguggaagagauga

SEQ ID NO: 1359 - RNA, 1473 nt, Artificial Sequence
  derived and/or modified protein sequence (opt4) from LASV(Lassa virus/H.sapiens-wt/NGA/2016/ISTH_1150;Clade II)__AVO03627__GPC
augggccaggugaucaccuucuuccaggagaucccccacgugaucgaggaggugaugaacaucgugcugaucacccugagccugcuggccauccugaagggcaucuacaacguggccaccugcggccuguucggccugaucagcuuccugcugcugugcggcagaagcugcagcaccaccuacaagggcguguacgagcugcagacccuggagcuggacauggccaaccugaacaugaccaugccccugagcugcaccaagaacagcagccaccacuacaucauggugggcaacgagaccggccuggagcugacccugaccaacaccagcaucaucaaccacaaguucugcaaccugagcgacgcccacaagaagaaccuguacgaccacgcccugaugagcaucaucagcaccuuccaccugagcauccccaacuucaaccaguacgaggccaugagcugcgacuucaacggcggcaagaucagcgugcaguacaaccugagccacgccuacgccguggacgccgccaaccacugcggcaccaucgccaacggcgugcugcagaccuucaugagaauggccuggggcggcagcuacaucgcccuggacagcggcaagggcaacugggacugcaucaugaccagcuaccaguaccugaucauccagaacaccaccugggaggaccacugccaguucagcagacccagccccaucggcuaccugggccugcugagccagagaaccagagacaucuacaucagcagaagacugcugggcaccuucaccuggacccugagcgacagcgagggcaacgaggcccccggcggcuacugccugaccagauggaugcugaucgaggccgagcugaagugcuucggcaacaccgccaucgccaagugcaacgagaagcacgacgaggaguucugcgacaugcugagacuguucgacuucaacaagcaggccaucagaagacugaagaccgaggcccagaagagcauccagcugaucaacaaggccgugaacgcccugaucaacgaccagcugaucaugaagaaccaccugagagacaucaugggcauccccuacugcaacuacagcaaguacugguaccugaaccacaccgugaccggcaagaccagccugcccaagugcuggcugaucagcaacggcagcuaccugaacgagacccacuucagcgacgacaucgagcagcaggccgacaacaugaucaccgagcugcugcagaaggaguacauggacagacagggcaagaccccccugggccugguggaccuguucguguucagcaccagcuucuaccugaucagcaucuuccugcaccuggugaagauccccacccacagacacaucgugggcagacccugccccaagccccacagacugaaccacaugggcaucugcagcugcggccuguacaagcaccccggcgugcccgugaaguggaagagauga

SEQ ID NO: 1360 - RNA, 1473 nt, Artificial Sequence
  derived and/or modified protein sequence (opt4) from LASV(Lassa virus/H.sapiens-wt/NGA/2016/ISTH_1174;Clade II)__AVO03555__GPC
augggccagaucaucaccuucuuccaggaggugccccacgugaucgaggaggugaugaacaucgugcugaucgcccugagccugcuggccauccugaagggcaucuacaacguggccaccugcggcuucuucggccuggugagcuuccugcugcugugcggcagaagcugcagcaccaucuacaagggcguguacgagcugcagacccuggagcuggacauggccagccugaacaugaccaugccccugagcugcaccaagaacaacagccaccacuacaucauggugggcaacgagaccggccuggagcugacccugaccaacaccagcaucaucaaccacaaguucugcaaccugagcgacgcccacaagaagaaccuguacgaccacgcccugaugagcaucaucagcaccuuccaccugagcaucccccacuucaaccaguacgaggccaugagcugcgacuucaacggcggcaagaucagcgugcaguacaaccugagccacaccuacgccguggacgccgccaaccacugcggcaccaucgccaacggcgugcugcagaccuucaugagaauggccuggggcggcagcuacaucgcccuggacagcggcaagggcagcugggacugcaucaugaccagcuaccaguaccugaucauccagaacaccaccugggaggaccacugccaguucagcagacccagccccaucggcuaccugggccugcugagccagagaaccagagacaucuacaucagcagaagacugcugggcaccuucaccuggacccugagcgacagcgagggcaacgagacccccggcggcuacugccugaccagauggaugcugaucgaggccgagcugaagugcuucggcaacaccgccguggccaagugcaacgagaagcacgacgaggaguucugcgacaugcugagacuguucgacuucaacaagcaggccaucagaaagcugaagaccgaggcccagaugagcauccagcugaucaacaaggccgugaacgcccugaucaacgaccagcugaucaugaagaaccaccugagagacaucaugggcauccccuacugcaacuacagcaaguacugguaccugaaccacaccgugaccggcaagaccagccugcccagaugcuggcuggugagcaacggcagcuaccugaacgagacccacuucagcgacgacaucgagcagcaggccgacaacaugaucaccgagcugcugcagaaggaguacauggacagacagggcaagaccccccugggccugguggaccuguucguguucagcaccagcuucuaccugaucagcaucuuccugcaccuggugaagauccccacccacagacacgugaucggcaagcccugccccaagccccacagacugaaccacaugggcaucugcagcugcggccuguacaagcaccccggcgugcccgugaaguggaagagauga

SEQ ID NO: 1361 - RNA, 1473 nt, Artificial Sequence
  derived and/or modified protein sequence (opt4) from LASV(Lassa virus/H.sapiens-wt/NGA/2016/ISTH_1207;Clade II)__AVO03599__GPC
augggccagaucaucaccuucuuccaggaggugccccacgugaucgaggaggugaugaacaucgugcugaucgcccugagccugcuggccauccugaagggcaucuacaacguggccaccugcggccuguucggccuggugagcuuccugcugcugugcggcagaagcugcagcaccaccuacaagggcguguacgagcugcagacccuggagcuggacaugaccagccugaacaugaccaugccccugagcugcaccaagaacaacagccaccacuacaucauggugggcaacgagaccggccuggagcugacccugaccaacaccagcaucaucaaccacaaguucugcaaccugagcgacgcccacaagaagaaccuguacgaccacgcccugaugagcaucaucagcaccuuccaccugagcauccccaacuucaaccaguacgaggccaugagcugcgacuucaacggcggcaagaucagcgugcaguacaaccugagccacaccuacgccguggacgccgccaaccacugcggcaccaucgccaacggcgugcugcagaccuucaugagaauggccuggggcggcagcuacaucgcccuggacagcggcaagggcagcugggacugcaucaugaccagcuaccaguaccugaucauccagaacaccaccugggaggaccacugccaguucagcagacccagccccaucggcuaccugggccugcugagccagagaaccagagacaucuacaucagcagaagacugcugggcaccuucaccuggacccugagcgacagcgagggcaacgacacccccggcggcuacugccugaccagauggaugcugaucgaggccgagcugaagugcuucggcaacaccgccguggccaagugcaacgagaagcacgacgaggaguucugcgacaugcugagacuguucgacuucaacaagcaggccaucagaagacugaagaccgaggcccagaugagcauccagcugaucaacaaggccgugaacgcccugaucaacgaccagcugaucaugaagaaccaccugagagacaucaugggcauccccuacugcaacuacagcaaguacugguaccugaaccacaccgugaccggcaagaccagccugcccagaugcuggcuggugagcaacggcagcuaccugaacgagacccacuucagcgacgacaucgagcagcaggccgacaacaugaucaccgagcugcugcagaaggaguacaucgacagacagggcaagaccccccugggccugguggaccuguucguguucagcaccagcuucuaccugaucagcaucuuccugcaccuggugaagauccccacccacagacacgugaucggcaagcccugccccaagccccacagacugaaccacaugggcaucugcagcugcggccuguacaagcaccccggcgugcccgugaaguggaagagauga

SEQ ID NO: 1362 - RNA, 1473 nt, Artificial Sequence
  derived and/or modified protein sequence (opt4) from LASV(Lassa virus/H.sapiens-wt/NGA/2016/ISTH_1306;Clade II)__AVO03623__GPC
augggccagaucaucaccuucuuccaggaggugccccacgugaucgaggaggugaugaacaucgugcugaucgcccugagccugcuggccauccugaagggcaucuacaacguggccaccugcggccuguucggccuggugagcuuccugcugcugugcggcagaagcugcagcaccaccuacaagggcguguacgagcugcagacccuggagcuggacauggccagccugaacaugaccaugccccugagcugcaccaagaacaacagccaccacuacaucauggugggcaacgagaccggccuggagcugacccugaccaacaccagcaucaucaaccacaaguucugcaaccugagcgacgcccacaagaagaaccuguacgaccacgcccugaugagcaucaucagcaccuuccaccugagcauccccaacuucaaccaguacgaggccaugagcugcgacuucaacggcggcaagaucagcgugcaguacaaccugagccacaccuacgccguggacgccgccaaccacugcggcaccguggccaacggcgugcugcagaccuucaugagaauggccuggggcggcagcuacaucgcccuggacagcggcaagggcagcugggacugcaucaugaccagcuaccaguaccugaucauccagaacaccaccugggaggaccacugccaguucagcagacccagccccaucggcuaccugggccugcugagccagagaaccagagacaucuacaucagcagaagacugcugggcaccuucaccuggacccugagcgacagcgagggcaacgagacccccggcggcuacugccugaccagauggaugcugaucgaggccgagcugaagugcuucggcaacaccgccguggccaagugcaacgagaagcacgacgaggaguucugcgacaugcugagacuguucgacuucaacaagcaggccaucagaagacugaagaccgaggcccagaugagcauccagcugaucaacaaggccgugaacgcccugaucaacgaccagcugaucaugaagaaccaccugagagacaucaugggcauccccuacugcaacuacagcaaguacugguaccugaaccacaccgugaccggcagaaccagccugcccagaugcuggcuggugagcaacggcagcuaccugaacgagacccacuucagcgacgacaucgagcagcaggccgacaacaugaucaccgagcugcugcagaaggaguacaucgacagacagggcaagaccccccugggccugguggaccuguucguguucagcaccagcuucuaccugaucagcaucuuccugcaccuggugaagauccccacccacagacacgugaucggcaagcccugccccaagccccacagacugaaccacaugggcaucugcagcugcggccuguacaagcaccccggcgugcccgugaaguggaagagauga

SEQ ID NO: 1363 - RNA, 1473 nt, Artificial Sequence
  derived and/or modified protein sequence (opt4) from LASV(Lassa virus/H.sapiens-wt/NGA/2016/ISTH_1311;Clade II)__AVO03575__GPC
augggccagaucgugaccuucuuccaggaggugccccacgugaucgaggaggugaugaacaucgugcugaucgcccugagccugcuggccauccugaagggcaucuacaacguggccaccugcggccuguucggccugaucagcuuccugcugcugugcggcagaagcugcagcaccaccuacaagggcguguacgagcugcagacccuggagcuggacauggccaaccugaacaugaccaugccccugagcugcaccaagaacaacagccaccacuacaucauggugggcaacgagaccggccuggagcugacccugaccaacaccagcaucaucaaccacaaguucugcaaccugagcgacgcccacaagaagaaccuguacgaccacgcccugaugagcaucaucagcaccuuccaccugagcauccccaacuucaaccaguacgaggccaugagcugcgacuucaacggcggcaagaucagcgugcaguacaaccugagccacgccuacgccggcgacgccgccagccacugcggcaccaucgccaacggcgugcugcagaccuucaugagaauggccuggggcggcagcuacaucgcccuggacagcggcaagggcaacugggacugcaucaugaccagcuaccaguaccugaucauccagaacaccaccugggaggaccacugccaguucagcagacccagccccaucggcuaccugggccugcugagccagagaaccagagacaucuacaucagcagaagacugcugggcaccuucaccuggacccugagcgacagcgagggcaacgacgcccccggcggcuacugccugaccagauggaugcugaucgaggccgagcugaagugcuucggcaacaccgccaucgccaagugcaacgagaagcacgacgaggaguucugcgacaugcugagacuguucgacuucaacaagcaggccaucaagagacugaagaccgaggcccagaugagcauccagcugaucaacaaggccgugaacgcccugaucaacgaccagcugaucaugaagaaccaccugagagacaucaugggcauccccuacugcaacuacagcaaguacugguaccugaaccacaccaccaccggcaagaccagccugcccaagugcuggcugaucagcaacggcagcuaccugaacgagacccacuucagcgacgacaucgagcagcaggccgacaacaugaucaccgagcugcugcagaaggaguaccuggacagacagggcaagaccccccugggccugguggaccuguucguguucagcaccagcuucuaccugaucagcaucuuccugcaccugaucaagauccccacccacagacacaucgugggcagacccugccccaagccccacagacugaaccacaugggcaucugcagcugcggccuguacaagcaccccggcgugcccgugaaguggaagagauga

SEQ ID NO: 1364 - RNA, 1473 nt, Artificial Sequence
  derived and/or modified protein sequence (opt4) from LASV(Lassa virus/H.sapiens-wt/NGA/2016/ISTH_1423;Clade II)__AVO03577__GPC
augggccagaucgugaccuucuuccaggaggugccccacgugaucgaggaggugaugaacaucgugcugaucgcccugagccugcuggccauccugaagggcaucuacaacguggccaccugcggccuguucggccuggugagcuuccugcugcugugcggcagaagcugcagcaccaccuacaagggcguguacgagcugcagacccuggagcuggacauggccaaccugaacaugaccaugccccugagcugcaccaagaacaacagccaccacuacaucauggugggcaacgagaccggccuggagcugacccugaccaacaccagcaucaucaaccacaaguucugcaaccugagcgacgcccacaagaagaaccuguacgaccacgcccugaugagcaucaucagcaccuuccaccugagcauccccaacuucaaccaguacgaggccaugagcugcgacuucaacggcggcaagaucagcgugcaguacaaccugagccacagcuacgccguggacgccgccaaccacugcggcaccguggccaacggcgugcugcagaccuucaugagaauggccuggggcggcagcuacaucgcccuggacagcggcaagggcagcugggacugcaucaugaccagcuaccaguaccugaucauccagaacaucaccugggaggaccacugccaguucagcagacccagccccaucggcuaccugggccugcugagccagagaaccagagacaucuacaucagcagaagacugcugggcaccuucaccuggacccugagcgacagcgagggcaaggagacccccggcggcuacugccugaccagauggaugcugaucgaggccgagcugaagugcuucggcaacaccgccguggccaagugcaacgagaagcacgacgaggaguucugcgacaugcugagacuguucgacuucaacaagcaggccaucagaagacugaagaccgaggcccagaugagcauccagcugaucaacaaggccgugaacgcccugaucaacgaccagcugaucaugaagaaccaccugagagacaucaugggcauccccuacugcaacuacagcaaguacugguaccugaaccacaccgugaccggcaagaccagccugcccagaugcuggcuggugagcaacggcagcuaccugaacgagacccacuucagcgacgacaucgagcagcaggccgacaacaugaucaccgagcugcugcagaaggaguacaucgacagacagggcaagaccccccugggccugguggaccuguucguguucagcaccagcuucuaccugaucagcaucuuccugcaccuggugaagauccccacccacagacacauccugggcaagcccugccccaagccccacagacugaaccacaugggcaucugcagcugcggccuguacaagcaccccggcgugcccgugaaguggaagagauga

SEQ ID NO: 1365 - RNA, 1473 nt, Artificial Sequence
  derived and/or modified protein sequence (opt4) from LASV(Lassa virus/H.sapiens-wt/NGA/2016/ISTH_1462;Clade II)__AVO03587__GPC
augggccagaucaucaccuucuuccaggaggugccccacgugaucgaggaggugaugaacaucgugcugaucgcccugagccugcuggccauccugaagggcaucuacaacguggccaccugcggccuguucggccuggugagcuuccugcugcugugcggcagaagcugcagcaccaccuacaagggcguguacgagcugcagacccuggagcuggacauggccagccugaacaugaccaugccccugagcugcaccaagaacaacagccaccacuacaucauggugggcaacgagaccggccuggagcugacccugaccaacaccagcaucaucaaccacaaguucugcaaccugagcgacgcccacaagaagaaccuguacgaccacgcccugaugagcaucaucagcaccuuccaccugagcauccccaacuucaaccaguacgaggccaugagcugcgacuucaacggcggcaagaucagcgugcaguacaaccugagccacaccuacgccguggacgccgccaaccacugcggcaccaucgccaacggcgugcugcagaccuucaugagaauggccuggggcggcagcuacaucgcccuggacagcggcaagggcagcugggacugcaucaugaccagcuaccaguaccugaucauccagaacaccaccugggaggaccacugccaguucagcagacccagccccaucggcuaccugggccugcugagccagagaaccagagacaucuacaucagcagaagacugcugggcaccuucaccuggacccugagcgacagcgagggcaacgagacccccggcggcuacugccugaccagauggaugcugaucgaggccgagcugaagugcuucggcaacaccgccguggccaagugcaacgagaagcacgacgaggaguucugcgacaugcugagacuguucgacuucaacaagcaggccaucagaagacugaagaccgaggcccagaugagcauccagcugaucaacaaggccgugaacgcccugaucaacgaccagcugaucaugaagaaccaccugagagacaucaugggcauccccuacugcaacuacagcaaguacugguaccugaaccacaccgugaccggcagaaccagccugcccagaugcuggcuggugagcaacggcagcuaccugaacgagacccacuucagcgacgacaucgagcagcaggccgacaacaugaucaccgagcugcugcagaaggaguacaucgagagacagggcaagaccccccugggccugguggaccuguucguguucagcaccagcuucuaccugaucagcaucuuccugcaccugaucaagauccccacccacagacacgugaucggcaagcccugccccaagccccacagacugaaccacaugggcaucugcagcugcggccuguacaagcaccccggcgugcccgugaaguggaagagauga

SEQ ID NO: 1366 - RNA, 1473 nt, Artificial Sequence
  derived and/or modified protein sequence (opt4) from LASV(Lassa virus/H.sapiens-wt/NGA/2016/ISTH_1472;Clade II)__AVO03605__GPC
augggccagaucaucaccuucuuccaggaggugccccacgugaucgaggaggugaugaacaucgugcugaucgcccugagccugcuggccauccugaagggcaucuacaacguggccaccugcggccuguucggccuggugagcuuccugcugcugugcggcagaagcugcagcaccaccuacaagggcguguacgagcugcagacccuggagcuggacauggccagccugaacaugaccaugccccugagcugcaccaagaacaacagccaccacuacaucauggugggcaacgagaccggccuggagcugacccugaccaacaccagcaucaucaaccacaaguucugcaaccugagcgacgcccacaagaagaaccuguacgaccacgcccugaugagcaucaucagcaccuuccaccugagcauccccaacuucaaccaguacgaggccaugagcugcgacuucaacggcggcaagaucagcgugcaguacaaccugagccacaccuacgccguggacgccgccaaccacugcggcaccaucgccaacggcgugcugcagaccuucaugagaauggccuggggcggcagcuacaucgcccuggacagcggcaagggcagcugggacugcaucaugaccagcuaccaguaccugaucauccagaacaccaccugggaggaccacugccaguucagcagacccagccccaucggcuaccugggccugcugagccagagaaccagagacaucuacaucagcagaagacugcugggcaccuucaccuggacccugagcgacagcgagggcaacgagacccccggcggcuacugccugaccagauggaugcugaucgaggccgagcugaagugcuucggcaacaccgccguggccaagugcaacgagaagcacgacgaggaguucugcgacaugcugagacuguucgacuucaacaagcaggccaucagaagacugaagaccgaggcccagaugagcauccagcugaucaacaaggccgugaacgcccugaucaacgaccagcugaucaugaagaaccaccugagagacaucaugggcauccccuacugcaacuacagcaaguacugguaccugaaccacaccgugaccggcagaaccagccugcccagaugcuggcuggugagcaacggcagcuaccugaacgagacccacuucagcgacgacaucgagcagcaggccgacaacaugaucaccgagcugcugcagaaggaguacaucgacagacagggcaagaccccccugggccugguggaccuguucguguucagcaccagcuucuaccugaucagcaucuuccugcaccugaucaagauccccacccacagacacgugaucggcaagcccugccccaagccccacagacugaaccacaugggcaucugcagcugcggccuguacaagcaccccggcgugcccgugaaguggaagagauga

SEQ ID NO: 1367 - RNA, 1473 nt, Artificial Sequence
  derived and/or modified protein sequence (opt4) from LASV(Lassa virus/H.sapiens-wt/NGA/2016/ISTH_1474;Clade II)__AVO03613__GPC
augggccagaucaucaccuucuuccaggaggugccccacgugaucgaggaggugaugaacaucgugcugaucgcccugagccugcuggccauccugaagggcaucuacaacguggccaccugcggccuguucggccuggugagcuuccugcugcugugcggcagaagcugcagcaccaccuacaagggcguguacgagcugcagacccuggagcuggacauggccagccugaacaugaccaugccccugagcugcaccaagaacaacagccaccacuacaucauggugggcaacgagaccggccuggagcugacccugaccaacaccagcaucauccaccacaaguucugcaaccugagcgacgcccacaagaagaaccuguacgaccacgcccugaugagcaucaucagcaccuuccaccugagcauccccaacuucaaccaguacgaggccaugagcugcgacuucaacggcggcaagaucagcgugcaguacaaccugagccacaccuacgccguggacgccgccaaccacugcggcaccaucgccaacggcgugcugcagaccuucaugagaauggccuggggcggcagcuacaucgcccuggacagcggcaagggcagcugggacugcaucaugaccagcuaccaguaccugaucauccagaacaccaccugggaggaccacugccaguucagcagacccagccccaucggcuaccugggccugcugagccagagaaccagagacaucuacaucagcagaagacugcugggcaccuucaccuggacccugagcgacagcgagggcaacgagacccccggcggcuacugccugaccagauggaugcugaucgaggccgagcugaagugcuucggcaacaccgccguggccaagugcaacgagaagcacgacgaggaguucugcgacaugcugagacuguucgacuucaacaagcaggccaucagaagacugaagaccgaggcccagaugagcauccagcugaucaacaaggccgugaacgcccugaucaacgaccagcugaucaugaagaaccaccugagagacaucaugggcauccccuacugcaacuacagcaaguacugguaccugaaccacaccgugaccggcagaaccagccugcccagaugcuggcuggugagcaacggcagcuaccugaacgagacccacuucagcgacgacaucgagcagcaggccgacaacaugaucaccgagcugcugcagaaggaguacaucgacagacagggcaagaccccccugggccugguggaccuguucguguucagcaccagcuucuaccugaucagcaucuuccugcaccugaucaagauccccacccacagacacgugaucggcaagcccugccccaagccccacagacugaaccacaugggcaucugcagcugcggccuguacaagcaccccggcgugcccgugaaguggaagagauga

SEQ ID NO: 1368 - RNA, 1476 nt, Artificial Sequence
  derived and/or modified protein sequence (opt4) from LASV(Lassa virus/H.sapiens-wt/NGA/2016/ISTH_1496;Clade II)__AVO03579__GPC
augggccagaucaucaccuucuuccaggaggugccccacgugaucgaggaggugaugaacaucgugcugaucgcccugagccugcuggccauccugaagggcguguacaacguggccaccugcggccuguucggccuggugagcuuccugcugcugugcggcagaagcugcagcaccaccaucuacaagggcguguacgagcugcagacccuggagcuggacauggccagccugaacaugaccaugccccugagcugcaccaagaacaacagccaccacuacaucauggugggcaacgagaccggccuggagcugacccugaccaacaccagcaucaucaaccacaaguucugcaaccugagcgacgcccacaagaagaaccuguacgaccacgcccugaugagcaucaucagcaccuuccaccugagcauccccaacuucaaccaguacgaggccaugagcugcgacuucaacggcggcaagaucagcgugcaguacaaccugagccacgccuacgccguggacgccgccaaccacugcggcaccaucgccaacggcgugcugcagaccuucaugagaauggccuggggcggcagcuacaucgcccuggacagcggcaagagaagcugggacugcaucaugaccagcuaccaguaccugaucauccagaacaccaccugggaggaccacugccaguucagcagacccagccccaucggcuaccugggccugcugagccagagaaccagagacaucuacaucagcagaagacugcugggcaccuucaccuggacccugagcgacagcgagggcaacgagacccccggcggcuacugccugaccagauggaugcugaucgaggccgagcugaagugcuucggcaacaccgccguggccaagugcaacgagaagcacgacgaggaguucugcgacaugcugagacuguucgacuucaacaagcaggccaucagaagacugaagaccgaggcccagaugagcauccagcugaucaacaaggccgugaacgcccugaucaacgaccagcugaucaugaagaaccaccugagagacaucaugggcauccccuacugcaacuacagcaaguacugguaccugaaccacaccgugaccggcaagaccagccugcccagaugcuggcuggugagcaacggcagcuaccugaacgagacccacuucagcgacgacaucgagcagcaggccgacaacaugaucaccgagcugcugcagaaggaguacaucgacagacagggcaagaccccccugggccugguggaccuguucguguucagcaccagcuucuaccugaucagcaucuuccugcaccuggugaagauccccacccacagacacgugaucggcaagcccugccccaagccccacagacugaaccacaugggcaucugcagcugcggccuguacaagcaccccggcgugcccgugaaguggaagagauga

SEQ ID NO: 1369 - RNA, 1473 nt, Artificial Sequence
  derived and/or modified protein sequence (opt4) from LASV(Lassa virus/H.sapiens-wt/NGA/2016/ISTH_1541;Clade II)__AVO03553__GPC
augggccagaucgugaccuucuuccaggaggugccccacgugaucgaggagaucaugaacaucgugcugaucacccugagccugcuggccgugcugaagggcaucuacaacuucgccaccugcggccugaucggccugaucaccuuccuguuccugugcggcagaagcugcagcaccaucuacaagggcaacuaccagcugcagacccuggagcugaacauggagacccugaacaugaccaugccccugagcugcaccaagaacaacagccaccacuacaucagagugggcaacgagaccggccuggagcugacccugaccaacgugagcaucaucaaccacagauucugcaaccugagcgacgcccacaagagaaaccuguacgaccacacccugaugagcaucaucagcaccuuccaccugagcauccccaacuucaaccaguacgaggccaugagcugcgacuucaacggcggcaagaucagcgugcaguacaaccugagccacggcuacgccguggacgccgccaagcacugcggcaccguggccaacggcgugcugcagaccuucaugagaauggccuggggcggcagcuacaucgcccuggacagcggcaagggcaacugggacugcaucaugaccagcuaccaguaccugaucauccagaacaccaccugggaggaccacugccaguucagcagacccagccccaucggcuaccugggccugcugagccagagaaccagagacaucuacaucagcagaagacugcugggcaccuucaccuggacccugagcgacagcgagggcagagagacccccggcggcuacugccugaccagauggaugcugaucgaggccgagcugaagugcuucggcaacaccgccguggccaagugcaacgagaagcacgacgaggaguucugcgacaugcugagacuguucgacuucaacaagcaggccauccagagacugaagaccgaggcccagaugagcauccagcugaucaacaaggccgugaacgcccugaucaacgaccagcugaucaugaagaaccaccugagagacaucaugggcauccccuacugcaacuacagcaaguacugguaccugaaccacaccaccaccggcaagaccagccugcccaagugcuggcuggugaccaacggcagcuaccugaacgagacccacuucagcgacgacaucgagcagcaggccgacaacaugaucaccgagaugcugcagaaggaguacaucgacagacagggcaagaccccccugggccugguggaccuguucguguucagcaccagcuucuaccugaucagcaucuuccugcaccugaucaagauccccaaccacagacacaucgugggcaagcccugccccaagccccacagacugaaccacaugggcaucugcagcugcggcuucuacaagcagcccggcgugcccgugagauggaagagauga

SEQ ID NO: 1370 - RNA, 1473 nt, Artificial Sequence
  derived and/or modified protein sequence (opt4) from LASV(Lassa virus/H.sapiens-wt/NGA/2016/ISTH_1546;Clade II)__AVO03537__GPC
augggccagaucgugaccuucuuccaggagaucccccacgugguggaggagaucaugaacaucgugcugaucacccugagccugcuggccauccugaagggccuguacaacuucgccaccugcggccugaucggccugaucaccuuccuguuccugugcggcagaagcugcagcaccaucuacaagggcagcuaccagcugcaggcccuggagcugaacauggagacccugaacaugaccaugccccugagcugcaccaagaacaacagccaccacuacaucagagugggcaacgagaccggccuggagcugacccugaccaacaccagcaucaucaaccacaaguucugcaaccugagcgacgcccacaagaagaaccuguacgaccacacccugaugagcaucaucagcaccuuccaccugagcauccccaacuucaaccaguacgaggccaugagcugcgacuucaacggcggcaagaucagcgugcaguacaaccugagccacagcuacgccggcgacgccgccagacacugcggcaccguggccaacggcgugcugcagaccuucaugagaauggccuggggcggcagcuacaucgcccuggacagcggcaagggcaacugggacugcaucaugaccagcuaccaguaccugaucauccagaacaccaccugggaggaccacugccaguucagcagacccagccccaucggcuaccugggccugcugagccagagaaccagagacaucuacaucagcagaagacugcugggcaccuucaccuggacccugagcgacagcgagggcaaggagacccccggcggcuacugccugaccagauggaugcugaucgaggccgagcugaagugcuucggcaacaccgccguggccaagugcaacgagaagcacgacgaggaguucugcgacaugcugagacuguucgacuucaacaagcaggccauccagagacugaagaccgaggcccagaugagcauccagcugaucaacaaggccgugaacgcccugaucaacgaccagcugaucaugaagaaccaccugagagacaucaugggcauccccuacugcaacuacagcaaguacugguaccugaaccacaccaccaccggcaagaccagccugcccagaugcuggcuggugagcaacggcagcuaccugaacgagacccacuucagcgacgacaucgagcagcaggccgacaacaugaucaccgagaugcugcagaaggaguacaucgacagacagggcaagaccccccugggccugguggaccuguucguguucagcaccagcuucuaccugaucagcaucuuccugcaccugaucaagauccccacccacagacacaucgugggcaagagcugccccaagccccacagacugaaccacaugggcaucugcagcugcggccuguacaagcagcccggcgugcccgugaaguggaagagauga

SEQ ID NO: 1371 - RNA, 1473 nt, Artificial Sequence
  derived and/or modified protein sequence (opt4) from LASV(Lassa virus/H.sapiens-wt/NGA/2016/ISTH_1591;Clade II)__AVO03647__GPC
augggccagaucaucaccuucuuccaggaggugccccacgugaucgaggaggugaugaacaucgugcugaucgcccugagccugcuggccauccugaagggcaucuacaacguggccaccugcggccuguucggccuggugagcuuccugcugcugugcggcagaagcugcagcaccaccuacaagggcguguacgagcugcagacccuggagcuggacauggccagccugaacaugaccaugccccugagcugcaccaagaacaacagccaccacuacaucauggugggcaacgagaccggccuggagcugacccugaccaacaccagcaucauccagcacaaguucugcaaccugagcgacgcccacaagaagaaccuguacgaccacgcccugaugagcaucgugagcaccuuccaccugagcauccccaacuucaaccaguacgaggccaugagcugcgacuucaacggcggcaagaucaccgugcaguacaaccugagccacagcuacgccaucgacgccgccaaccacugcggcaccguggccaacggcgugcugcagaccuucaugagaauggccuggggcggcagcuacaucgcccuggacagcggcagaggcagcugggacugcaucaugaccagcuaccaguaccugaucauccagaacaccaccugggaggaccacugccaguucagcagacccagccccaucggcuaccugggccugcugagccagagaaccagagacaucuacaucagcagaagacugcugggcaccuucaccuggacccugagcgacagcgagggcaacgagacccccggcggcuacugccugaccagauggaugcugaucgaggccgagcugaagugcuucggcaacaccgccguggccaagugcaacgagaagcacgacgaggaguucugcgacaugcugagacuguucgacuucaacaagcaggccaucagaagacugaaggccgaggcccagaugagcauccagcugaucaacaaggccgugaacgcccugaucaacgaccagcugaucaugaagaaccaccugagagacaucaugggcauccccuacugcaacuacagcaaguacugguaccugaaccacaccgugaccggcagaaccagccugcccagaugcuggcuggugagcaacggcagcuaccugaacgagacccacuucagcgacgacaucgagcagcaggccgacaacaugaucaccgagcugcugcagaaggaguacauggacagacagggcaagaccccccugggccugguggaccuguucguguucagcaccagcuucuaccugaucagcaucuuccugcaccuggugaagauccccacccacagacacaucaucggcaagcccugccccaagccccacagacugaaccacaugggcgugugcagcugcggccuguacaagcaccccggcgugcccgugaaguggaagagauga

SEQ ID NO: 1372 - RNA, 1473 nt, Artificial Sequence
  derived and/or modified protein sequence (opt4) from LASV(Lassa virus/H.sapiens-wt/NGA/2016/ISTH_1604;Clade II)__AVO03541__GPC
augggccagaucgugaccuucuuccaggaggugccccacgugaucgaggagaucaugaacaucgugcugaucacccugagccugcuggccauccugaagggcguguacaaccuggccaccugcggccugaucggccugaucaccuuccuguuccugugcggcagaagcugcagcaugaccuacaagggcagcuaccagcuggagacccuggagcugaacauggagacccugaacaugaccaugccccugagcugcaccaagaacaccagccaccacuacaucagagugggcaacgagaccggccuggagcugacccugaccaacaccagcaucaucaaccacaaguucugcaaccugagcgacgcccacaagaagaaccuguacgaccacagccugaugagcaucgugagcaccuuccaccugagcauccccaacuucaaccaguacgaggccaugagcugcgacuucaacggcggcaagaucagcauccaguacaaccugagccacgccuacgccggcgacgccgccaagcacugcggcacccuggccaacggcgugcugcagaccuucaugagaauggccuggggcggcagcuacaucgcccuggacagcggcagaggcaacugggacugcaucaugaccagcuaccaguaccugaucauccagaacaccaccugggaggaccacugccaguucagcagacccagccccaucggcuaccugggccugcugagccagagaaccagagagaucuacaucagcagaagacugcugggcaccuucaccuggacccugagcgacagcgagggcaacgaggcccccggcggcuacugccugaccagauggaugcugaucgaggccgagcugaagugcuucggcaacgccgccguggccaagugcaacgagaagcacgacgaggaguucugcgacaugcugagacuguucgacuucaacaagcaggccauccagagacugaagaccgaggcccagaugagcauccagcugaucaacaaggccgugaacgcccugaucaacgaccagcugaucaugaagaaccaccugagagacaucaugggcauccccuacugcaacuacagcaaguacugguaccugaaccacaccaccaccggcagaaccagccugcccagaugcuggcuggugagcaacggcagcuaccugaacgagacccacuucagcgacgacaucgagcagcaggccgacaacaugaucaccgagaugcugcagaaggaguacaucgacagacagggcaagaccccccugggccugguggaccuguucguguucagcaccagcuucuaccugaucagcaucuuccugcaccuggugaagauccccacccacagacacaucgugggcaagagcugccccaagccccacagacugaaccacaugggcaucugcagcugcggccuguacaagcagcccggcgugcccgugagauggaagagauga

SEQ ID NO: 1373 - RNA, 1473 nt, Artificial Sequence
  derived and/or modified protein sequence (opt4) from LASV(Lassa virus/H.sapiens-wt/NGA/2016/ISTH_1609;Clade II)__AVO03661__GPC
augggccagaucgugaccuucuuccaggagaucccccacgugaucgaggaggugaugaacaucgugcugaucacccugagccugcuggccgugcugaagggcaucuacaacuucgccaccugcggccugaucggccugaucaccuuccuguuccugugcggcagaagcugcagcaccaucuacaagggcagcuaccagcugcagaagcuggagcugaacauggagacccugaacaugaccaugccccugagcugcaccaagaacagcagccaccacuacaucagagugggcaacgagaccggccuggagcugacccugaccaacaccagcaucaucagccacaaguucugcaaccugagcgacgcccacaagaagaaccuguacgaccacgcccugaugagcaucaucagcaccuuccaccugagcauccccaacuucaaccaguacgaggccaugagcugcgacuucaacggcggcaagaucagcgugcaguacaaccugagccacagcuacgccggcgacgccgccagacacugcggcacccuggccaacggcgugcugcagaccuucaugagaauggccuggggcggcagcuacaucgcccuggacagcggcaagggcaacugggacugcaucaugaccagcuaccaguuccugaucauccagaacaccaccugggaggaccacugccaguucagcagacccagccccaugggcuaccugggccugcugagccagagaaccagagacaucuacaucagcagaagacugcugggcaccuucaccuggacccugagcgacagcgagggcaaggagacccccggcggcuacugccugaccagauggaugcugaucgaggccgagcugaagugcuucggcaacaccgccguggccaagugcaacgagaagcacgacgaggaguucugcgacaugcugagacuguucgacuucaacaagcaggccauccagagacugaagaccgaggcccagaugagcauccagcugaucaacaaggccgugaacgcccugaucaacgaccagcugaucaugaagaaccaccugagagacaucaugggcauccccuacugcaacuacagccaguacugguaccugaaccacaccaucaccggcaagaccagccugcccaagugcuggcuggugagcaacggcagcuaccugaacgagacccacuucagcgacgacaucgagcagcaggccgacaacaugaucaccgagaugcugcagaaggaguacaucgacagacagggcaagaccccccugggccugguggaccuguucguguucagcaccagcuucuaccugaucagcaucuuccugcaccugaucaagauccccacccacagacacaucgugggcaagagcugccccaagccccacagacugaacagaaugggcaucugcagcugcggccuguacaagcagcccggcgugcccgugaaguggaagagauga

SEQ ID NO: 1374 - RNA, 1473 nt, Artificial Sequence
  derived and/or modified protein sequence (opt4) from LASV(Lassa virus/H.sapiens-wt/NGA/2016/ISTH_1610;Clade II)__AVO03603__GPC
augggccagaucaucaccuucuuccaggaggugccccacgugaucgaggaggugaugaacaucgugcugaucgcccugagccugcuggccauccugaagggcaucuacaacguggccaccugcggccuguucggccuggugagcuuccuguuccugugcggcagaagcugcagcaccaccuacaagggcguguacgagcugcagacccuggagcuggacauggccagccugaacaugaccaugccccugagcugcaccaagaacaacagccaccacuacaucauggugggcaacgagaccggccuggagcugacccugaccaacaccagcaucaucaaccacaaguucugcaaccugagcgacgcccacaagaagaaccuguacgaccacgcccugaugagcaucaucagcaccuuccaccugagcauccccaacuucaaccaguacgaggccaugagcugcgacuucaacggcggcaagaucagcgugcaguacaaccugagccacaccuacgccaucgacgccgccaaccacugcggcaccaucgccaacggcgugcugcagaccuucaugagaauggccuggggcggcagcuacaucgcccuggacagcggcagaggcagcugggacugcaucaugaccagcuaccaguaccugaucauccagaacaccaccugggaggaccacugccaguucagcagacccagccccaucggcuaccugggccugcugagccagagaaccagagacaucuacaucagcagaagacugcugggcaccuucaccuggacccugagcgacagcgagggcaacgagacccccggcggcuacugccugaccagauggaugcugaucgaggccgagcugaagugcuucggcaacaccgccguggccaagugcaacgagaagcacgacgaggaguucugcgacaugcugagacuguucgacuucaacaagcaggccaucagaagacugaaggccgaggcccagaugaacauccagcugaucaacaaggccgugaacgcccugaucaacgaccagcugaucaugaagaaccaccugagagacaucaugggcauccccuacugcaacuacagcaaguacugguaccugaaccacaccgugaccggcagaaccagccugcccagaugcuggcuggugagcaacggcagcuaccugaacgagacccacuucagcgacgacaucgagcagcaggccgacaacaugaucaccgagcugcugcagaaggaguacauggacagacagggcaagaccccccugggccugguggaccuguucguguucagcaccagcuucuaccugaucagcaucuuccugcaccugaucaagauccccacccacagacacaucgugggcaagcccugccccaagccccacagacugaaccacaugggcaucugcagcugcggccuguacaagcaccccggcgugcccgugaaguggaagagauga

SEQ ID NO: 1375 - RNA, 1473 nt, Artificial Sequence
  derived and/or modified protein sequence (opt4) from LASV(Lassa virus/H.sapiens-wt/NGA/2018/ISTH_0959;Clade II)__AVV65099__GPC
augggccagaucaucaccuucuuccaggaggugccccacgugaucgaggaggugaugaacaucgugcugaucgcccugagccugcuggccauccugaagggcaucuacaacguggugaccugcggccuguucggccuggugagcuuccugcugcugugcggcagaagcugcagcaccaccuacaagggcguguacgagcugcagacccuggagcuggacauggccagccugaacaugaccaugccccugagcugcaccaagaacaacagccaccacuacaucauggugggcaacgagaccggccuggagcugacccugaccaacaccagcaucaucaaccacaaguucugcaaccugagcgacgcccacaagaagaaccuguacgaccacgcccugaugagcaucaucagcaccuuccaccugagcauccccaacuucaaccaguacgaggccaugagcugcgacuucaacggcggcaagaucagcgugcaguacaaccugagccacgccuacgccaucgacgccgccaaccacugcggcaccaucgccaacggcgugcugcagaccuucaugagaauggccuggggcggcagcuacaucgcccuggacagcggcaagggcagcugggacugcaucaugaccagcuaccaguaccugaucauccagaacaccaccugggaggaccacugccaguucagcagacccagccccaucggcuaccugggccugcugagccagagaaccagagacaucuacaucagcagaagacugcugggcaccuucaccuggacccugagcgacagcgagggcaacgagacccccggcggcuacugccugaccagauggaugcugaucgaggccgagcugaagugcuucggcaacaccgccguggccaagugcaacgagaagcacgacgaggaguucugcgacaugcugagacuguucgacuucaacaagcaggccaucagaagacugaagaccgaggcccagaugagcauccagcugaucaacaaggccgugaacgcccugaucaacgaccagcugaucaugaagaaccaccugagagacaucaugggcauccccuacugcaacuacagcaaguacugguaccugaaccacaccgugaccggcaagaccagccugcccagaugcuggcuggugagcaacggcagcuaccugaacgagacccacuucagcgacgacaucgagcagcaggccgacaacaugaucaccgagcugcugcagaaggaguacaucgacagacagggcaagaccccccugggccugguggaccuguucguguucagcaccagcuucuaccugaucagcaucuuccugcaccuggugaagauccccacccacagacacgugaucggcaagcccugccccaagccccacagacugaaccacaugggcaucugcagcugcggccuguacaagcaccccggcgugcccgugaaguggaagagauga

SEQ ID NO: 1376 - RNA, 1473 nt, Artificial Sequence
  derived and/or modified protein sequence (opt4) from LASV(Lassa virus/H.sapiens-wt/NGA/2018/ISTH_1024;Clade II)__AVV65105__GPC
augggccagaucaucaccuucuuccaggaggugccccacgugaucgaggaggugaugaacaucgugcugaucgcccugagccugcuggccauccugaagggcguguacaacguggccaccugcggccuguucggccuggugagcuuccugcugcugugcggcagaagcugcagcaccaccuacaagggcguguacgagcugcagacccuggagcuggacauggccaaccugaacaugaccaugccccugagcugcaccaagaacaacagccaccacuacaucagagugggcaacgagaccggccuggagcugacccugaccaacaccagcaucaucaaccacaaguucugcaaccugagcgacgcccacaagaacaaccuguacgaccacgcccugaugagcaucaucagcaccuuccaccugagcauccccaacuucaaccaguacgaggccaugagcugcgacuucaacggcggcaagaucagcgugcaguacaaccugagccacgccuacgccguggacgccgccaaccacugcggcaccaucgccaacggcgugcugcagaccuucaugagaauggccuggggcggcagcuacaucgcccuggacagcggcagaggcagcugggacugcaucaugaccagcuaccaguaccugaucauccagaacaccaccugggaggaccacugccaguucagcagacccagccccaucggcuaccugggccugcugagccagagaaccagagacaucuacaucagcagaagacugcugggcaccuucaccuggacccugagcgacagcgagggcaacgagacccccggcggcuacugccugaccagauggaugcugaucgaggccgagcugaagugcuucggcaacaccgccguggccaagugcaacgagaagcacgacgaggaguucugcgacaugcugagacuguucgacuucaacaagcaggccaucagaagacugaagaccgaggcccagaugagcauccagcugaucaacaaggccgugaacgcccugaucaacgaccagcugaucaugaagaaccaccugagagacaucaugggcauccccuacugcaacuacagcaaguacugguaccugaaccacaccgugaccggcaagaccagccugcccagaugcuggcuggugagcaacggcaccuaccugaacgagacccacuucagcgacgacaucgagcagcaggccgacaacaugaucaccgagcugcugcagaaggaguacauggacagacagggcaagaccccccugggccugguggaccuguucguguucagcaccagcuucuaccugaucagcaucuuccugcaccuggugaagauccccacccacagacacgugaucggcaagcccugccccaagccccacagacugaaccacaugggcaucugcagcugcggccuguacaagcaccccggcgugcccgugaaguggaagagauga

SEQ ID NO: 1377 - RNA, 1473 nt, Artificial Sequence
  derived and/or modified protein sequence (opt4) from LASV(Lassa virus/H.sapiens-wt/NGA/2018/ISTH_1079;Clade II)__AVV65107__GPC
augggccagaucaucaccuucuuccaggaggugccccacgugaucgaggaggugaugaacaucgugcugaucgcccugagccugcuggccauccugaagggcaucuacaacguggccaccugcggccuguucggccugguggccuuccugcugcugugcggcagaagcugcagcaccaccuacaagggcguguacgagcugcagacccuggagcuggacauggccagccugaacaugaccaugccccugagcugcaccaagaacaacagccaccacuacaucauggugggcaacgagaccggccuggagcugacccugaccaacaccagcaucaucaaccacaaguucugcaaccugagcgacgcccacaagaagaaccuguacgaccacgcccugaugagcaucaucagcaccuuccaccugagcauccccaacuucaaccaguacgaggccaugagcugcgacuucaacggcggcaagaucagcgugcaguacaaccugagccacaccuacgccguggacgccgccaaccacugcggcaccaucgccaacggcgugcugcagaccuucaugagaauggccuggggcggcagcuacaucgcccuggacagcggcaagggcagcugggacugcaucaugaccagcuaccaguaccugaucauccagaacaccaccugggaggaccacugccaguucagcagacccagccccaucggcuaccugggccugcugagccagagaaccagagacaucuacaucagcagaagacugcugggcaccuucaccuggacccugagcgacagcgagggcaacgagacccccggcggcuacugccugaccagauggaugcugaucgaggccgagcugaagugcuucggcaacaccgccguggccaagugcaacgagaagcacgacgaggaguucugcgacaugcugagacuguucgacuucaacaagcaggccaucagaagacugaagaccgaggcccagaugagcauccagcugaucaacaaggccgugaacgcccugaucaacgaccagcugaucaugaagaaccaccugagagacaucaugggcauccccuacugcaacuacagcaaguacugguaccugaaccacaccgugaccggcagaaccagccugcccagaugcuggcuggugagcaacggcagcuaccugaacgagacccacuucagcgacgacaucgagcagcaggccgacaacaugaucaccgagcugcugcagaaggaguacauggacagacagggcaagaccccccugggccugguggaccuguucguguucagcaccagcuucuaccugaucagcaucuuccugcaccugaucaagauccccacccacagacacgugaucggcaagcccugccccaagccccacagacugaaccacaugggcaucugcagcugcggccuguacaagcaccccggcgugcccgugaaguggaagagauga

SEQ ID NO: 1378 - RNA, 1473 nt, Artificial Sequence
  derived and/or modified protein sequence (opt4) from LASV(Lassa virus/H.sapiens-wt/NGA/2018/ISTH_1177;Clade II)__AVV65101__GPC
augggccagaucaucaccuucuuccaggaggugccccacgugaucgaggaggugaugaacaucgugcugaucgcccugagccugcuggccauccugaagggcaucuacaacguggccaccugcggccuguucggccuggugagcuuccugcugcugugcggcagaagcugcagcaccaccuacaagggcguguacgagcugcagacccuggagcuggacauggccagccugaacaugaccaugccccugagcugcaccaagaacaacagccaccacuacaucagagugggcaacgagaccggccuggagcugacccugaccaacaccagcaucaucgaccacaaguucugcaaccugagcgacgcccacaagaagaaccuguacgaccacgcccugaugagcaucaucagcaccuuccaccugagcauccccaacuucaaccaguacgaggccaugagcugcgacuucaacggcggcaagaucagcgugcaguacaaccugagccacaccuacgccguggacgccgccaaccacugcggcaccaucgccaacggcgugcugcagaccuucaugagaauggccuggggcggcagcuacaucgcccuggacagcggcaagggcagcugggacugcaucaugaccagcuaccaguaccugaucauccagaacaccaccugggaggaccacugccaguucagcagacccagccccaucggcuaccugggccugcugagccagagaaccagagacaucuacaucagcagaagacugcugggcaccuucaccuggacccugagcgacagcgagggcaacgagacccccggcggcuacugccugaccagauggaugcugaucgaggccgagcugaagugcuucggcaacaccgccguggccaagugcaacgagaagcacgacgaggaguucugcgacaugcugagacuguucgacuucaacaagcaggccaucagaagacugaagaccgaggcccagaugagcauccagcugaucaacaaggccgugaacgcccugaucaacgaccagcugaucaugaagaaccaccugagagacaucaugggcauccccuacugcaacuacagcaaguacugguaccugaaccacaccaucaccggcagaaccagccugcccagaugcuggcuggugagcaacggcagcuaccugaacgagacccacuucagcgacgacaucgagcagcaggccgacaacaugaucaccgagcugcugcagaaggaguacauggacagacagggcaagaccccccugggccugguggaccuguucguguucagcaccagcuucuaccugaucagcaucuuccugcaccuggugaagauccccacccacagacacgugaucggcaagcccugccccaagccccacagacugaaccacaugggcaucugcagcugcggccuguacaagcaccccggcgugcccgugaaguggaagagauga

SEQ ID NO: 1379 - RNA, 1473 nt, Artificial Sequence
  derived and/or modified protein sequence (opt4) from LASV(Lassa virus/H.sapiens-wt/NGA/2018/ISTH_1375;Clade II)__AVV65115__GPC
augggccagaucaucaccuucuuccaggaggugccccacgugaucgaggaggugaugaacaucgugcugaucgcccugagccugcuggccauccugaagggcaucuacaacaucgccaccugcggccuguucggccuggugagcuuccugcugcugugcggcagaagcugcagcaccaccuacaagggcguguacgagcugcagacccuggagcuggacauggccagccugaacaugaccaugccccugagcugcaccaagaacaacagccaccacuacaucauggugggcaacgagaccggccuggagcugacccugaccaacaccagcaucaucaaccacagauucugcaaccugagcgacgcccacaagaagaaccuguacgaccacgcccugaugagcaucaucagcaccuuccaccugagcauccccaacuucaaccaguacgaggccaugagcugcgacuucaacggcggcaagaucagcgugcaguacaaccugagccacgccuacgccguggacgccgccaaccacugcggcaccaucgccaacggcgugcugcagaccuucaugagaauggccuggggcggcagcuacaucgcccuggacagcggcaagggcagcugggacugcaucaugaccagcuaccaguaccugaucauccagaacaccaccugggaggaccacugccaguucagcagacccagccccaucggcuaccugggccugcugagccagagaaccagagacaucuacaucagcagaagacugcugggcaccuucaccuggacccugagcgacagcgagggcaacgagacccccggcggcuacugccugaccagauggaugcugaucgaggccgagcugaagugcuucggcaacaccgccguggccaagugcaacgagaagcacgacgaggaguucugcgacaugcugagacuguucgacuucaacaagcaggccaucagaagacugaagaccgaggcccagaugagcauccagcugaucaacaaggccgugaacgcccugaucaacgaccagcugaucaugaagaaccaccugagagacaucaugggcauccccuacugcaacuacagcaaguacugguaccugaaccacaccgugaccggcaagaccagccugcccagaugcuggcuggugagcaacggcagcuaccugaacgagacccacuucagcgacgacaucgagcagcaggccgacaacaugaucaccgagcugcugcagaaggaguacaucgacagacagggcaagaccccccugggccugguggaccuguucguguucagcaccagcuucuaccugaucagcaucuuccugcaccuggugaagauccccacccacagacacgugaucggcaagcccugccccaagccccacagacugaaccacaugggcaucugcagcugcggccuguacaagcaccccggcgugcccgugaaguggaagagauga

SEQ ID NO: 1380 - RNA, 1473 nt, Artificial Sequence
  derived and/or modified protein sequence (opt4) from LASV(Lassa virus/H.sapiens-wt/NGA/2018/ISTH_1381;Clade II)__AVV65111__GPC
augggccagaucgugaccuucuuccaggaggugccccacgugaucgaggaggugaugaacaucgugcugaucgcccugagccugcuggccauccugaagggcaucuacaacguggccaccugcggccuguucggccuggugagcuuccugcugcugugcggcagaagcugcagcaccaccuacaagggcguguacgagcugcagacccuggagcuggacauggccagccugaacaugaccaugccccugagcugcaccaagaacaacagccaccacuacaucauggugggcaacgagaccggccuggagcugacccugaccaacaccagcaucaucaaccacaaguucugcaaccugagcgacgcccacaagaagaaccuguacgaccacgcccugaugagcaucaucagcaccuuccaccugagcauccccaacuucaaccaguacgaggccaugagcugcgacuucaacggcggcaagaucagcgugcaguacaaccugagccacaccuacgccguggacgccgccaaccacugcggcaccaucgccaacggcgugcugcagaccuucaugagaauggccuggggcggcagcuacaucgcccuggacagcggcaagggcagcugggacugcaucaugaccagcuaccaguaccugaucauccagaacaccaccugggaggaccacugccaguucagcagacccagccccaucggcuaccugggccugcugagccagagaaccagagacaucuacaucagcagaagacugcugggcaccuucaccuggacccugagcgacagcgagggcaacgagacccccggcggcuacugccugaccagauggaugcugaucgaggccgagcugaagugcuucggcaacaccgccguggccaagugcaacgagaagcacgacgaggaguucugcgacaugcugagacuguucgacuucaacaagcaggccaucagaagacugaagaccgaggcccagaugagcauccagcugaucaacaaggccgugaacgcccugaucaacgaccagcugaucaugaagaaccaccugagagacaucaugggcauccccuacugcaacuacagcaaguacugguaccugaaccacaccgugaccggcaagaccagccugcccagaugcuggcuggugagcaacggcagcuaccugaacgagacccacuucagcgacgacaucgagcagcaggccgacaacaugaucaccgagcugcugcagaaggaguacauggacagacagggcaagaccccccugggccugguggaccuguucguguucagcaccagcuucuaccugaucagcaucuuccugcaccuggugaagauccccacccacagacacguggugggcaagcccugccccaagccccacagacugaaccacaugggcaucugcagcugcggccuguacaagcaccccggcgugcccgugagauggaagagauga

SEQ ID NO: 1381 - RNA, 1473 nt, Artificial Sequence
  derived and/or modified protein sequence (opt4) from LASV(Lassa virus/H.sapiens-wt/NGA/2018/ISTH_1643;Clade II)__AVV65119__GPC
augggccagaucaucaccuucuuccaggaggugccccacgugaucgaggaggugaugaacaucgugcugaucgcccugagccugcuggccauccugaagggcaucuacaacguggccaccugcggccuguucggccuggugagcuuccugcugcugugcggcagaagcugcagcaccaccuacaagggcguguacgagcugcagacccuggagcuggacauggccagccugaacaugaccaugccccugagcugcaccaagaacaacagccaccacuacaucauggugggcaacgagaccggccuggagcugacccugaccaacaccagcaucaucaaccacaaguucugcaaccugagcgacgcccacaagaagaaccuguacgaccacgcccugaugagcaucaucagcaccuuccaccugagcauccccaacuucaaccaguacgaggccaugagcugcgacuucaacggcggcaagaucagcgugcaguacaaccugagccacaccuacgccguggacgccgccaaccacugcggcaccaucgccaacggcgugcugcagaccuucaugagaauggccuggggcggcagcuacaucgcccuggacagcggcaagggcagcugggacugcaucaugaccagcuaccaguaccugaucauccagaacaccagcugggaggaccacugccaguucagcagacccagccccaucggcuaccugggccugcugagccagagaaccagagacaucuacaucagcagaagacugcugggcaccuucaccuggacccugagcgacagcgagggcaacgagacccccggcggcuacugccugaccagauggaugcugaucgaggccgagcugaagugcuucggcaacaccgccguggccaagugcaacgagaagcacgacgaggaguucugcgacaugcugagacuguucgacuucaacaagcaggccaucagaagacugaagaccgaggcccagaugagcauccagcugaucaacaaggccgugaacgcccugaucaacgaccagcugaucaugaagaaccaccugagagacaucaugggcauccccuacugcaacuacagcaaguacugguaccugaaccacaccgugaccggcaagaccagccugcccagaugcuggcuggugagcaacggcaccuaccugaacgagacccacuucagcgacgacaucgagcagcaggccgacaacaugaucaccgagcugcugcagaaggaguacaucgacagacagggcaagaccccccugggccugguggaccuguucguguucagcaccagcuucuaccugaucagcaucuuccugcaccuggugaagauccccacccacagacacgugaucggcaagcccugccccaagccccacagacugaaccacaugggcaucugcagcugcggccuguacaagcaccccggcgugcccgugaaguggaagagauga

SEQ ID NO: 1382 - RNA, 1473 nt, Artificial Sequence
  derived and/or modified protein sequence (opt4) from LASV(LASV003-NIG-2008;Clade II)__AIT17580__GPC
augggccagaucaucaccuucuuccaggaggugccccacgugaucgaggaggugaugaacaucgugcugaucgcccugagccugcuggccauccugaagggcaucuacaacguggccaccugcggccuguucggccuggugagcuuccugcugcugugcggcagaagcugcagcaccaccuacaagggcguguacgagcugcagacccuggagcuggacauggccagccugaacaugaccaugccccugagcugcaccaagaacaacagccaccacuacaucauggugggcaacgagaccggccuggagcugacccugaccaacaccagcaucaucaaccacaaguucugcaaccugagcgacgcccacaagaagaaccuguacgaccacgcccugaugagcaucaucagcaccuuccaccugagcauccccaacuucaaccaguacgaggccaugagcugcgacuucaacggcggcaagaucagcgugcaguacaaccugagccacaccuacgccguggacgccgccaaccacugcggcaccaucgccaacggcgugcugcagaccuucaugagaauggccuggggcggcagcuacaucgcccuggacagcggcaagggcagcugggacugcaucaugaccagcuaccaguaccugaucauccagaacaccaccugggaggaccacugccaguucagcagacccagccccaucggcuaccugggccugcugagccagagaaccagagacaucuacaucagcagaagacugcugggcaccuucaccuggacccugagcgacagcgagagcaacgagacccccggcggcuacugccugaccagauggaugcugaucgaggccgagcugaagugcuucggcaacaccgccguggccaagugcaacgagaagcacgacgaggaguucugcgacaugcugagacuguucgacuucaacaagcaggccaucagaagacugaaggccgaggcccagaugagcauccagcugaucaacaaggccgugaacgcccugaucaacgaccagcugaucaugaagaaccaccugagagacaucaugggcauccccuacugcaacuacagcaaguacugguaccugaaccacaccgugaccggcagaaccagccugcccagaugcuggcuggugagcaacggcagcuaccugaacgagacccacuucagcgacgacaucgagcagcaggccgacaacaugaucaccgagcugcugcagaaggaguacauggacagacagggcaagaccccccugggccugguggaccuguucguguucagcaccagcuucuaccugaucagcaucuuccugcaccuggugaagauccccacccacagacacgugaucggcaagcccugccccaagccccacagacugaaccacaugggcaucugcagcugcggccuguacaagcaccccggcgugcccgugaaguggaagagauga

SEQ ID NO: 1383 - RNA, 1473 nt, Artificial Sequence
  derived and/or modified protein sequence (opt4) from LASV(LASV006-NIG-2008;Clade II)__AIT17584__GPC
augggccagaucaucaccuucuuccaggaggugccccaggugaucgaggaggugaugaacaucgugcugaucgcccugagccugcuggccauccugaagggcaucuacaacguggccaccugcggccuguucggccuggugagcuuccugcugcugugcggcagaagcugcagcaccaccuacaagggcguguacgagcugcagacccuggagcuggacauggccagccugaacaugaccaugccccugagcugcaccaagaacaacagccaccacuacaucauggugggcaacgagaccggccuggagcugacccugaccaaccagagcaucaucaaccacaaguucugcaaccugagcgacgcccacaagaagaaccuguacgaccacgcccugaugagcaucaucagcaccuuccaccugagcauccccaacuucaaccaguacgaggccaugagcugcgacuucaacggcggcaagaucagcgugcaguacaaccugagccacagcuucgccguggacgccgccaaccacugcggcaccaucgccaacggcgugcugcagaccuucaugagaauggccuggggcggcagcuacaucgcccuggacagcggcaagggcagcugggacugcaucaugaccagcuaccaguaccugaucauccagaacaccaccugggaggaccacugccaguucagcagacccagccccaucggcuaccugggccugcugagccagagaaccagagacaucuacaucagcagaagacugcugggcaccuucaccuggacccugagcgacagcgagggcaacgagacccccggcggcuacugccugaccagauggaugcugaucgaggccgagcugaagugcuucggcaacaccgccguggccaagugcaacgagaagcacgacgaggaguucugcgacaugcugagacuguucgacuucaacaagcaggccaucagaagacugaagaccgaggcccagaugagcauccagcugaucaacaaggccgugaacgcccugaucaacgaccagcugaucaugaagaaccaccugagagacaucaugggcauccccuacugcaacuacagcaaguacugguaccugaaccacaccaagaccggcaagaccagccugcccagaugcuggcuggugagcaacggcagcuaccugaacgagacccacuucagcgacgacaucgagcagcaggccgacaacaugaucaccgagcugcugcagaaggaguacauggacagacagggcaagaccccccugggccugguggaccuguucguguucagcaccagcuucuaccugaucagcaucuuccugcaccuggugaagauccccacccacagacacgugaucggcaagcccugccccaagccccacagacugaaccacaugggcaucugcagcugcggccuguacaagcaccccggcgugcccgugaaguggaagagauga

SEQ ID NO: 1384 - RNA, 1473 nt, Artificial Sequence
  derived and/or modified protein sequence (opt4) from LASV(LASV035-NIG-2009;Clade II)__AIT17588__GPC
augggccagaucaucaccuucuuccaggaggugccccacgugaucgaggaggugaugaacaucgugcugaucgcccugagccugcuggccauccugaagggcaucuacaacguggccaccugcggccuguucggccuggugagcuuccugcugcugugcggcagaagcugcagcaccaccuacaagggcguguacgagcugcagacccuggagcuggacauggccagccugaacaugaccaugccccugagcugcaccaagaacaacagccaccacuacaucauggugggcaacgagaccggccuggagcugacccugaccaacaccagcaucaucaaccacaaguucugcaaccugagcgacgcccacaagaagaaccuguacgaccacgcccugaugagcaucaucagcaccuuccaccugagcauccccaacuucaaccaguacgaggccaugagcugcgacuucaacggcggcaagaucagcgugcaguacaaccugagccacgccuacgccguggacgccgccaaccacugcggcaccaucgccaacggcgugcugcagaccuucaugagaauggccuggggcggcagcuacaucgcccuggacagcggcaagggcagcugggacugcaucaugaccagcuaccaguaccugaucauccagaacaccaccugggaggaccacugccaguucagcagacccagccccaucggcuaccugggccugcugagccagagaaccagagacaucuacaucagcagaagacugcugggcaccuucaccuggacccugagcgacagcgagggcaacgagacccccggcggcuacugccugaccagauggaugcugaucgaggccgagcugaagugcuucggcaacaccgccguggccaagugcaacgagaagcacgacgaggaguucugcgacaugcugagacuguucgacuucaacaagcaggccaucagaagacugaaggccgaggcccagaugagcauccagcugaucaacaaggccgugaacgcccugaucaacgaccagcugaucaugaagaaccaccugagagacaucaugggcauccccuacugcaacuacagcaaguacugguaccugaaccacaccgugaccggcaagaccagccugcccagaugcuggcuggugagcaacggcagcuaccugaacgagacccacuucagcgacgacaucgagcagcaggccgacaacaugaucaccgagcugcugcagaaggaguacaucgacagacagggcaagaccccccugggccugguggaccuguucguguucagcaccagcuucuaccugaucagcaucuuccugcaccuggugaagauccccacccacagacacgugaucggcaagcccugccccaagccccacagacugaaccacaugggcaucugcagcugcggccuguacaagcaccccggcgugcccgugaaguggaagagauga

SEQ ID NO: 1385 - RNA, 1473 nt, Artificial Sequence
  derived and/or modified protein sequence (opt4) from LASV(LASV042-NIG-2009;Clade II)__AIT17592__GPC
augggccagaucaucaccuucuuccaggaggugccccacgugaucgaggaggugaugaacaucgugcugaucgcccugagccugcuggccauccugaagggcaucuacaacguggccaccugcggccuguucggccuggugagcuuccugcugcugugcggcagaagcugcagcaccaccuacaagggcguguacgagcugcagacccuggagcuggacauggccagccugaacaugaccaugccccugagcugcaccaagaacaacagccaccacuacaucauggugggcaacgagaccggccuggagcugacccugaccaacaccagcaucaucaaccacaaguucugcaaccugagcgacgcccacaagaagaaccuguacgaccacacccugaugagcaucaucagcaccuuccaccugagcauccccaacuucaaccaguacgaggccaugagcugcgacuucaacggcggcagaaucagcgugcaguacaaccugagccacgccuacgccguggacgccgccaaccacugcggcaccaucgccaacggcgugcugcagaccuucaugagaauggccuggggcggcagcuacaucgcccuggacagcggcaagggcagcugggacugcaucaugaccagcuaccaguaccugaucauccagaacaccaccugggaggaccacugccaguucagcagacccagccccaucggcuaccugggccugcugagccagagaaccagagacaucuacaucagcagaagacugcugggcaccuucaccuggacccugagcgacagcgagggcaacgagacccccggcggcuacugccugaccagauggaugcugaucgaggccgagcugaagugcuucggcaacaccgccguggccaagugcaacgagaagcacgacgaggaguucugcgacaugcugagacuguucgacuucaacaagcaggccaucagaagacugaagaccgaggcccagaugagcauccagcugaucaacaaggccgugaacgcccugaucaacgaccagcugaucaugaagaaccaccugagagacaucaugggcauccccuacugcaacuacagcaaguacugguaccugaaccacaccaucaccggcaagaccagccugcccagaugcuggcuggugagcaacggcagcuaccugaacgagacccacuucagcgacgacaucgagcagcaggccgacaacaugaucaccgagcugcugcagaaggaguacaucgacagacagggcaagaccccccugggccugguggaccuguucguguucagcaccagcuucuaccugaucagcaucuuccugcaccuggugaagauccccacccacagacacguggugggcaagcccugccccaagccccacagacugaaccacaugggcaucugcagcugcggccuguacaagcaccccggcgugcccgugaaguggaagagauga

SEQ ID NO: 1386 - RNA, 1473 nt, Artificial Sequence
  derived and/or modified protein sequence (opt4) from LASV(LASV045-NIG-2009;Clade II)__AIT17596__GPC
augggccagaucaucaccuucuuccaggaggugccccacgugaucgaggaggugaugaacaucgugcugaucgcccugagccugcuggccauccugaagggcaucuacaacguggccaccugcggccuguucggccuggugagcuuccugcugcugugcggcagaagcugcagcaccaccuacaagggcguguacgagcugcagacccuggagcuggacauggccagccugaacaugaccaugccccugagcugcaccaagaacaacagccaccacuacaucauggugggcaacgagaccggccuggagcugacccugaccaacaccagcaucaucaaccacaaguucugcaaccugagcgacgcccacaagaagaaccuguacgaccacgcccugaugagcaucaucagcaccuuccaccugagcauccccaacuucaaccaguacgaggccaugagcugcgacuucaacggcggcaagaucagcgugcaguacaaccugagccacaccuacgccguggacgccgccaaccacugcggcaccaucgccaacggcgugcugcagaccuucaugagaauggccuggggcggcagcuacaucgcccuggacagcggcaagggcagcugggacugcaucaugaccagcuaccaguaccugaucauccagaacaccagcugggaggaccacugccaguucagcagacccagccccaucggcuaccugggccugcugagccagagaaccagagacaucuacaucagcagaagacugcugggcaccuucaccuggacccugagcgacagcgagggcaacgagacccccggcggcuacugccugaccagauggaugcugaucgaggccgagcugaagugcuucggcaacaccgccguggccaagugcaacgagaagcacgacgaggaguucugcgacaugcugagacuguucgacuucaacaagcaggccaucagaagacugaagaccgaggcccagaugagcauccagcugaucaacaaggccgugaacgcccugaucaacgaccagcugaucaugaagaaccaccugagagacaucaugggcauccccuacugcaacuacagcaaguacugguaccugaaccacaccgugaccggcaagaccagccugcccagaugcuggcuggugagcaacggcagcuaccugaacgagacccacuucagcgacgacaucgagcagcaggccgacaacaugaucaccgagcugcugcagaaggaguacaucgacagacagggcaagaccccccugggccugguggaccuguucguguucagcaccagcuucuaccugaucagcaucuuccugcaccuggugaagauccccacccacagacacgugaucggcaagcccugccccaagccccacagacugaaccacaugggcaucugcagcugcggccuguacaagcaccccggcgugcccgugaaguggaagagauga

SEQ ID NO: 1387 - RNA, 1473 nt, Artificial Sequence
  derived and/or modified protein sequence (opt4) from LASV(LASV046-NIG-2009;Clade II)__AIT17600__GPC
augggccagaucaucaccuucuuccaggaggugccccacgugaucgaggaggugaugaacaucgugcugaucgcccugagccugcuggccauccugaagggcaucuacaacguggccaccugcggccuguucggccuggugagcuuccugcugcugugcggcagaagcugcagcaccaccuacaagggcguguacgagcugcagacccuggagcuggacauggccagccugaacaugaccaugccccugagcugcaccaagaacaacagccaccacuacaucauggugggcaacgagaccggccuggagcugacccugaccaacaccagcaucaucaaccacaaguucugcaaccugagcgacgcccacaagaagaaccuguacgaccacgcccugaugagcaucaucagcaccuuccaccugagcauccccaacuucaaccaguacgaggccaugagcugcgacuucaacggcggcaagaucagcgugcaguacaaccugagccacgccuacgccggcgacgccgccaaccacugcggcaccaucgccaacggcgugcugcagaccuucaugagaauggccuggggcggcagcuacaucgcccuggacagcggcaagggcagcugggacugcaucaugaccagcuaccaguaccugaucauccagaacaccaccugggaggaccacugccaguucagcagacccagccccaucggcuaccugggccugcugagccagagaaccagagacaucuacaucagcagaagacugcugggcaccuucaccuggacccugagcgacagcgagggcaacgagacccccggcggcuacugccugaccagauggaugcugaucgaggccgagcugaagugcuucggcaacaccgccguggccaagugcaacgagaagcacgacgaggaguucugcgacaugcugagacuguucgacuucaacaagcaggccaucagaagacugaagaccgaggcccagaugagcauccagcugaucaacaaggccgugaacgcccugaucaacgaccagcugaucaugaagaaccaccugagagacaucaugggcauccccuacugcaacuacagcaaguacugguaccugaaccacaccgugaccggcaagaccagccugcccagaugcuggcuggugagcaacggcagcuaccugaacgagacccacuucagcgacgacaucgagcagcaggccgacaacaugaucaccgagcugcugcagaaggaguacaucgacagacagggcaagaccccccugggccugguggaccuguucguguucagcaccagcuucuaccugaucagcaucuuccugcaccuggugaagauccccacccacagacacgugaucggcaagcccugccccaagccccacagacugaaccacaugggcaucugcagcugcggccuguacaagcaccccggcgugcccgugaaguggaagagauga

SEQ ID NO: 1388 - RNA, 1473 nt, Artificial Sequence
  derived and/or modified protein sequence (opt4) from LASV(LASV049-NIG-2009;Clade II)__AIT17604__GPC
augggccagaucaucaccuucuuccaggaggugccccacgugaucgaggaggugaugaacaucgugcugaucgcccugagccugcuggccauccugaagggcaucuacaacguggccaccugcggccuguucggccuggugagcuuccugcugcugugcggcagaagcugcagcaccaccuacaagggcguguacgagcugcagacccuggagcuggacaugaccagccugaacaugaccaugccccugagcugcaccaagaacaacagccaccacuacaucauggugggcaacgagaccggccuggagcugacccugaccaacaccagcaucaucaaccacaaguucugcaaccugagcgacgcccacaagaaggaccuguacgaccacgcccugaugagcaucaucagcaccuuccaccugagcauccccaacuucaaccaguacgaggccaugagcugcgacuucaacggcggcaagaucagcgugcaguacaaccugagccacaccuacgccguggacgccgccaagcacugcggcaccaucgccaacggcgugcugcagaccuucaugagaauggccuggggcggcagcuacaucgcccuggacagcggcaagggcagcugggacugcaucaugaccagcuaccaguaccugaucauccagaacaccaccugggaggaccacugccaguucagcagacccagccccgugggcuaccugggccugcugagccagagaaccagagacaucuacaucagcagaagacugcugggcaccuucaccuggacccugagcgacagcgagggcaacgagacccccggcggcuacugccugaccagauggaugcugaucgaggccgagcugaagugcuucggcaacaccgccguggccaagugcaacgagaagcacgacgaggaguucugcgacaugcugagacuguucgacuucaacaagcaggccaucagaagacugaagaccgaggcccagaugagcauccagcugaucaacaaggccgugaacgcccugaucaacgaccagcugaucaugaagaaccaccugagagacaucaugggcauccccuacugcaacuacagcaaguacugguaccugaaccacaccgugaccggcaagaccagccugcccagaugcuggcuggugagcaacggcagcuaccugaacgagacccacuucagcgacgacaucgagcagcaggccgacaacaugaucaccgagcugcugcagaaggaguaccuggacagacagggcaagaccccccugggccugguggaccuguucguguucagcaccagcuucuaccugaucagcaucuuccugcaccuggugaagauccccacccacagacacgugaucggcaagcccugccccaagccccacagacugaaccacaugggcaucugcagcugcggccuguacaagcaccccggcgugcccgugaaguggaagagauga

SEQ ID NO: 1389 - RNA, 1473 nt, Artificial Sequence
  derived and/or modified protein sequence (opt4) from LASV(LASV052-NIG-2008;Clade II)__AIT17608__GPC
augggccagaucaucaccuucuuccaggaggugccccacgugaucgaggaggugaugaacaucgugcugaucgcccugagccugcuggccauccugaagggcaucuacaacguggccaccugcggccuguucggccuggugagcuuccugcugcugugcggcagaagcugcagcaccaccuacaagggcguguacgagcugcagacccuggagcuggacauggccagccugaacaugaccaugccccugagcugcaccaagaacaacagccaccacuacaucauggugggcaacgagaccggccuggagcugacccugaccaacaccagcaucaucaaccacaaguucugcaaccugagcgacgcccacaagagaaaccuguacaaccacgcccugaugagcaucaucagcaccuuccaccugagcauccccaacuucaaccaguacgaggccaugagcugcgacuucaacggcggcaagaucagcgugcaguacaaccugagccacaccuacgccguggacgccgccaaccacugcggcaccaucgccaacggcgugcugcagaccuucaugagaauggccuggggcggcagcuacaucgcccuggacagcggcaagggcagcugggacugcaucaugaccagcuaccaguaccugaucauccagaacaccaccugggaggaccacugccaguucagcagacccagccccaucggcuaccugggccugcugagccagagaaccagagacaucuacaucagcagaagacugcugggcaccuucaccuggacccugagcgacagcgagggcaacgagacccccggcggcuacugccugaccagauggaugcugaucgaggccgagcugaagugcuucggcaacaccgccguggccaagugcaacgagaagcacgacgaggaguucugcgacaugcugagacuguucgacuucaacaagcaggccaucagaagacugaagaccgaggcccagaugagcauccagcugaucaacaaggccgugaacgcccugaucaacgaccagcugaucaugaagaaccaccugagagacaucaugggcauccccuacugcaacuacagcaaguacugguaccugaaccacaccgugaccggcaagaccagccugcccagaugcuggcuggugagcaacggcagcuaccugaacgagacccacuucagcgacgacaucgagcagcaggccgacaacaugaucaccgagcugcugcagaaggaguacaucgacagacagggcaagaccccccugggccugguggaccuguucguguucagcaccagcuucuaccugaucagcaucuuccugcaccuggugaagauccccacccacagacacaucaucggcaagcccugccccaagccccacagacugaaccacaugggcaucugcagcugcggccuguacaagcaccccggcgugcccgugaaguggagaagauga

SEQ ID NO: 1390 - RNA, 1473 nt, Artificial Sequence
  derived and/or modified protein sequence (opt4) from LASV(LASV056-NIG-2008;Clade II)__AIT17612__GPC
augggccagaucaucaccuucuuccaggaggugccccacgugaucgaggaggugaugaacaucgugcugaucgcccugagccugcuggccauccugaagggcaucuacaacguggccaccugcggccuguucggccuggugagcuuccugcugcugugcggcagaagcugcagcaccaccuacaagggcguguacgagcugcagacccuggagcuggacauggccagccugaacaugaccaugccccugagcugcaccaagaacaacagccaccacuacaucagagugggcaacgagaccggccuggagcugacccugaccaacaccagcaucaucaaccacaaguucugcaaccugagcgacgcccacaagaagaaccuguacgaccacagccugaugagcaucaucagcaccuuccaccugagcauccccaacuucaaccaguacgaggccaugagcugcgacuucaacggcggcaagaucagcgugcaguacaaccugagccacaccuacgccguggacgccgccaaccacugcggcaccaucgccaacggcgugcugcagaccuucaugagaauggccuggggcggcagcuacaucgcccuggacagcggcaagggcaacugggacugcaucaugaccagcuaccaguaccugaucauccagaacaccaccugggaggaccacugccaguucagcagacccagccccaucggcuaccugggccugcugagccagagaaccagagacaucuacaucagcagaagacugcugggcaccuucaccuggacccugagcgacagcgagggcaacgagacccccggcggcuacugccugaccagauggaugcugaucgaggccgagcugaagugcuucggcaacaccgccguggccaagugcaacgagaagcacgacgaggaguucugcgacaugcugagacuguucgacuucaacaagcaggccaucagaagacugaagaccgaggcccagaugagcauccagcugaucaacaaggccgugaacgcccugaucaacgaccagcugaucaugaagaaccaccugagagacaucaugggcauccccuacugcaacuacagcaaguacugguaccugaaccacaccgugaccggcaagaccagccugcccagaugcuggcuggugagcaacggcagcuaccugaacgagacccacuucagcgacgacaucgagcagcaggccgacaacaugaucaccgagcugcugcagaaggaguacaucgacagacagggcaagaccccccugggccugguggaccuguucguguucagcaccagcuucuaccugaucagcaucuuccugcaccuggugaagauccccacccacagacacguggugggcaagcccugccccaagccccacagacugaaccacaugggcaucugcagcugcggccuguacaagcaccccggcgugcccgugaaguggaagagauga

SEQ ID NO: 1391 - RNA, 1473 nt, Artificial Sequence
  derived and/or modified protein sequence (opt4) from LASV(LASV058-NIG-2008;Clade II)__AIT17616__GPC
augggccagaucaucaccuucuuccaggaggugccccacgugaucgaggaggugaugaacaucgugcugaucgcccugagccugcuggccauccugaagggcaucuacaacguggccaccugcggccuguucggccuggugagcuuccugcugcugugcggcagaagcugcagcaccaccuacaagggcguguacgagcugcagacccuggagcuggacauggccagccugaacaugaccaugccccugagcugcaccaagaacaacagccaccacuacaucauggugggcaacgagaccggccuggagcugacccugaccaacaccagcaucaucaaccacaaguucugcaaccugagcgacgcccacaagaagaaccuguacgaccacgcccugaugagcaucaucagcaccuuccaccugagcauccccaacuucaaccaguacgaggccaugagcugcgacuucaacggcggcaagaucagcgugcaguacaaccugagccacgccuacgccguggacgccgccaaccacugcggcaccaucgccaacggcgugcugcagaccuucaugagaauggccuggggcggcagcuacaucgcccuggacagcggcaagggcagcugggacugcaucaugaccagcuaccaguaccugaucauccagaacaccaccugggaggaccacugccaguucagcagacccagccccaucggcuaccugggccugcugagccagagaaccagagacaucuacaucagcagaagacugcugggcaccuucaccuggacccugagcgacagcgagggcaacgagacccccggcggcuacugccugaccagauggaugcugaucgaggccgagcugaagugcuucggcaacaccgccguggccaagugcaacgagaagcacgacgaggaguucugcgacaugcugagacuguucgacuucaacaagcaggccaucagaagacugaagaccgaggcccagaugagcauccagcugaucaacaaggccgugaacgcccugaucaacgaccagcugaucaugaagaaccaccugagagacaucaugggcauccccuacugcaacuacagcaaguacugguaccugaaccacaccgugaccggcaagaccagccugcccagaugcuggcuggugagcaacggcagcuaccugaacgagacccacuucagcgacgacaucgagcagcaggccgacaacaugaucaccgagcugcugcagaaggaguacaucgacagacagggcaagaccccccugggccugguggaccuguucguguucagcaccagcuucuaccugaucagcaucuuccugcaccuggugaagauccccacccacagacacgugaucggcaagcccugccccaagccccacagacugaaccacaugggcaucugcagcugcggccuguacaagcaccccggcgugcccgugaaguggaagagauga

SEQ ID NO: 1392 - RNA, 1473 nt, Artificial Sequence
  derived and/or modified protein sequence (opt4) from LASV(LASV063-NIG-2009;Clade II)__AIT17620__GPC
augggccagaucaucaccuucuuccaggaggugccccacgugaucgaggaggugaugaacaucgugcugaucgcccugagccugcuggccauccugaagggcaucuacaacguggccaccugcggccuguucggccuggugagcuuccugcugcugugcggcagaagcugcagcaccaccuacaagggcguguacgagcugcagacccuggagcuggacauggccagccugaacaugaccaugccccugagcugcaccaagaacaacagccaccacuacaucauggugggcaacgagaccggccuggagcugacccugaccaacaccagcaucaucagccacaaguucugcaaccugagcgacgcccacaagaagaaccuguacgaccacgcccugaugagcaucaucagcaccuuccaccugagcauccccaacuucaaccaguacgaggccaugagcugcgacuucaacggcggcaagaucagcgugcaguacaaccugagccacgccuacgccaucgacgccgccaaccacugcggcaccguggccaacggcgugcugcagaccuucaugagaauggccuggggcggcagcuacaucgcccuggacagcggcaagggcagcugggacugcaucaugaccagcuaccaguaccugaucauccagaacaccaccugggaggaccacugccaguucagcagacccagccccaucggcuaccugggccugcugagccagagaaccagagacaucuacaucagcagaagacugcugggcaccuucaccuggacccugagcgacagcgagggcaacgagacccccggcggcuacugccugaccagauggaugcugaucgaggccgagcugaagugcuucggcaacaccgccguggccaagugcaacgagaagcacgacgaggaguucugcgacaugcugagacuguucgacuucaacaagcaggccaucagaagacugaaggccgaggcccagaugagcauccagcugaucaacaaggccgugaacgcccugaucaacgaccagcugaucaugaagaaccaccugagagacaucaugggcauccccuacugcaacuacagcaaguacugguaccugaaccacaccgugaccggcaagaccagccugcccagaugcuggcuggugagcaacggcagcuaccugaacgagacccacuucagcgacgacaucgagcagcaggccgacaacaugaucaccgagcugcugcagaaggaguacauggacagacagggcaagaccccccugggccugguggaccuguucguguucagcaccagcuucuaccugaucagcaucuuccugcaccuggugaagauccccacccacagacacgugaucggcaagcccugccccaagccccacagacugaaccacaugggcaucugcagcugcggccuguacaagcaccccggcgugcccgugaaguggaagagauga

SEQ ID NO: 1393 - RNA, 1473 nt, Artificial Sequence
  derived and/or modified protein sequence (opt4) from LASV(LASV1000-NIG-2009;Clade II)__AIT17782__GPC
augggccagaucaucaccuucuuccaggaggugccccacgugaucgaggaggugaugaacaucgugcugaucgcccugagccugcuggccauccugaagggcaucuacaacguggccaccugcggccuguucggccuggugagcuuccugcugcugugcggcagaagcugcagcaccaccuacaagggcguguacgagcugcagacccuggagcuggacauggccagccugaacaugaccaugccccugagcugcaccaagaacaacagccaccacuacaucauggugggcaacgagaccggccuggagcugacccugaccaacaccagcaucaucaaccacaaguucugcaaccugagcgacgcccacaagaagaaccuguacgaccacgcccugaugagcaucaucagcaccuuccaccugagcauccccaacuucaaccaguacgaggccaugagcugcgacuucaacggcggcaagaucagcgugcaguacaaccugagccacaccuacgccguggacgccgccaaccacugcggcaccaucgccaacggcgugcugcagaccuucaugagaauggccuggggcggcagcuacaucgcccuggacagcggcaagggcagcugggacugcaucaugaccagcuaccaguaccugaucauccagaacaccaccugggaggaccacugccaguucagcagacccagccccaucggcuaccugggccugcugagccagagaaccagagacaucuacaucagcagaagacugcugggcaccuucaccuggacccugagcgacagcgagggcaacgagacccccggcggcuacugccugaccagauggaugcugaucgaggccgagcugaagugcuucggcaacaccgccguggccaagugcaacgagaagcacgacgaggaguucugcgacaugcugagacuguucgacuucaacaagcaggccaucaagagacugaagaccgaggcccagaugagcauccagcugaucaacaaggccgugaacgcccugaucaacgaccagcugaucaugaagaaccaccugagagacaucaugggcauccccuacugcaacuacagcaaguacugguaccugaaccacaccgugaccggcaagaccagccugcccagaugcuggcuggugagcaacggcagcuaccugaacgagacccacuucagcgacgacaucgagcagcaggccgacaacaugaucaccgagcugcugcagaaggaguacaucgacagacagggcaagaccccccugggccugguggaccuguucguguucagcaccagcuucuaccugaucagcaucuuccugcaccuggugaagauccccacccacagacacguggugggcaagcccugccccaagccccacagacugaaccacaugggcaucugcagcugcggccuguacaagcaccccggcgugcccgugaaguggaagagauga

SEQ ID NO: 1394 - RNA, 1473 nt, Artificial Sequence
  derived and/or modified protein sequence (opt4) from LASV(LASV1008-NIG-2009;Clade II)__AIT17786__GPC
augggccagaucaucaccuucuuccaggaggugccccacgugaucgaggaggugaugaacaucgugcugaucgcccugagccugcuggccauccugaagggcaucuacaacguggccaccugcggccuguucggccuggugagcuuccugcugcugugcggcagaagcugcagcaccaccuacaagggcguguacgagcugcagacccuggagcuggacauggccagccugaacaugaccaugccccugagcugcaccaagaacaacagccaccacuacaucauggugggcaacgagaccggccuggagcugacccugaccaacaccagcaucaucaaccacaaguucugcaaccugagcgacgcccacaagaagaaccuguacgaccacgcccugaugagcaucaucagcaccuuccaccugagcauccccaacuucaaccaguacgaggccaugagcugcgacuucaacggcggcaagaucagcgugcaguacaaccugagccacgccuacgccaucgacgccgccgaccacugcggcaccaucgccaacggcgugcugcagaccuucaugagaauggccuggggcggcagcuacaucgcccuggacagcggcaagggcagcugggacugcaucaugaccagcuaccaguaccugaucauccagaacaccaccugggaggaccacugccaguucagcagacccagccccaucggcuaccugggccugcugagccagagaaccagagacaucuacaucagcagaagacugcugggcaccuucaccuggacccugagcgacagcgagggcaacgagacccccggcggcuacugccugaccagauggaugcugaucgaggccgagcugaagugcuucggcaacaccgccguggccaagugcaacgagaagcacgacgaggaguucugcgacaugcugagacuguucgacuucaacaagcaggccaucagaagacugaagaccgaggcccagaugagcauccagcugaucaacaaggccgugaacgcccugaucaacgaccagcugaucaugaagaaccaccugagagacaucaugggcauccccuacugcaacuacagcaaguacugguaccugaaccacaccgugaccggcaagaccagccugcccagaugcuggcuggugagcaacggcagcuaccugaacgagacccacuucagcgacgacaucgagcagcaggccgacaacaugaucaccgagcugcugcagaaggaguacauggacagacagggcaagaccccccugggccugguggaccuguucguguucagcaccagcuucuaccugaucagcaucuuccugcaccuggugaagauccccacccacagacacaucaccggcaagcccugccccaagccccacagacugaaccacaugggcaucugcagcugcggccuguacaagcaccccggcgugcccgugaaguggaagagauga

SEQ ID NO: 1395 - RNA, 1473 nt, Artificial Sequence
  derived and/or modified protein sequence (opt4) from LASV(LASV1011-NIG-2009;Clade II)__AIT17790__GPC
augggccagaucaucaccuucuuccaggaggugccccacgugaucgaggaggugaugaacaucgugcugaucgcccugagccugcuggccauccugaagggcaucuacaacguggccaccugcggccuguucggccuggugagcuuccugcugcugugcggcagaagcugcagcaccaccuacaagggcguguacgagcugcagacccuggagcuggacauggccagccugaacaugaccaugccccugagcugcaccaagaacaacagccaccacuacaucauggugggcaacgagaccggccuggagcugacccugaccaacaccagcaucaucaaccacaaguucugcaaccugagcgacgcccacaagaagaaccuguacgaccacgcccugaugagcaucaucagcaccuuccaccugagcauccccaacuucaaccaguacgaggccaugagcugcgacuucaacggcggcaagaucagcgugcaguacaaccugagccacaccuacgccguggacgccgccaaccacugcggcaccaucgccaacggcgugcugcagaccuucaugagaauggccuggggcggcagcuacaucgcccuggacagcggcaagggcagcugggacugcaucaugaccagcuaccaguaccugaucauccagaacaccaccugggaggaccacugccaguucagcagacccagccccaucggcuaccugggccugcugagccagagaaccagagacaucuacaucagcagaagacugcugggcaccuucaccuggacccugagcgacagcgagggcaacgagacccccggcggcuacugccugaccagauggaugcugaucgaggccgagcugaagugcuucggcaacaccgccguggccaagugcaacgagaagcacgacgaggaguucugcgacaugcugagacuguucgacuucaacaagcaggccaucagaagacugaagaccgaggcccagaugagcauccagcugaucaacaaggccgugaacgcccugaucaacgaccagcugaucaugaagaaccaccugagagacaucaugggcauccccuacugcaacuacagcaaguacugguaccugaaccacaccgugaccggcaagaccagccugcccagaugcuggcuggugagcaacggcagcuaccugaacgagacccacuucagcgacgacaucgagcagcaggccgacaacaugaucaccgagcugcugcagaaggaguacauggacagacagggcaagaccccccugggccugguggaccuguucguguucagcaccagcuucuaccugaucagcaucuuccugcaccuggugaagauccccacccacagacacaucaccggcaagcccugccccaagccccacagacugaaccacaugggcaucugcagcugcggccuguacaagcaccccggcgugcccgugaaguggaagagauga

SEQ ID NO: 1396 - RNA, 1473 nt, Artificial Sequence
  derived and/or modified protein sequence (opt4) from LASV(LASV1016-NIG-2009;Clade II)__AIT17798__GPC
augggccagaucaucaccuucuuccaggaggugccccacgugaucgaggaggugaugaacaucgugcugaucgcccugagccugcuggccauccugaagggcaucuacaacguggccaccugcggccuguucggccuggugagcuuccugcugcugugcggcagaagcugcagcaccaccuacaagggcguguacgagcugcagacccuggagcuggacauggccagccugaacaugaccaugccccugagcugcaccaagaacaacagccaccacuacaucauggugggcaacgagaccggccuggagcugacccugaccaacaccagcaucaucaaccacaaguucugcaaccugagcgacgcccacaagaagaaccuguacgaccacgcccugaugagcaucaucagcaccuuccaccugagcauccccaacuucaaccaguacgaggccaugagcugcgacuucaacggcggcaagaucagcgugcaguacaaccugagccacaccuacgccguggacgccgccaaccacugcggcaccaucgccaacggcgugcugcagaccuucaugagaauggccuggggcggcagcuacaucgcccuggacagcggcaagggcagcugggacugcaucaugaccagcuaccaguaccugaucauccagaacaccaccugggaggaccacugccaguucagcagacccagccccaucggcuaccugggccugcugagccagagaaccagagacaucuacaucagcagaagacugcugggcaccuucaccuggacccugagcgacagcgagggcaacgagacccccggcggcuacugccugaccagauggaugcugaucgaggccgagcugaagugcuucggcaacaccgccguggccaagugcaacgagaagcacgacgaggaguucugcgacaugcugagacuguucgacuucaacaagcaggccaucaugagacugaagaccgaggcccagaugagcauccagcugaucaacaaggccgugaacgcccugaucaacgaccagcugaucaugaagaaccaccugagagacaucaugggcauccccuacugcaacuacagcaaguacugguaccugaaccacaccgugaccggcaagaccagccugcccagaugcuggcuggugagcaacggcagcuaccugaacgagacccacuucagcgacgacaucgagcagcaggccgacaacaugaucaccgagaugcugcagaaggaguaccuggacagacagggcaagaccccccugggccugguggaccuguucguguucagcaccagcuucuaccugaucagcaucuuccugcaccuggugaagauccccacccacagacacaucaucggcaagcccugccccaagccccacagacugaaccacaugggcaucugcagcugcggccuguacaagcaccccggcgugcccgugaaguggaagagauga

SEQ ID NO: 1397 - RNA, 1473 nt, Artificial Sequence; identical to SEQ ID NO: 1309
  derived and/or modified protein sequence (opt4) from LASV(LASV221-NIG-2010;Clade II)__AIT17624__GPC

SEQ ID NO: 1398 - RNA, 1473 nt, Artificial Sequence
  derived and/or modified protein sequence (opt4) from LASV(LASV224-NIG-2010;Clade II)__AIT17626__GPC
augggccagaucaucaccuucuuccaggaggugccccacgugaucgaggaggugaugaacaucgugcugaucgcccugagccugcuggccauccugaagggcguguacaacguggccaccugcggccuguucggccuggugagcuuccugcugcugugcggcagaagcugcagcaccaccuacaagggcguguacgagcugcagacccuggagcuggacauggccagccugaacaugaccaugccccugagcugcaccaagaacaacagccaccacuacaucauggugggcaacgagaccggccuggagcugacccugaccaacaccagcaucauccagcacaaguucugcaaccugagcgacgcccacaagaagaaccuguacgaccacgcccugaugagcaucaucagcaccuuccaccugagcauccccaacuucaaccaguacgaggccaugagcugcgacuucaacggcggcaagaucaccgugcaguacaaccugagccacagcuacgccaucgacgccgccaaccacugcggcaccaucgccaacggcgugcugcagaccuucaugagaauggccuggggcggcagcuacaucgcccuggacagcggcaagggcagcugggacugcaucaugaccagcuaccaguaccugaucauccagaacaccaccugggaggaccacugccaguucagcagacccagccccaucggcuaccugggccugcugagccagagaaccagagacaucuacaucagcagaagacugcugggcaccuucaccuggacccugagcgacagcgagggcaacgagacccccggcggcuacugccugaccagauggaugcugaucgaggccgagcugaagugcuucggcaacaccgccguggccaagugcaacgagaagcacgacgaggaguucugcgacaugcugagacuguucgacuucaacaagcaggccaucagaagacugaagaccgaggcccagaugagcauccagcugaucaacaaggccgugaacgcccugaucaacgaccagcugaucaugaagaaccaccugagagacaucaugggcauccccuacugcaacuacagcaaguacugguaccugaaccacaccgugaccggcagaaccagccugcccagaugcuggcuggugagcaacggcagcuaccugaacgagacccacuucagcgacgacaucgagcagcaggccgacaacaugaucaccgagcugcugcagaaggaguacauggacagacagggcaagaccccccugggccugguggaccuguucguguucagcaccagcuucuaccugaucagcaucuuccugcaccuggugaagauccccacccacagacacaucaucggcaagcccugccccaagccccacagacugaaccacaugggcgugugcagcugcggccuguacaagcaccccggcgugcccgugaaguggaagagauga

SEQ ID NO: 1399 - RNA, 1473 nt, Artificial Sequence
  derived and/or modified protein sequence (opt4) from LASV(LASV225-NIG-2010;Clade II)__AIT17630__GPC
augggccagaucaucaccuucuuccaggaggugccccacgugaucgaggaggugaugaacaucgugcugaucgcccugagccugcuggccauccugaagggcaucuacaacguggccaccugcggccuguucggccugcugagcuuccugcugcugugcggcagaagcugcagcaccaccuacaagggcguguacgagcugcagacccuggagcuggacauggccagccugaacaugaccaugccccugagcugcaccaagaacaacagccaccacuacaucauggugggcaacgagaccggccuggagcugacccugaccaacaccagcaucaucaaccacaaguucugcaaccugagcgacgcccacaagaagaaccuguacgaccacgcccugaugagcaucaucagcaccuuccaccugagcauccccaacuucaaccaguacgaggccaugagcugcgacuucaacggcggcaagaucagcgugcaguacaaccugagccacgccuacgccguggacgccgccgagcacugcggcaccaucgccaacggcgugcugcagaccuucaugagaauggccuggggcggcagcuacaucgcccuggacagcggcaagggcagcugggacugcgugaugaccagcuaccaguaccugaucauccagaacaccagcugggaggaccacugccaguucagcagacccagccccaucggcuaccugggccugcugagccagagaaccagagacaucuacaucagcagaagacugcugggcaccuucaccuggacccugagcgacagcgagggcaacgagacccccggcggcuacugccugaccagauggaugcugaucgaggccgagcugaagugcuucggcaacaccgccguggccaagugcaacgagaagcacgacgaggaguucugcgacaugcugagacuguucgacuucaacaagcaggccaucagaagacugaagaccgaggcccagaugagcauccagcugaucaacaaggccgugaacgcccugaucaacgaccagcugaucaugaagaaccaccugagagacaucaugggcauccccuacugcaacuacagcaaguacugguaccugaaccacaccgugaccggcaagaccagccugcccagaugcuggcuggugagcaacggcagcuaccugaacgagacccacuucagcgacgacaucgagcagcaggccgacaacaugaucaccgagcugcugcagaaggaguacaucgacagacagggcaagaccccccugggccugguggaccuguucguguucagcaccagcuucuaccugaucagcaucuuccugcaccuggugaagauccccacccacagacacgugaucggcaagcccugccccaagccccacagacugaaccacaugggcaucugcagcugcggccuguacaagcaccccggcgugcccgugaaguggaagagauga

SEQ ID NO: 1400 - RNA, 1473 nt, Artificial Sequence
  derived and/or modified protein sequence (opt4) from LASV(LASV229-NIG-2010;Clade II)__AIT17634__GPC
augggccagaucaucaccuucuuccaggaggugccccacgugaucgaggaggugaugaacaucgugcugaucgcccugagccugcuggccauccugaagggcaucuacaacguggccaccugcggccuguucggccuggugagcuuccugcugcugugcggcagaagcugcagcaccaucuacaaggacguguacgagcugcagacccuggagcuggacauggccagccugaacaugaccaugccccugagcugcaccaagaacaacagccaccacuacaucauggugggcaacgagaccggccuggagcugacccugaccaacaccagcaucaucaaccacaaguucugcaaccugagcgacgcccacaagaagaaccuguacgaccacgcccugaugagcaucaucagcaccuuccaccugagcauccccaacuucaaccaguacgaggccaugagcugcgacuucaacggcggcaagaucagcgugcaguacaaccugagccacaccuacgccaucgacgccgccaaccacugcggcaccaucgccaacggcgugcugcagaccuucaugagaauggccuggggcggcagcuacaucgcccuggacagcggcaagggcagcugggacugcaucaugaccagcuaccaguaccugaucauccagaacaccaccugggaggaccacugccaguucagcagacccagccccaucggcuaccugggccugcugagccagagaaccagagacaucuacaucagcagaagacugcugggcaccuucaccuggacccugagcgacagcgagggcaacgagacccccggcggcuacugccugaccagauggaugcugaucgaggccgagcugaagugcuucggcaacaccgccguggccaagugcaacgagaagcacgacgaggaguucugcgacaugcugagacuguucgacuucaacaagcaggccaucagaagacugaagaccgaggcccagaugagcauccagcugaucaacaaggccgugaacgcccugaucaacgaccagcugaucaugaagaaccaccugagagacaucaugggcauccccuacugcaacuacagcagauacugguaccugaaccacaccgugaccggcagaaccagccugcccagaugcuggcuggugagcaacggcagcuaccugaacgagacccacuucagcgacgacaucgagcagcaggccgacaacaugaucaccgagcugcugcagaaggaguacauggacagacagggcaagaccccccugggccugguggaccuguucguguucagcaccagcuucuaccugaucagcaucuuccugcaccuggugaagauccccacccacagacacgugaucggcaagcccugccccaagccccacagacugaaccacaugggcaucugcagcugcggccuguacaaccaccccggcgugcccgugaaguggaagagauga

SEQ ID NO: 1401 - RNA, 1473 nt, Artificial Sequence
  derived and/or modified protein sequence (opt4) from LASV(LASV237-NIG-2010;Clade II)__AIT17638__GPC
augggccagaucaucaccuucuuccaggaggugccccacgugaucgaggaggugaugaacaucgugcugaucgcccugagccugcuggccauccugaagggcaucuacaacguggccaccugcggccuguucggccuggugagcuuccugcugcugugcggcagaagcugcagcaccaccuacaagggcguguacgagcugcagacccuggagcuggacauggccagccugaacaugaccaugccccugagcugcaccaagaacaacagccaccacuacaucauggugggcaacgagaccggccuggagcugacccugaccaacaccagcaucaucaaccacaaguucugcaaccugagcgacgcccacaagaaggaccuguacgaccacgcccugaugagcaucaucagcaccuuccaccugagcauccccaacuucaaccaguacgaggccaugagcugcgacuucaacggcggcaagaucagcgugcaguacaaccugagccacaccuacgccguggacgccgccaaccacugcggcaccaucgccaacggcgugcugcagaccuucaugagaauggccuggggcggcagcuacaucgcccuggacagcggcaagggcagcugggacugcaucaugaccagcuaccaguaccugaucauccagaacaccaccugggaggaccacugccaguucagcagacccagccccaucggcuaccugggccugcugagccagagaaccagagacaucuacaucagcagaagacugcugggcaccuucaccuggacccugagcgacagcgagggcaacgagacccccggcggcuacugccugaccagauggaugcugaucgaggccgagcugaagugcuucggcaacaccgccguggccaagugcaacgagaagcacgacgaggaguucugcgacaugcugagacuguucgacuucaacaagcaggccaucagaagacugaagaccgaggcccagaugagcauccagcugaucaacaaggccgugaacgcccugaucaacgaccagcugaucaugaagaaccaccugagagacaucaugggcauccccuacugcaacuacagcaaguacugguaccugaaccacaccgugaccggcaagaccagccugcccagaugcuggcuggugagcaacggcagcuaccugaacgagacccacuucagcgacgacaucgagcagcaggccgacaacaugaucaccgagcugcugcagaaggaguacauggacagacagggcaagaccccccugggccugguggaccuguucguguucagcaccagcuucuaccugaucagcaucuuccugcaccugaucaagauccccacccacagacacaucaccggcaagcccugccccaagccccacagacugaaccacaugggcaucugcagcugcggccuguacaagcaccccggcgugcccgugaaguggaagagauga

SEQ ID NO: 1402 - RNA, 1473 nt, Artificial Sequence
  derived and/or modified protein sequence (opt4) from LASV(LASV239-NIG-2010;Clade II)__AIT17642__GPC
augggccagaucaucaccuucuuccaggaggugccccacgugaucgaggaggugaugaacaucgugcugaucgcccugagccugcuggccauccugaagggcguguacaacguggccaccugcggccuguucggccuggugagcuuccugcugcugugcggcagaagcugcagcaccaccuacaagggcguguacgagcugcagacccuggagcuggacauggccagccugaacaugaccaugccccugagcugcaccaagaacaacagccaccacuacaucauggugggcaacgacaccggccuggagcugacccugaccaacaccagcaucaucaaccacaaguucugcaaccugagcgacgcccacaagaagaaccuguacgaccacgcccugaugagcaucaucagcaccuuccaccugagcauccccaacuucaaccaguacgaggccaugagcugcgacuucaacggcggcaagaucagcgugcaguacaaccugagccacgccuacgccguggacgccgccagccacugcggcaccaucgccaacggcgugcugcagaccuucaugagaauggccuggggcggcagcuacaucgcccuggacagcggcaagggcagcugggacugcaucaugaccagcuaccaguaccugaucauccagaacaccaccugggaggaccacugccaguucagcagacccagccccaucggcuaccugggccugcugagccagagaaccagagacaucuacaucagcagaagacugcugggcaccuucaccuggacccugagcgacagcgagggcaacgagacccccggcggcuacugccugaccagauggaugcugaucgaggccgagcugaagugcuucggcaacaccgccguggccaagugcaacgagaagcacgacgaggaguucugcgacaugcugagacuguucgacuucaacaagcaggccaucagaagacugaagaccgaggcccagaugagcauccagcugaucaacaaggccgugaacgcccugaucaacgaccagcugaucaugaagaaccaccugagagacaucaugggcauccccuacugcaacuacagcaaguacugguaccugaaccacaccgugaccggcaagaccagccugcccagaugcuggcuggugagcaacggcagcuaccugaacgagacccacuucagcgacgacaucgagcagcaggccgacaacaugaucaccgagcugcugcagaaggaguacauggacagacagggcaagaccccccugggccugguggaccuguucguguucagcaccagcuucuaccugaucagcaucuuccugcaccuggugaagauccccacccacagacacaucaucggcaagcccugccccaagccccacagacugaaccacaugggcaucugcagcugcggccuguacaagcaccccggcgugcccgugaaguggaagagauga

SEQ ID NO: 1403 - RNA, 1473 nt, Artificial Sequence
  derived and/or modified protein sequence (opt4) from LASV(LASV241-NIG-2011;Clade II)__AIT17646__GPC
augggccagaucaucaccuucuuccaggaggugccccacgugaucgaggaggugaugaacaucgugcugaucgcccugagccugcuggccauccugaagggcaucuacaacguggccaccugcggccuguucggccuggugagcuuccugcugcugugcggcagaagcugcagcaccaccuacaagggcguguacgagcugcagacccuggagcuggacauggccagccugaacaugaccaugccccugagcugcaccaagaacaacagccaccacuacaucauggugggcaacgagaccggccuggagcugacccugaccaacaccagcaucaucaaccacaaguucugcaaccugagcgacgcccacaagaagaaccuguacgaccacgcccugaugagcaucaucagcaccuuccaccugagcauccccaacuucaaccaguacgaggccaugagcugcgacuucaacggcggcaagaucagcgugcaguacaaccugagccacgccuacgccguggacgccgccagccacugcggcaccguggccaacggcgugcugcagaccuucaugagaauggccuggggcggcagcuacaucgcccuggacagcggcaagggcagcugggacugcaucaugaccagcuaccaguaccugaucauccagaacaccaccugggaggaccacugccaguucagcagacccagccccaucggcuaccugggccugcugagccagagaaccagagacaucuacaucagcagaagacugcugggcaccuucaccuggacccugagcgacagcgagggcaacgagacccccggcggcuacugccugaccagauggaugcugaucgaggccgagcugaagugcuucggcaacaccgccguggccaagugcaacgagaagcacgacgaggaguucugcgacaugcugagacuguucgacuucaacaagcaggccaucagaagacugaagaccgaggcccagaugagcauccagcugaucaacaaggccgugaacgcccugaucaacgaccagcugaucaugaagaaccaccugagagacaucaugggcauccccuacugcaacuacagcaaguacugguaccugaaccacaccgugaccggcaagaccagccugcccagaugcuggcuggugagcaacggcagcuaccugaacgagacccacuucagcgacgacaucgagcagcaggccgacaacaugaucaccgagcugcugcagaaggaguacauggacagacagggcaagaccccccugggccugguggaccuguucguguucagcaccagcuucuaccugaucagcaucuuccugcaccuggugaagauccccacccacagacacgugaucggcaagcccugccccaagccccacagacugaaccacaugggcaucugcagcugcggccuguacaagcaccccggcgugcccgugaaguggaagagauga

SEQ ID NO: 1404 - RNA, 1473 nt, Artificial Sequence
  derived and/or modified protein sequence (opt4) from LASV(LASV242-NIG-2010;Clade II)__AIT17650__GPC
augggccagaucaucaccuucuuccaggaggugccccacgugaucgaggaggugaugaacaucgugcugaucgcccugagccugcuggccauccugaagggcaucuacaacguggccaccugcggccuguucggccuggugagcuuccugcugcugugcggcagaagcugcagcaccaccuacaagggcguguacgagcugcagacccuggagcuggacauggccagccugaacaugaccaugccccugagcugcaccaagaacaacagccaccacuacaucauggugggcaacgagaccggccuggagcugacccugaccaacaucagcaucaucaaccacaaguucugcaaccugagcgacgcccacaagaagaaccuguacgaccacgcccugaugagcaucaucagcaccuuccaccugagcauccccaacuucaaccaguacgaggccaugagcugcgacuucaacggcggcaagaucagcgugcaguacaaccugagccacaccuacgccguggacgccgccaaccacugcggcaccaucgccaacggcgugcugcagaccuucaugagaauggccuggggcggcagcuacaucgcccuggacagcggcaagggcagcugggacugcaucaugaccagcuaccaguaccugaucauccagaacaccaccugggaggaccacugccaguucagcagacccagccccaucggcuaccugggccugcugagccagagaaccagagacaucuacaucagcagaagacugcugggcaccuucaccuggacccugagcgacagcgagggcaacgagacccccggcggcuacugccugaccagauggaugcugaucgaggccgagcugaagugcuucggcaacaccgccguggccaagugcaacgagaagcacgacgaggaguucugcgacaugcugagacuguucgacuucaacaagcaggccaucagaagacugaaggccgaggcccagaugagcauccagcugaucaacaaggccgugaacgcccugaucaacgaccagcugaucaugaagaaccaccugagagacaucaugggcauccccuacugcaacuacagcaaguacugguaccugaaccacaccgugaccggcagaaccagccugcccagaugcuggcuggugagcaacggcagcuaccugaacgagacccacuucagcgacgacaucgagcagcaggccgacaacaugaucaccgagcugcugcagaaggaguacaucgacagacagggcaagaccccccugggccugguggaccuguucguguucagcaccagcuucuaccugaucagcaucuuccugcaccuggugaagauccccacccacagacacaucaucggcaagcccugccccaagccccacagacugaaccacaugggcaucugcagcugcggccuguacaagcaccccggcgugcccgugaaguggaagagauga

SEQ ID NO: 1405 - RNA, 1473 nt, Artificial Sequence
  derived and/or modified protein sequence (opt4) from LASV(LASV246-NIG-2010;Clade II)__AIT17658__GPC
augggccagaucaucaccuucuuccaggaggugccccacgugaucgaggaggugaugaacaucgugcugaucgcccugagccugcuggccauccugaagggcguguacaacguggccaccugcggccuguucggccuggugagcuuccugcugcugugcggcagaagcugcagcaucaccuacaagggcguguacgagcugcagacccuggagcuggacauggccaaccugaacaugaccaugccccugagcugcaccaagaacaacagccaccacuacaucauggugggcaacgagaccggccuggagcugacccugaccaacaccagcaucaucaaccacaaguucugcaaccugagcgacgcccacaagaagaaccuguacgaccacgcccugaugagcaucaucagcaccuuccaccugagcauccccaacuucaaccaguacgaggccaugagcugcgacuucaacggcggcaagaucagcgugcaguacaaccugagccacaccuacgccggcgacgccgccgaccacugcggcaccaucgccaacggcgugcugcagaccuucaugagaauggccuggggcggcagcuacaucgcccuggacagcggcaagggcagcugggacugcaucaugaccagcuaccaguaccugaucauccagaacaccaccugggaggaccacugccaguucagcagacccagccccaugggcuaccugggccugcugagccagagaaccagagacaucuacaucagcagaagacugcugggcaccuucaccuggacccugagcgacagcgagggcaacgagacccccggcggcuacugccugaccagauggaugcugaucgaggccgagcugaagugcuucggcaacaccgccguggccaagugcaacgagaagcacgacgaggaguucugcgacaugcugagacuguucgacuucaacaagcaggccaucagaagacugaagaccgaggcccagaugagcauccagcugaucaacaaggccgugaacgcccugaucaacgaccagcugaucaugaagaaccaccugagagacaucaugggcauccccuacugcaacuacagcaaguacugguaccugaaccacaccaucaccggcaagaccagccugcccagaugcuggcuggugagcaacggcagcuaccugaacgagacccacuucagcgacgacaucgagcagcaggccgacaacaugaucaccgagcugcugcagaaggaguacaucgacagacagggcaagaccccccugggccugguggaccuguucguguucagcaccagcuucuaccugaucagcaucuuccugcaccuggugaagauccccacccacagacacaucaccggcaagcccugccccaagccccacagacugaaccacaugggcaucugcagcugcggccuguacaagcaccccggcgugcccgugagauggaagagauga

SEQ ID NO: 1406 - RNA, 1473 nt, Artificial Sequence
  derived and/or modified protein sequence (opt4) from LASV(LASV251-NIG-2010;Clade II)__AIT17666__GPC
augggccagaucgugaccuucuuccaggaggugccccacgugaucgaggaggugaugaacaucgugcugaucgcccugagccugcuggccauccugaagggcaucuacaacguggccaccugcggccuguucggccuggugagcuuccugcugcugugcggcagaagcugcagcaccaccuacaagggcguguacgagcugcagacccuggagcuggacauggccagccugaacaugaccaugccccugagcugcaccaagaacaacagccaccacuacaucauggugggcaacgagaccggccuggagcugacccugaccaacaccagcaucaucaaccacaaguucugcaaccugagcgacgcccacaagaagaaccuguacgaccacgcccugaugagcaucaucagcaccuuccaccugagcauccccaacuucaaccaguacgaggccaugagcugcgacuucaacggcggcaagaucagcgugcaguacaaccugagccacaccuacgccguggacgccgccaaccacugcggcaccaucgccaacggcgugcugcagaccuucaugagaauggccuggggcggcagcuacaucgcccuggacagcggcaagggcagcugggacugcaucaugaccagcuaccaguaccugaucauccagaacaccaccugggaggaccacugccaguucagcagacccagccccaucggcuaccugggccugcugagccagagaaccagagacaucuacaucagcagaagacugcugggcaccuucaccuggacccugagcgacagcgagggcaacgagacccccggcggcuacugccugaccagauggaugcugaucgaggccgagcugaagugcuucggcaacaccgccguggccaagugcaacgagaagcacgacgaggaguucugcgacaugcugagacuguucgacuucaacaagcaggccaucagaagacugaagaccgaggcccagaugagcauccagcugaucaacaaggccgugaacgcccugaucaacgaccagcugaucaugaagaaccaccugagagacaucaugggcauccccuacugcaacuacagcaaguacugguaccugaaccacaccgugaccggcaagaccagccugcccagaugcuggcuggugagcaacggcagcuaccugaacgagacccacuucagcgacgacaucgagcagcaggccgacaacaugaucaccgagcugcugcagaaggaguacauggacagacagggcaagaccccccugggccugguggaccuguucguguucagcaccagcuucuaccugaucagcaucuuccugcaccuggugaagauccccacccacagacacaucaccggcaagcccugccccaagccccacagacugaaccacaugggcaucugcagcugcggccuguacaagcaccccggcgugcccgugaaguggaagagauga

SEQ ID NO: 1407 - RNA, 1473 nt, Artificial Sequence
  derived and/or modified protein sequence (opt4) from LASV(LASV253-NIG-2011;Clade II)__AIT17670__GPC
augggccagaucaucaccuucuuccaggaggugccccacgugaucgaggaggugaugaacaucgugcugaucgcccugagccugcuggccauccugaagggcaucuacaacguggccaccugcggccuguucggccuggugagcuuccugcugcugugcggcagaagcugcagcaccaccuacaagggcguguacgagcugcagacccuggagcuggacauggccagccugaacaugaccaugccccugagcugcaccaagaacaacagccaccacuacaucauggugggcaacgagaccggccuggagcugacccugaccaacaccagcaucaucaaccacaaguucugcaaccugagcgacgcccacaagaagaaccuguacgaccacgcccugaugagcaucaucagcaccuuccaccugagcauccccaacuucaaccaguacgaggccaugagcugcgacuucaacggcggcaagaucagcgugcaguacaaccugagccacaccuacgccguggacgccgccaaccacugcggcaccaucgccaacggcgugcugcagaccuucaugagaauggccuggggcggcagcuacaucgcccuggacagcggcaagggcagcugggacugcaucaugaccagcuaccaguaccugaucauccagaacaccaccugggaggaccacugccaguucagcagacccagccccaucggcuaccugggccugcugagccagagaaccagagacaucuacaucagcagaagacugcugggcaccuucaccuggacccugagcgacagcgagggcaacgagacccccggcggcuacugccugaccagauggaugcugaucgaggccgagcugaagugcuucggcaacaccgccguggccaagugcaacgagaagcacgacgaggaguucugcgacaugcugagacuguucgacuucaacaagcaggccaucagaagacugaaggccgaggcccagaugagcauccagcugaucaacaaggccgugaacgcccugaucaacgaccagcugaucaugaagaaccaccugagagacaucaugggcauccccuacugcaacuacagcaaguacugguaccugaaccacaccgugaccggcagaaccagccugcccagaugcuggcuggugagcaacggcagcuaccugaacgagacccacuucagcgacgacaucgagcagcaggccgacaacaugaucaccgagcugcugcagaaggaguacaucgacagacagggcaagaccccccugggccugguggaccuguucguguucagcaccagcuucuaccugaucagcaucuuccugcaccuggugaagauccccacccacagacacaucaucggcaagcccugccccaagccccacagacugaaccacaugggcaucugcagcugcggccuguacaagcaccccggcgugcccgugaaguggaagagauga

SEQ ID NO: 1408 - RNA, 1473 nt, Artificial Sequence
  derived and/or modified protein sequence (opt4) from LASV(LASV254-NIG-2011;Clade II)__AIT17674__GPC
augggccagaucaucaccuucuuccaggaggugccccacgugaucgaggaggugaugaacaucgugcugaucgcccugagccugcuggccauccugaagggcaucuacaacguggccaccugcggccuguucggccuggugagcuuccugcugcugugcggcagaagcugcagcaccaccuacaagggcguguacgagcugcagacccuggagcuggacaugaccaaccugaacaugaccaugccccugagcugcaccaagaacaacagccaccacuacaucauggugggcaacgagaccggccuggagcugacccugaccaacaccagcaucaucaaccacaaguucugcaaccugagcgacgcccacaagaagaaccuguacaaccacgcccugaugagcaucaucagcaccuuccaccugagcauccccaacuucaaccaguacgaggccaugagcugcgacuucaacggcggcaagaucagcgugcaguacaaccugagccacagcuacgccguggacgccgccaaccacugcggcaccaucgccaacggcgugcugcagaccuucaugagaauggccuggggcggcagcuacaucgcccuggacagcggcaagggcaacugggacugcaucaugaccagcuaccaguaccugaucauccagaacaccaccugggaggaccacugccaguucagcagacccagccccaucggcuaccugggccugcugagccagagaaccagagacaucuacaucagcagaagacugcugggcaccuucaccuggacccugagcgacagcgagggcaacgagacccccggcggcuacugccugaccagauggaugcugaucgaggccgagcugaagugcuucggcaacaccgccguggccaagugcaacgagaagcacgacgaggaguucugcgacaugcugagacuguucgacuucaacaagcaggccaucagaagacugaagaccgaggcccaggccaacauccagcugaucaacaaggccgugaacgcccugaucaacgaccagcugaucaugaagaaccaccugagagacaucaugggcauccccuacugcaacuacagcaaguacugguaccugaaccacaccgugaccggcaagaccagccugcccagaugcuggcuggugagcaacggcagcuaccugaacgagacccacuucagcgacgacaucgagcagcaggccgacaacaugaucaccgagcugcugcagaaggaguacauggacagacagggcaagaccccccugggccugguggaccuguucguguucagcaccagcuucuaccugaucagcaucuuccugcaccuggugaagauccccacccacagacacgugaucggcaagcccugccccaagccccacagacugaaccacaugggcaucugcagcugcggccuguacaagcaccccggcgugcccgugaaguggaagagauga

SEQ ID NO: 1409 - RNA, 1473 nt, Artificial Sequence
  derived and/or modified protein sequence (opt4) from LASV(LASV256-NIG-2010;Clade II)__AIT17678__GPC
augggccagaucaucaccuucuuccaggaggugccccacgugaucgaggaggugaugaacaucgugcugaucacccugagccugcuggccauccugaagggcaucuacaacaucgccaccugcggccuguucggccuggugagcuuccugcugcugugcggcagaagcugcagcaccaccuacaagggcguguacgagcugcagacccuggagcuggacaugaccagccugaacaugaccaugccccugagcugcaccaagaacaacagccaccacuacaucauggugggcaacgagaccggccuggagcugacccugaccaacaccagcaucaucaaccacaaguucugcaaccugagcgacgcccacaagaagaaccuguacgaccacgcccugaugagcaucaucagcaccuuccaccugagcauccccaacuucaaccaguacgaggccaugagcugcgacuucaacggcggcaagaucagcgugcaguacaaccugagccacaccuacgccguggacgccgccaaccacugcggcaccaucgccaacggcgugcugcagaccuucaugagaauggccuggggcggcagcuacaucgcccuggacagcggcaagggcagcugggacugcaucaugaccagcuaccaguaccugaucauccagaacaccaccugggaggaccacugccaguucagcagacccagccccaucggcuaccugggccugcugagccagagaaccagagacaucuacaucagcagaagacugcugggcaccuucaccuggacccugagcgacagcgagggcaacgagacccccggcggcuacugccugaccagauggaugcugaucgaggccgagcugaagugcuucggcaacaccgccguggccaagugcaacgagaagcacgacgaggaguucugcgacaugcugagacuguucgacuucaacaagcaggccaucagaagacugaagaccgaggcccagaugagcauccagcugaucaacaaggccgugaacgcccugaucaacgaccagcugaucaugaagaaccaccugagagacaucaugggcauccccuacugcaacuacagcaaguacugguaccugaaccacaccgugaccggcaagaccagccugcccagaugcuggcuggugagcaacggcagcuaccugaacgagacccacuucagcgacgacaucgagcagcaggccgacaacaugaucaccgagcugcugcagaaggaguacaucgacagacagggcaagaccccccugggccugguggaccuguucguguucagcaccagcuucuaccugaucagcaucuuccugcaccuggugaagauccccacccacagacacaucaucggcaagcccugccccaagccccacagacugaaccacaugggcaucugcagcugcggccuguacaagcaccccggcauccccgugaaguggaagagauga

SEQ ID NO: 1410 - RNA, 1473 nt, Artificial Sequence
  derived and/or modified protein sequence (opt4) from LASV(LASV267-NIG-2010;Clade II)__AIT17686__GPC
augggccagaucaucaccuucuuccaggaggugccccacgugaucgaggaggugaugaacaucgugcugaucgcccugagccugcuggccauccugaagggcaucuacaacguggccaccugcggccuguucggccuggugagcuuccugcugcugugcggcagaagcugcagcaccaccuacaagggcguguacgagcugcagacccuggagcuggacauggccagccugaacaugaccaugccccugagcugcaccaagaacaacagccaccacuacaucauggugggcaacgagaccggccuggagcugacccugaccaacaccagcaucaucaaccacaaguucugcaaccugagcgacgcccacaagaagaaccuguacgaccacgcccugaugagcaucaucagcaccuuccaccugagcauccccaacuucaaccaguacgaggccaugagcugcgacuucaacggcggcaagaucagcgugcaguacaaccugagccacaccuacgccguggacgccgccaaccacugcggcaccaucgccaacggcgugcugcagaccuucaugagaauggccuggggcggcagcuacaucgcccuggacagcagaaagggcagcugggacugcaucaugaccagcuaccaguaccugaucauccagaacaccaccugggaggaccacugccaguucagcagacccagccccaucggcuaccugggccugcugagccagagaaccagagacaucuacaucagcagaagacugcugggcaccuucaccuggacccugagcgacagcgagggcaacgagacccccggcggcuacugccugaccagauggaugcugaucgaggccgagcugaagugcuucggcaacaccgccguggccaagugcaacgagaagcacgacgaggaguucugcgacaugcugagacuguucgacuucaacaagcaggccaucagaagacugaagaccgaggcccagaugagcauccagcugaucaacaaggccgugaacgcccugaucaacgaccagcugaucaugaagaaccaccugagagacaucaugggcauccccuacugcaacuacagcaaguacugguaccugaaccacaccgugaccggcaagaccagccugcccagaugcuggcuggugagcaacggcagcuaccugaacgagacccacuucagcgacgacaucgagcagcaggccgacaacaugaucaccgagcugcugcagaaggaguacauggacagacagggcaagaccccccugggccugguggaccuguucguguucagcaccagcuucuaccugaucagcaucuuccugcaccugaucaagauccccacccacagacacgugaucggcaagcccugccccaagccccacagacugaaccacaugggcaucugcagcugcggccuguacaagcaccccggcgugcccgugaaguggaagagauga

SEQ ID NO: 1411 - RNA, 1473 nt, Artificial Sequence
  derived and/or modified protein sequence (opt4) from LASV(LASV271-NIG-2010;Clade II)__AIT17690__GPC
augggccagaucaucaccuucuuccaggaggugccccacgugaucgaggaggugaugaacaucgugcugaucgcccugagccugcuggccauccugaagggcaucuacaacguggccaccugcggccuguucggccuggugagcuuccugcugcugugcggcagaagcugcagcaccaccuacaagggcguguacgagcugcagacccuggagcuggacauggccagccugaacaugaccaugccccugagcugcaccaagaacaacagccaccacuacaucauggugggcaacgagaccggccuggagcugacccugaccaacaccagcaucaucaaccacaaguucugcaaccugagcgacgcccacaagaagaaccuguacgaccacgcccugaugagcaucaucagcaccuuccaccugagcauccccaacuucaaccaguacgaggccaugagcugcgacuucaacggcggcaagaucagcgugcaguacaaccugagccacgccuacgccguggacgccgccagccacugcggcaccguggccaacggcgugcugcagaccuucaugagaauggccuggggcggcagcuacaucgcccuggacagcggcaagggcagcugggacugcaucaugaccagcuaccaguaccugaucauccagaacaccaccugggaggaccacugccaguucagcagacccagccccaucggcuaccugggccugcugagccagagaaccagagacaucuacaucagcagaagacugcugggcaccuucaccuggacccugagcgacagcgagggcaacgagacccccggcggcuacugccugaccagauggaugcugaucgaggccgagcugaagugcuucggcaacaccgccguggccaagugcaacgagaagcacgacgaggaguucugcgacaugcugagacuguucgacuucaacaagcaggccaucagaagacugaagaccgaggcccagaugagcauccagcugaucaacaaggccgugaacgcccugaucaacgaccagcugaucaugaagaaccaccugagagacaucaugggcauccccuacugcaacuacagcaaguacugguaccugaaccacaccgugaccggcagaaccagccugcccagaugcuggcuggugagcaacggcagcuaccugaacgagacccacuucagcgacgacaucgagcagcaggccgacaacaugaucaccgagcugcugcagaaggaguacauggacagacagggcaagaccccccugggccugguggaccuguucguguucagcaccagcuucuaccugaucagcaucuuccugcaccuggugaagauccccacccacagacacgugaucggcaagcccugccccaagccccacagacugaaccacaugggcaucugcagcugcggccuguacaagcaccccggcgugcccgugaaguggaagagauga

SEQ ID NO: 1412 - RNA, 1473 nt, Artificial Sequence
  derived and/or modified protein sequence (opt4) from LASV(LASV274-NIG-2010;Clade II)__AIT17694__GPC
augggccagaucaucaccuucuuccaggaggugccccacgugaucgaggaggugaugaacaucgugcugaucgcccugagccugcuggccauccugaagggcaucuacaacguggccaccugcggccuguucggccuggugagcuuccugcugcugugcggcagaagcugcagcaccaucuacaagggcguguacgagcugcagacccuggagcuggacauggccagccugaacaugaccaugccccugagcugcaccaagaacaacagccaccacuacaucauggugggcaacgagaccggccuggagcugacccugaccaacaccagcaucaucaaccacaaguucugcaaccugagcgacgcccacaagaagaaccuguacgaccacgcccugaugagcaucaucagcaccuuccaccugagcauccccaacuucaaccaguacgaggccaugagcugcgacuucaacggcggcaagaucagcgugcaguacaaccugagccacaccuacgccguggacgccgccaaccacugcggcaccaucgccaacggcgugcugcagaccuucaugagaauggccuggggcggcagcuacaucgcccuggacagcggcaagggcagcugggacugcaucaugaccagcuaccaguaccugaucauccagaacaccaccugggaggaccacugccaguucagcagacccagccccaucggcuaccugggccugcugagccagagaaccagagacaucuacaucagcagaagacugcugggcaccuucaccuggacccugagcgacagcgagggcaacgagacccccggcggcuacugccugaccagauggaugcugaucgaggccgagcugaagugcuucggcaacaccgccguggccaagugcaacgagaagcacgacgaggaguucugcgacaugcugagacuguucgacuucaacaagcaggccaucagaagacugaagaccgaggcccagaugagcauccagcugaucaacaaggccgugaacgcccugaucaacgaccagcugaucaugaagaaccaccugagagacaucaugggcauccccuacugcaacuacagcaaguacugguaccugaaccacaccgugaccggcaagaccagccugcccagaugcuggcuggugagcaacggcagcuaccugaacgagacccacuucagcgacgacaucgagcagcaggccgacaacaugaucaccgagcugcugcagaaggaguacaucgacagacagggcaagaccccccugggccugguggaccuguucguguucagcaccagcuucuaccugaucagcaucuuccugcaccuggugaagauccccacccacagacacguggugggcaagcccugccccaagccccacagacugaaccacaugggcaucugcagcugcggccuguacaagcaccccggcgugcccgugaaguggaagagauga

SEQ ID NO: 1413 - RNA, 1473 nt, Artificial Sequence
  derived and/or modified protein sequence (opt4) from LASV(LASV719-NIG-2009;Clade II)__AIT17704__GPC
augggccagaucaucaccuucuuccaggaggugccccacgugaucgaggaggugaugaacaucgugcugaucgcccugagccugcuggccauccugaagggcaucuacaacguggccaccugcggccuguucggccuggugagcuuccugcugcugugcggcagaagcugcagcaccaccuacaagggcguguacgagcugcagacccuggagcuggacauggccagccugaacaugaccaugccccugagcugcaccaagaacaacagccaccacuacaucauggugggcaacgagaccggccuggagcugacccugaccaacaccagcaucaucaaccacaaguucugcaaccugagcgacgcccacaagaagaaccuguacgaccacgcccugaugagcaucaucagcaccuuccaccugagcauccccaacuucaaccaguacgaggccaugagcugcgacuucaacggcggcaagaucagcgugcaguacaaccugagccacaccuacgccguggacgccgccaaccacugcggcaccaucgccaacggcgugcugcagaccuucaugagaauggccuggggcggcagcuacaucgcccuggacagcggcaagggcagcugggacugcaucaugaccagcuaccaguaccugaucauccagaacaccaccugggaggaccacugccaguucagcagacccagccccaucggcuaccugggccugcugagccagagaaccagagacaucuacaucagcagaagacugcugggcaccuucaccuggacccugagcgacagcgagggcaacgagacccccggcggcuacugccugaccagauggaugcugaucgaggccgagcugaagugcuucggcaacaccgccguggccaagugcaacgagaagcacgacgaggaguucugcgacaugcugagacuguucgacuucaacaagcaggccaucagaagacugaagaccgaggcccagaugagcauccagcugaucaacaaggccgugaacgcccugaucaacgaccagcugaucaugaagaaccaccugagagacaucaugggcauccccuacugcaacuacagcaaguacugguaccugaaccacaccgugaccggcaagaccagccugcccagaugcuggcuggugagcaacggcagcuaccugaacgagacccacuucagcgacgacaucgagcagcaggccgacaacaugaucaccgagcugcugcagaaggaguacaucgacagacagggcaagaccccccugggccugguggaccuguucguguucagcaccagcuucuaccugaucagcaucuuccugcaccuggugaagauccccacccacagacacgugaucggcaagcccugccccaagccccacagacugaaccacaugggcaucugcagcugcggccuguacaagcaccccggcgugcccgugaaguggaagagauga

SEQ ID NO: 1414 - RNA, 1473 nt, Artificial Sequence
  derived and/or modified protein sequence (opt4) from LASV(LASV738-NIG-2009;Clade II)__AIT17712__GPC
augggccagaucaucaccuucuuccaggaggugccccacgugaucgaggaggugaugaacaucgugcugaucgcccugagccugcuggccauccugaagggcaucuacaacguggccaccugcggccuguucggccuggugagcuuccugcugcugugcggcagaagcugcagcaccaccuacaagggcguguacgagcugcagacccuggagcuggacauggccagccugaacaugaccaugccccugagcugcaccaagaacaacagccaccacuacaucauggugggcaacgagaccggccuggagcugacccugaccaacaccagcaucaucaaccacaaguucugcaaccugagcgacgcccacaagaagaaccuguacgaccacgcccugaugagcaucaucagcaccuuccaccugagcauccccaacuucaaccaguacgaggccaugagcugcgacuucaacggcggcaagaucagcgugcaguacaaccugagccacaccuacgccguggacgccgccaaccacugcggcaccaucgccaacggcgugcugcagaccuucaugagaauggccuggggcggcagcuacaucgcccuggacagcggcaagggcgccugggacugcaucaugaccagcuaccaguaccugaucauccagaacaccaccugggaggaccacugccaguucagcagacccagccccaucggcuaccugggccugcugagccagagaaccagagacaucuacaucagcagaagacugcugggcaccuucaccuggacccugagcgacagcgagggcaacgagacccccggcggcuacugccugaccagauggaugcugaucgaggccgagcugaagugcuucggcaacaccgccguggccaagugcaacgagaagcacgacgaggaguucugcgacaugcugagacuguucgacuucaacaagcaggccaucaugagacugaagaccgaggcccagaugagcauccagcugaucaacaaggccgugaacgcccugaucaacgaccagcugaucaugaagaaccaccugagagacaucaugggcauccccuacugcaacuacagcaaguacugguaccugaaccacaccgugaccggcaagaccagccugcccagaugcuggcuggugagcaacggcagcuaccugaacgagacccacuucagcgacgacaucgagcagcaggccgacaacaugaucaccgagaugcugcagaaggaguacaucgacagacagggcaagaccccccugggccugguggaccuguucguguucagcaccagcuucuaccugaucagcaucuuccugcaccuggugaagauccccacccacagacacgugaucggcaagcccugccccaagccccacagacugaaccacaugggcaucugcagcugcggccuguacaagcaccccggcgugcccgugagauggaagagauga

SEQ ID NO: 1415 - RNA, 1473 nt, Artificial Sequence
  derived and/or modified protein sequence (opt4) from LASV(LASV966-NIG-2009;Clade II)__AIT17718__GPC
augggccagaucaucaccuucuuccaggaggugccccacgugaucgaggaggugaugaacaucgugcugaucgcccugagccugcuggccauccugaagggcaucuacaacguggccaccugcggccuguucggccuggugagcuuccugcugcugugcggcagaagcugcagcaccaccuacaagggcguguacgagcugcagacccuggagcuggacauggccagccugaacaugaccaugccccugagcugcaccaagaacaacagccaccacuacaucagagugggcaacgagaccggccuggagcugacccugaccaacgccagcaucaucaaccacaaguucugcaaccugagcgacgcccacaagaagaaccuguacgaccacgcccugaugagcaucaucagcaccuuccaccugagcauccccaacuucaaccaguacgaggccaugagcugcgacuucaacggcggcaagaucagcgugcaguacaaccugagccacgccuacgccaucgacgccgccaaccacugcggcaccguggccaacggcgugcugcagaccuucaugagaauggccuggggcggcagcuacaucgcccuggacagcggcagaggcaacugggacugcaucaugaccagcuaccaguaccugaucauccagaacaccaccugggaggaccacugccaguucagcagacccagccccaucggcuaccugggccugcugagccagagaaccagagacaucuacaucagcagaagacugcugggcaccuucaccuggacccugagcgacagcgagggcaacgagacccccggcggcuacugccugaccagauggaugcugaucgaggccgagcugaagugcuucggcaacaccgccguggccaagugcaacgagaagcacgacgaggaguucugcgacaugcugagacuguucgacuucaacaagcaggccaucagaagacugaagaccgaggcccagaugagcauccagcugaucaacaaggccgugaacgcccugaucaacgaccagcugaucaugaagaaccaccugagagacaucaugggcauccccuacugcaacuacagcaaguacugguaccugaaccacaccgugaccggcaagaccagccugcccagaugcuggcuggugagcaacggcagcuaccugaacgagacccacuucagcgacgacaucgagcagcaggccgacaacaugaucaccgagcugcugcagaaggaguacauggacagacagggcaagaccccccugggccugguggaccuguucguguucagcaccagcuucuaccugaucagcaucuuccugcaccuggugaagauccccacccacagacacgugaucggcaagcccugccccaagccccacagacugaaccacaugggcaucugcagcugcggcuucuacaagcaccccggcgugcccgugaaguggaagagauga

SEQ ID NO: 1416 - RNA, 1473 nt, Artificial Sequence
  derived and/or modified protein sequence (opt4) from LASV(LASV969-NIG-2009;Clade II)__AIT17724__GPC
augggccagaucaucaccuucuuccaggaggugccccacgugaucgaggaggugaugaacaucgugcugaucgcccugagccugcuggccauccugaagggcaucuacaacguggccaccugcggccuguucggccuggugagcuuccugcugcugugcggcagaagcugcagcaccaccuacaagggcguguacgagcugcagacccuggagcuggacauggccaaccugaacaugaccaugccccugagcugcaccaagaacaacagccaccacuacaucauggugggcaacgagaccggccuggagcugacccugaccaacaccagcaucaucaaccacaaguucugcaaccugagcgacgcccacaagaagaaccuguacgaccacgcccugaugagcaucaucagcaccuuccaccugagcauccccaacuucaaccaguacgaggccaugagcugcgacuucaacggcggcaagaucagcgugcaguacaaccugagccacaccuacgccguggacgccgccaaccacugcggcaccguggccaacggcgugcugcagaccuucaugagaauggccuggggcggcagcuacaucgcccuggacagcggcaagggcagcugggacugcaucaugaccagcuaccaguaccugaucauccagaacaccaccugggaggaccacugccaguucagcagacccagccccaucggcuaccugggccugcugagccagagaaccagagacaucuacaucagcagaagacugcugggcaccuucaccuggacccugagcgacagcgagggcaacgagacccccggcggcuacugccugaccagauggaugcugaucgaggccgagcugaagugcuucggcaacaccgccguggccaagugcaacgagaagcacgacgaggaguucugcgacaugcugagacuguucgacuucaacaagcaggccaucagaagacugaagaccgaggcccagaugagcauccagcugaucaacaaggccgugaacgcccugaucaacgaccagcugaucaugaagaaccaccugagagacaucaugggcauccccuacugcaacuacagcaaguacugguaccugaaccacaccgugaccggcaagaccagccugcccagaugcuggcuggugagcaacggcagcuaccugaacgagacccacuucagcgacgacaucgagcagcaggccgacaacaugaucaccgagcugcugcagaaggaguacauggacagacagggcaagaccccccugggccugguggaccuguucguguucagcaccagcuucuaccugaucagcaucuuccugcaccuggugaagauccccacccacagacacaucaugggcaagcccugccccaagccccacagacugaaccacaugggcaucugcagcugcggccuguacaagcaccccggcgugcccgugaaguggaagagauga

SEQ ID NO: 1417 - RNA, 1473 nt, Artificial Sequence
  derived and/or modified protein sequence (opt4) from LASV(LASV971-NIG-2009;Clade II)__AIT17728__GPC
augggccagaucaucaccuucuuccaggaggugccccacgugaucgaggaggugaugaacaucgugcugaucgcccugagccugcuggccauccugaagggcaucuacaacguggccaccugcggccuguucggccuggugagcuuccugcugcugugcggcagaagcugcagcaccaccuacaagggcguguacgagcugcagacccuggagcuggacaugggcagccugaacaugaccaugccccugagcugcaccaagaacaacagccaccacuacaucauggugggcaacgagaccggccuggagcugacccugaccaacaccagcaucaucaaccacaaguucugcaaccugagcgacgcccacaagaagaaccuguacgaccacgcccugaugagcaucaucagcaccuuccaccugagcauccccaacuucaaccaguacgaggccaugagcugcgacuucaacggcggcaagaucagcgugcaguacaaccugagccacaccuacgccguggacgccgccaaccacugcggcaccaucgccaacggcgugcugcagaccuucaugagaauggccuggggcggcagcuacaucgcccuggacagcggcaagggcagcugggacugcaucaugaccagcuaccaguaccugaucauccagaacaccaccugggaggaccacugccaguucagcagacccagccccaucggcuaccugggccugcugagccagagaaccagagacaucuacaucagcagaagacugcugggcaccuucaccuggacccugagcgacagcgagggcaacgagacccccggcggcuacugccugaccagauggaugcugaucgaggccgagcugaagugcuucggcaacaccgccguggccaagugcaacgagaagcacgacgaggaguucugcgacaugcugagacuguucgacuucaacaagcaggccaucagaagacugaagaccgaggcccagaugagcauccagcugaucaacaaggccgugaacgcccugaucaacgaccagcugaucaugaagaaccaccugagagacaucaugggcauccccuacugcaacuacagcaaguacugguaccugaaccacaccgugaccggcaagaccagccugcccagaugcuggcuggugagcaacggcagcuaccugaacgagacccacuucagcgacgacaucgagcagcaggccgacaacaugaucaccgagcugcugcagaaggaguacauggacagacagggcaagaccccccugggccugguggaccuguucguguucagcaccagcuucuaccugaucagcaucuuccugcaccuggugaagauccccacccacagacacgugaucggcaagcccugccccaagccccacagacugaaccacaugggcaucugcagcugcggccuguacaagcaccccggcgugcccgugaaguggaagagauga

SEQ ID NO: 1418 - RNA, 1473 nt, Artificial Sequence
  derived and/or modified protein sequence (opt4) from LASV(LASV975-NIG-2009;Clade II)__AIT17732__GPC
augggccagaucaucaccuucuuccaggaggugccccacgugaucgaggaggugaugaacaucgugcugaucgcccugagccugcuggccauccugaagggcaucuacaacguggccaccugcggccuguucggccuggugagcuuccugcugcugugcggcagaagcugcagcaccaccuacaagggcguguacgagcugcagacccuggagcuggacauggccagccugaacaugaccaugccccugagcugcaccaagaacaacagccaccacuacaucauggugggcaacgagaccggccuggagcugacccugaccaacaccagcaucaucaaccacaaguucugcaaccugagcgacgcccacaagaagaaccuguacgaccacgcccugaugagcaucaucagcaccuuccaccugagcauccccaacuucaaccaguacgaggccaugagcugcgacuucaacggcggcaagaucagcgugcaguacaaccugagccacaccuacgccguggacgccgccaaccacugcggcaccaucgccaacggcgugcugcagaccuucaugagaauggccuggggcggcagcuacaucgcccuggacagcggcaagggcagcugggacugcaucaugaccagcuaccaguaccugaucauccagaacaccaccugggaggaccacugccaguucagcagacccagccccaucggcuaccugggccugcugagccagagaaccagagacaucuacaucagcagaagacugcugggcaccuucaccuggacccugagcgacagcgagggcaacgagacccccggcggcuacugccugaccagauggaugcugaucgaggccgagcugaagugcuucggcaacaccgccguggccaagugcaacgagaagcacgacgaggaguucugcgacaugcugagacuguucgacuucaacaagcaggccaucagaagacugaagaccgaggcccagaugagcauccagcugaucaacaaggccgugaacgcccugaucaacgaccagcugaucaugaagaaccaccugagagacaucaugggcauccccuacugcaacuacagcaaguacugguaccugaaccacaccgugaccggcaagaccagccugcccagaugcuggcuggugagcaacggcagcuaccugaacgagacccacuucagcgacgacaucgagcagcaggccgacaacaugaucaccgagcugcugcagaaggaguacaucgacagacagggcaagaccccccugggccugguggaccuguucguguucagcaccagcuucuaccugaucagcaucuuccugcaccuggugaagauccccacccacagacacaucgugggcaagcccugccccaagccccacagacugaaccacaugggcaucugcagcugcggccuguacaagcaccccggcgugcccgugaaguggaagagauga

SEQ ID NO: 1419 - RNA, 1473 nt, Artificial Sequence
  derived and/or modified protein sequence (opt4) from LASV(LASV976-NIG-2009;Clade II)__AIT17736__GPC
augggccagaucgugaccuucuuccaggaggugccccacgugaucgaggaggugaugaacaucgugcugaucgcccugagccugcuggccauccugaagggcaucuacaacguggccaccugcggccuguucggccuggugagcuuccugcugcugugcggcagaagcugcagcaccaccuacaagggcguguacgagcugcagacccuggagcuggacauggccagccugaacaugaccaugccccugagcugcaccaagaacaacagccaccacuacaucauggugggcaacgagaccggccuggagcugacccugaccaacaccagcaucaucaaccacaaguucugcaaccugagcgacgcccacaagaaggaccuguacgaccacgcccugaugagcaucaucagcaccuuccaccugagcauccccaacuucaaccaguacgaggccaugagcugcgacuucaacggcggcaagaucagcgugcaguacaaccugagccacaccuacgccguggacgccgccaaccacugcggcaccaucgccaacggcgugcugcagaccuucaugagaauggccuggggcggcagcuacaucgcccuggacagcggcaagggcagcugggacugcaucaugaccagcuaccaguaccugaucauccagaacaccaccugggaggaccacugccaguucagcagacccagccccaucggcuaccugggccugcugagccagagaaccagagacaucuacaucagcagaagacugcugggcaccuucaccuggacccugagcgacagcgagggcaacgagacccccggcggcuacugccugaccagauggaugcugaucgaggccgagcugaagugcuucggcaacaccgccguggccaagugcaacgagaagcacgacgaggaguucugcgacaugcugagacuguucgacuucaacaagcaggccaucaugagacugaagaccgaggcccagaugagcauccagcugaucaacaaggccgugaacgcccugaucaacgaccagcugaucaugaagaaccaccugagagacaucaugggcauccccuacugcaacuacagcaaguacugguaccugaaccacaccgugaccggcaagaccagccugcccagaugcuggcuggugagcaacggcagcuaccugaacgagaccagauucagcgacgacaucgagcagcaggccgacaacaugaucaccgagaugcugcagaaggaguaccuggacagacagggcaagaccccccugggccugguggaccuguucguguucagcaccagcuucuaccugaucagcaucuuccugcaccuggugaagauccccacccacagacacaucaucggcaagcccugccccaagccccacagacugaaccacaugggcaucugcagcugcggccuguacaagcaccccggcgugcccgugaaguggaagagauga

SEQ ID NO: 1420 - RNA, 1473 nt, Artificial Sequence
  derived and/or modified protein sequence (opt4) from LASV(LASV978-NIG-2009;Clade II)__AIT17744__GPC
augggccagaucaucaccuucuuccaggaggugccccacgugaucgaggaggugaugaacaucgugcugaucgcccugagccugcuggccauccugaagggcaucuacaacguggccaccugcggccuguucggccugaugagcuuccugcugcugugcggcagaagcugcagcaccaccuacaagggcguguacgagcugcagacccuggagcuggacauggccaaccugaacaugaccaugccccugagcugcaccaagaacaacagccaccacuacaucauggugggcaacgagaccggccuggagcugacccugaccaacaccagcaucaucaaccacaaguucugcaaccugagcgacgcccacaagaagaaccuguacgaccacgcccugaugagcaucaucagcaccuuccaccugagcauccccaacuucaaccaguacgaggccaugagcugcgacuucaacggcggcaagaucagcgugcaguacaaccugagccacgccuacgccguggacgccgccaaccacugcggcaccaucgccaacggcgugcugcagaccuucaugagaauggccuggggcggcagcuacaucgcccuggacagcggcaagggcagcugggacugcaucaugaccagcuaccaguaccugaucauccagaacaccagcugggaggaccacugccaguucagcagacccagccccaucggcuaccugggccugcugagccagagaaccagagacaucuacaucagcagaagacugcugggcaccuucaccuggacccugagcgacagcgagggcaacgagacccccggcggcuacugccugaccagauggaugcugaucgaggccgagcugaagugcuucggcaacaccgccguggccaagugcaacgagaagcacgacgaggaguucugcgacaugcugagacuguucgacuucaacaagcaggccaucagaagacugaagaccgaggcccagaugagcauccagcugaucaacaaggccgugaacgcccugaucaacgaccagcugaucaugaagaaccaccugagagacaucaugggcauccccuacugcaacuacagcaaguacugguaccugaaccacaccgugaccggcaagaccagccugcccagaugcuggcuggugagcaacggcagcuaccugaacgagacccacuucagcgacgacaucgagcagcaggccgacaacaugaucaccgagcugcugcagaaggaguacaucgacagacagggcaagaccccccugggccugguggaccuguucguguucagcaccagcuucuaccugaucagcaucuuccugcaccuggugaagauccccacccacagacacgugaucggcaagcccugccccaagccccacagacugaaccacaugggcaucugcagcugcggccuguacaagcaccccggcgugcccgugaaguggaagagauga

SEQ ID NO: 1421 - RNA, 1473 nt, Artificial Sequence
  derived and/or modified protein sequence (opt4) from LASV(LASV981-NIG-2009;Clade II)__AIT17752__GPC
augggccagaucaucaccuucuuccacgaggugccccacgugaucgaggaggugaugaacaucgugcugaucgcccugagccugcuggccauccugaagggcaucuacaacguggccaccugcggccuguucggccuggugagcuuccugcugcugugcggcagaagcugcagcaccaccuacaagggcguguacgagcugcagacccuggagcuggacauggccagccugaacaugaccaugccccugagcugcaccaagaacaacagccaccacuacaucauggugggcaacgagaccggccuggagcugacccugaccaacaccagcaucaucaaccacaaguucugcaaccugagcgacgcccacaagaagaaccuguacgaccacgcccugaugagcaucaucagcaccuuccaccugagcauccccaacuucaaccaguacgaggccaugagcugcgacuucaacggcggcaagaucagcgugcaguacaaccugagccacaccuacgccaucgacgccgccaaccacugcggcaccaucgccaacggcgugcugcagaccuucaugagaauggccuggggcggcagcuacaucgcccuggacagcggcagaggcagcugggacugcaucaugaccagcuaccaguaccugaucauccagaacaccaccugggaggaccacugccaguucagcagacccagccccaucggcuaccugggccugcugagccagagaaccagagacaucuacaucagcagaagacugcugggcaccuucaccuggacccugagcgacagcgagggcaacgagacccccggcggcuacugccugaccagauggaugcugaucgaggccgagcugaagugcuucggcaacaccgccguggccaagugcaacgagaagcacgacgaggaguucugcgacaugcugagacuguucgacuucaacaagcaggccaucagaagacugaagaccgaggcccagaugagcauccagcugaucaacaaggccgugaacgcccugaucaacgaccagcugaucaugaagaaccaccugagagacaucaugggcauccccuacugcaacuacagcaaguacugguaccugaaccacaccgugaccggcaagaccagccugcccagaugcuggcuggugagcaacggcagcuaccugaacgagacccacuucagcgacgacaucgagcagcaggccgacaacaugaucaccgagcugcugcagaaggaguacaucgacagacagggcaagaccccccugggccugguggaccuguucguguucagcaccagcuucuaccugaucagcaucuuccugcaccuggugaagauccccacccacagacacgugaucggcaagcccugccccaagccccacagacugaaccacaugggcaucugcagcugcggccuguacaagcaccccggcgugcccgugaaguggaagagauga

SEQ ID NO: 1422 - RNA, 1473 nt, Artificial Sequence
  derived and/or modified protein sequence (opt4) from LASV(LASV982-NIG-2009;Clade II)__AIT17756__GPC
augggccagaucaucaccuucuuccaggaggugccccacgugaucgaggaggugaugaacaucgugcugaucgcccugagccugcuggccauccugaagggcaucuacaacguggccaccugcggccuguucggccuggugagcuuccugcugcugugcggcagaagcugcagcaucaccuacaagggcguguacgagcugcagacccuggagcuggacauggccagccugaacaugaccaugccccugagcugcaccaagaacaacagccaccacuacaucauggugggcaacgagaccggccuggagcugacccugaccaacaccagcaucaucaaccacaaguucugcaaccugagcgacgcccacaagaagaaccuguacgaccacgcccugaugagcaucaucagcaccuuccaccugagcauccccaacuucaaccaguacgaggccaugagcugcgacuucaacggcggcaagaucagcgugcaguacaaccugagccacaccuacgccguggacgccgccaaccacugcggcaccaucgccaacggcgugcugcagaccuucaugagaauggccuggggcggcagcuacaucgcccuggacagcggcagaggcagcugggacugcaucaugaccagcuaccaguaccugaucauccagaacaccaccugggaggaccacugccaguucagcagacccagccccaucggcuaccugggccugcugagccagagaaccagagacaucuacaucagcagaagacugcugggcaccuucaccuggacccugagcgacagcgagggcaacgagacccccggcggcuacugccugaccagauggaugcugaucgaggccgagcugaagugcuucggcaacaccgccguggccaagugcaacgagaagcacgacgaggaguucugcgacaugcugagacuguucgacuucaacaagcaggccaucagaagacugaaggccgaggcccagaugagcauccagcugaucaacaaggccgugaacgcccugaucaacgaccagcugaucaugaagaaccaccugagagacaucaugggcauccccuacugcaacuacagcaaguacugguaccugaaccacaccgugaccggcagaaccagccugcccagaugcuggcuggugagcaacggcagcuaccugaacgagacccacuucagcgacgacaucgagcagcaggccgacaacaugaucaccgagcugcugcagaaggaguacaucgacagacagggcaagaccccccugggccugguggaccuguucguguucagcaccagcuucuaccugaucagcaucuuccugcaccuggugaagauccccacccacagacacaucaucggcaagcccugccccaagccccacagacugaaccacaugggcaucugcagcugcggccuguacaagcaccccggcgugcccgugaaguggaagagauga

SEQ ID NO: 1423 - RNA, 1473 nt, Artificial Sequence
  derived and/or modified protein sequence (opt4) from LASV(LASV988-NIG-2009;Clade II)__AIT17758__GPC
augggccagaucaucaccuucuuccaggaggugccccacgugaucgaggaggugaugaacaucgugcugaucgcccugagccugcuggccauccugaagggcaucuacaacguggccaccugcggccuguucggccuggugagcuuccugcugcugugcggcagaagcugcagcaccaccuacaagggcguguacgagcugcagacccuggagcugaacauggccagccugaacaugaccaugccccugagcugcaccaagaacaacagccaccacuacaucauggugggcaacgagaccggccuggagcugacccugaccaacaccagcaucaucaaccacaaguucugcaaccugagcgacgcccacaagagaaaccuguacgaccacgcccugaugagcaucaucagcaccuuccaccugagcauccccaacuucaaccaguacgaggccaugagcugcgacuucaacggcggcaagaucagcgugcaguacaaccugagccacaccuacgccguggacgccgccaagcacugcggcaccaucgccaacggcgugcugcagaccuucaugagaauggccuggggcggcagcuacaucgcccuggacagcggcaagggcagcugggacugcaucaugaccagcuaccaguaccugaucauccagaacaccaccugggaggaccacugcgaguucagcagacccagccccaucggcuaccugggccugcugagccagagaaccagagacaucuacaucagcagaagacugcugggcaccuucaccuggacccugagcgacagcgagggcaacgagacccccggcggcuacugccugaccagauggaugcugaucgaggccgagcugaagugcuucggcaacaccgccguggccaagugcaacgagaagcacgacgaggaguucugcgacaugcugagacuguucgacuucaacaagcaggccaucagaagacugaaggccgaggcccagaugagcauccagcugaucaacaaggccgugaacgcccugaucaacgaccagcugaucaugaagaaccaccugagagacaucaugggcauccccuacugcaacuacagcaaguacugguaccugaaccacaccgugaccggcaagaccagccugcccagaugcuggcuggugagcaacggcagcuaccugaacgagacccacuucagcgacgacaucgagcagcaggccgacaacaugaucaccgagcugcugcagaaggaguacaucgacagacagggcaagaccccccugggccugguggaccuguucguguucagcaccagcuucuaccugaucagcaucuuccugcaccuggugaagauccccacccacagacacgugaucggcaagcccugccccaagccccacagacugaaccacaugggcaucugcagcugcggccuguacaagcaccccggcgugcccgugaaguggaagagauga

SEQ ID NO: 1424 - RNA, 1473 nt, Artificial Sequence
  derived and/or modified protein sequence (opt4) from LASV(LASV989-NIG-2009;Clade II)__AIT17762__GPC
augggccagaucaucaccuucuuccaggaggugccccacgugaucgaggaggugaugaacaucgugcugaucgcccugagccugcuggccauccugaagggcaucuacaacguggccaccugcggccuguucggccuggugagcuuccugcugcugugcggcagaagcugcagcaccaccuacaagggcguguacgagcugcagacccuggagcuggacauggccagccugaacaugaccaugccccugagcugcaccaagaacaacagccaccacuacaucauggugggcaacgagaccggccuggagcugacccugaccaacaccagcaucaucagccacaaguucugcaaccugagcgacgcccacaagaagaaccuguacgaccacgcccugaugagcaucaucagcaccuuccaccugagcauccccaacuucaaccaguacgaggccaugagcugcgacuucaacggcggcaagaucagcgugcaguacaaccugagccacaccuacgccguggacgccgccaaccacugcggcaccaucgccaacggcgugcugcagaccuucaugagaauggccuggggcggcagcuacaucgcccuggacagcggcaagggcagcugggacugcaucaugaccagcuaccaguaccugaucauccagaacaccaccugggaggaccacugccaguucagcagacccagccccaucggcuaccugggccugcugagccagagaaccagagacaucuacaucagcagaagacugcugggcaccuucaccuggacccugagcgacagcgagggcaacgaggcccccggcggcuacugccugaccagauggaugcugaucgaggccgagcugaagugcuucggcaacaccgccguggccaagugcaacgagaagcacgacgaggaguucugcgacaugcugagacuguucgacuucaacaagcaggccaucagaagacugaagaccgaggcccagaugagcauccagcugaucaacaaggccgugaacgcccugaucaacgaccagcugaucaugaagaaccaccugagagacaucaugggcauccccuacugcaacuacagcagauacugguaccugaaccacaccgugaccggcaagaccagccugcccagaugcuggcuggugagcaacggcagcuaccugaacgagacccacuucagcgacgacaucgagcagcaggccgacaacaugaucaccgagcugcugcagaaggaguacauggacagacagggcaagaccccccugggccugguggaccuguucguguucagcaccagcuucuaccugaucagcaucuuccugcaccuggugaagauccccacccacagacacgugaucggcaagcccugccccaagccccacagacugaaccacaugggcaucugcagcugcggccuguacaagcaccccggcgugcccgugaaguggaagagauga

SEQ ID NO: 1425 - RNA, 1473 nt, Artificial Sequence
  derived and/or modified protein sequence (opt4) from LASV(LASV991-NIG-2009;Clade II)__AIT17770__GPC
augggccagaucgugaccuucuuccaggaggugccccacgugaucgaggaggugaugaacaucgugcugaucgcccugagccugcuggccauccugaagggcaucuacaacguggccaccugcggccuguucggccuggugagcuuccugcugcugugcggcagaagcugcagcaccaccuacaagggcguguacgagcugcaggcccuggagcuggacaugagcagccugaacaugaccaugccccugagcugcaccaagaacaacagccaccacuacaucauggugggcaacgagaccggccuggagcugacccugaccaacaccagcaucauccaccacaaguucugcaaccugagcgacgcccacaagaaggaccuguacgaccacgcccugaugagcaucaucagcaccuuccaccugagcauccccaacuucaaccaguacgaggccaugagcugcgacuucaacggcggcaagaucagcgugcaguacaaccugagccacaccuacgccguggacgccgccaaccacugcggcaccaucgccaacggcgugcugcagaccuucaugagaauggccuggggcggcagcuacaucgcccuggacagcggcaagggcggcugggacugcaucaugaccagcuaccaguuccugaucauccagaacaccaccugggaggaccacugccaguucagcagacccagccccaucggcuaccugggccugcugagccagagaaccagagacaucuacaucagcagaagacugcugggcaccuucaccuggacccugagcgacagcgagggcaacgagacccccggcggcuacugccugaccagauggaugcugaucgaggccgagcugaagugcuucggcaacaccgccguggccaagugcaacgagaagcacgacgaggaguucugcgacaugcugagacuguucgacuucaacaagcaggccaucaagagacugaagaccgaggcccagaugagcauccaccugaucaacaaggccgugaacgcccugaucaacgaccagcugaucaugaagaaccaccugagagacaucaugggcauccccuacugcaacuacagcaaguacugguaccugaaccacaccgugaccggcaagaccagccugcccagaugcuggcuggugagcaacggcagcuaccugaacgagacccacuucagcgacgacaucgagcagcaggccgacaacaugaucaccgagcugcugcagaaggaguacaucgacagacagggcaagaccccccugggccugguggaccuguucguguucagcaccagcuucuaccugaucagcaucuuccugcaccuggugaagauccccacccacagacacgugaucggcaagcccugccccaagccccacagacugaaccacaugggcaucugcagcugcggccuguacaagcaccccggcgugcccgugagauggaagagauga

SEQ ID NO: 1426 - RNA, 1473 nt, Artificial Sequence
  derived and/or modified protein sequence (opt4) from LASV(LASV993-NIG-2009;Clade II)__AIT17778__GPC
augggccagaucaucaccuucuuccaggaggugccccacgugaucgaggaggugaugaacaucgugcugaucgcccugagccugcuggccauccugaagggcaucuacaacguggccaccugcggccuguucggccuggugagcuuccugcugcugugcggcagaagcugcagcaccaccuacaagggcguguacgagcugcagacccuggagcuggacauggccaaccugaacaugaccaugccccugagcugcaccaagaacaacagccaccacuacaucauggugggcaacgagaccggccuggagcugacccugaccaacaccagcaucaucaaccacaaguucugcaaccugagcgacgcccacaagaagaaccuguacgaccacgcccugaugagcaucaucagcaccuuccaccugagcauccccaacuucaaccaguacgaggccaugagcugcgacuucaacggcggcaagaucagcgugcaguacaaccugagccacaccuacgccagagacgccgccaaccacugcggcaccaucgccaacggcgugcugcagaccuucaugagaauggccuggggcggcagcuacaucgcccuggacagcggcaagggcagcugggacugcaucaugaccagcuaccaguaccugaucauccagaacaccaccugggaggaccacugccaguucagcagacccagccccaucggcuaccugggccugcugagccagagaaccagagacaucuacaucagcagaagacugcugggcaccuucaccuggacccugagcgacagcgagggcaacgagacccccggcggcuacugccugaccagauggaugcugaucgaggccgagcugaagugcuucggcaacaccgccguggccaagugcaacgagaagcacgacgaggaguucugcgacaugcugagacuguucgacuucaacaagcaggccaucagaagacugaagaccgaggcccagaugaacauccagcugaucaacaaggccgugaacgcccugaucaacgaccagcugaucaugaagaaccaccugagagacaucaugggcauccccuacugcaacuacagcaaguacugguaccugaaccacaccgugaccggcaagaccagccugcccagaugcuggcuggugagcaacggcagcuaccugaacgagacccacuucagcgacgacaucgagcagcaggccgacaacaugaucaccgagcugcugcagaaggaguacauggacagacagggcaagaccccccugggccugguggaccuguucguguucagcaccagcuucuaccugaucagcaucuuccugcaccuggugaagauccccacccacagacacgugaucggcaagcccugccccaagccccacagacugaaccacaugggcaucugcagcugcggccuguacaagcaccccggcgugcccgugaaguggaagagauga

SEQ ID NO: 1427 - RNA, 1473 nt, Artificial Sequence
  derived and/or modified protein sequence (opt4) from LASV(Nig08-04;Clade II)__ADU56610__GPC
augggccagaucgugaccuucuuccaggaggugccccacgugaucgaggaggugaugaacaucgugcugaucgcccugagccugcuggccauccugaagggcaucuacaacguggccaccugcggccuguucggccugaucagcuuccugcugcugugcggcagaagcugcagcaccaccuacaagggcguguacgagcugcagacccuggagcuggacauggccaaccugaacaugaccaugccccugagcugcaccaagaacagcagccaccacuacaucauggugggcaacgagaccggccuggagcugacccugaccaacaccagcaucaucaaccacaaguucugcaaccugagcgacgcccacaagaagaaccuguacgaccacgcccugaugagcaucaucagcaccuuccaccugagcauccccaacuucaaccaguacgaggccaugagcugcgacuucaacggcggcaagaucagcgugcaguacaaccugagccacgccuacgccguggacgccgccaaccacugcggcaccaucgccaacggcgugcugcagaccuucaugagaauggccuggggcggcagcuacaucgcccuggacagcggcaagggcaacugggacugcaucaugaccagcuaccaguaccugaucauccagaacaccaccugggaggaccacugccaguucagcagacccagccccaucggcuaccugggccugcugagccagagaaccagagacaucuacaucagcagaagacugcugggcaccuucaccuggacccugagcgacagcgagggcaacgaggcccccggcggcuacugccugaccagauggaugcugaucgaggccgagcugaagugcuucggcaacaccgccaucgccaagugcaacgagaagcacgacgaggaguucugcgacaugcugagacuguucgacuucaacaagcaggccaucaagagacugaaggccgaggcccagaugagcauccagcugaucaacaaggccgugaacgcccugaucaacgaccagcugaucaugaagaaccaccugagagacaucaugggcauccccuacugcaacuacagcaaguacugguaccugaaccacaccgugaccggcaagaccagccugcccagaugcuggcugaucagcaacggcagcuaccugaacgagacccacuucagcgacgacaucgagcagcaggccgacaacaugaucaccgagcugcugcagaaggaguacauggacagacagggcaagaccccccugggccugguggaccuguucguguucagcaccagcuucuaccugaucagcaucuuccugcaccuggugaagauccccacccacagacacaucgugggcagacccugccccaagccccacagacugaaccacaugggcaucugcagcugcggccuguacaagcaccccggcgugcccgugaaguggaagagauga

SEQ ID NO: 1428 - RNA, 1473 nt, Artificial Sequence
  derived and/or modified protein sequence (opt4) from LASV(Nig08-A41;Clade II)__ADU56626__GPC
augggccagaucaucaccuucuuccaggaggugccccacgugaucgaggaggugaugaacaucgugcugaucgcccugagccugcuggccauccugaagggcaucuacaacguggccaccugcggccuguucggccuggugagcuuccugcugcugugcggcagaagcugcagcaccaccuacaagggcguguacgagcugcagacccuggagcugaacauggccagccugaacaugaccaugccccugagcugcaccaagaacaacagccaccacuacaucauggugggcaacgagaccggccuggagcugacccugaccaacaccagcaucaucaaccacaaguucugcaaccugagcgacgcccacaagagaaaccuguacgaccacgcccugaugagcaucaucagcaccuuccaccugagcauccccaacuucaaccaguacgaggccaugagcugcgacuucaacggcggcaagaucagcgugcaguacaaccugagccacaccuacgccguggacgccgccaagcacugcggcaccaucgccaacggcgugcugcagaccuucaugagaauggccuggggcggcagcuacaucgcccuggacagcggcaagggcagcugggacugcaucaugaccagcuaccaguaccugaucauccagaacaccaccugggaggaccacugccaguucagcagacccagccccaucggcuaccugggccugcugagccagagaaccagagacaucuacaucagcagaagacugcugggcaccuucaccuggacccugagcgacagcgagggcaacgagacccccggcggcuacugccugaccagauggaugcugaucgaggccgagcugaagugcuucggcaacaccgccguggccaagugcaacgagaagcacgacgaggaguucugcgacaugcugagacuguucgacuucaacaagcaggccaucagaagacugaaggccgaggcccagaugagcauccagcugaucaacaaggccgugaacgcccugaucaacgaccagcugaucaugaagaaccaccugagagacaucaugggcauccccuacugcaacuacagcaaguacugguaccugaaccacaccgugaccggcaagaccagccugcccagaugcuggcuggugagcaacggcagcuaccugaacgagacccacuucagcgacgacaucgagcagcaggccgacaacaugaucaccgagcugcugcagaaggaguacaucgacagacagggcaagaccccccugggccugguggaccuguucguguucagcaccagcuucuaccugaucagcaucuuccugcaccuggugaagauccccacccacagacacgugaucggcaagcccugccccaagccccacagacugaaccacaugggcaucugcagcugcggccuguacaagcaccccggcgugcccgugaaguggaagagauga

SEQ ID NO: 1429 - RNA, 1473 nt, Artificial Sequence
  derived and/or modified protein sequence (opt4) from LASV(Nig08-A47;Clade II)__ADU56630__GPC
augggccagaucaucaccuucuuccaggaggugccccacgugaucgaggaggugaugaacaucgugcugaucgcccugagccugcuggccauccugaagggcaucuacaacguggccaccugcggccuguucggccuggugagcuuccugcugcugugcggcagaagcugcagcaccaccuacaagggcguguacgagcugcagacccuggagcuggacauggccagccugaacaugaccaugccccugagcugcaccaagaacaacagccaccacuacaucauggugggcaacgagaccggccuggagcugacccugaccaacaccagcaucaucaaccacaaguucugcaaccugagcgacgcccacaagaagaaccuguacgaccacgcccugaugagcaucaucagcaccuuccaccugagcauccccaacuucaaccaguacgaggccaugagcugcgacuucaacggcggcaagaucagcgugcaguacaaccugagccacgccuacgccguggacgccgccaaccacugcggcaccaucgccaacggcgugcugcagaccuucaugagaauggccuggggcggcagcuacaucgcccuggacagcggcaagggcagcugggacugcaucaugaccagcuaccaguaccugaucauccagaacaccaccugggaggaccacugccaguucagcagacccagccccaucggcuaccugggccugcugagccagagaaccagagacaucuacaucagcagaagacugcugggcaccuucaccuggacccugagcgacagcgagggcaacgagacccccggcggcuacugccugaccagauggaugcugaucgaggccgagcugaagugcuucggcaacaccgccguggccaagugcaacgagaagcacgacgaggaguucugcgacaugcugagacuguucgacuucaacaagcaggccaucagaagacugaagaccgaggcccagaugagcauccagcugaucaacaaggccgugaacgcccugaucaacgaccagcugaucaugaagaaccaccugagagacaucaugggcauccccuacugcaacuacagcaaguacugguaccugaaccacaccgugaccggcaagaccagccugcccagaugcuggcuggugagcaacggcagcuaccugaacgagacccacuucagcgacgacaucgagcagcaggccgacaacaugaucaccgagcugcugcagaaggaguacauggacagacagggcaagaccccccugggccugguggaccuguucguguucagcaccagcuucuaccugaucagcaucuuccugcaccuggugagaauccccacccacagacacgugaucggcaagcccugccccaagccccacagacugaaccacaugggcaucugcagcugcggccuguacaagcaccccggcgugcccgugaaguggaagagauga

SEQ ID NO: 1430 - RNA, 1473 nt, Artificial Sequence
  derived and/or modified protein sequence (opt4) from LASV(CSF;Clade III)__AAL13212__GPC
augggccagaucgugaccuucuuccaggaggugccccacgugaucgaggagaucaugaacaucgugcugaucacccugagccugcuggccauccugaagggcguguacaaccuggccaccugcggccugaucggccugaucaccuuccuguuccugugcggcagaagcugcagcaugaccuacaagggcagcuaccagcuggagacccuggagcugaacauggagacccugaacaugaccaugccccugagcugcaccaagaacaccagccaccacuacaucagagugggcaacgagaccggccuggagcugacccugaccaacaccagcaucaucaaccacaaguucugcaaccugagcgacgcccacaagaagaaccuguacgaccacagccugaugagcaucaucagcaccuuccaccugagcauccccaacuucaaccaguacgaggccaugagcugcgacuucaacggcggcaagaucagcauccaguacaaccugagccacaccuacgccggcgacgccgccaagcacugcggcacccuggccaacggcauccugcagaccuucaugagaauggccuggggcggcagcuacaucgcccuggacagcggcagaggcaacugggacugcaucaugaccagcuaccaguaccugaucauccagaacaccaccugggaggaccacugccaguucagcagacccagccccaucggcuaccugggccugcugagccagagaaccagagagaucuacaucagcagaagacugcugggcaccuucaccuggacccugagcgacagcgagggcaacgagaaccccggcggcuacugccugaccagauggaugcugaucgaggccgagcugaagugcuucggcaacaccgccguggccaagugcaacgagaagcacgacgaggaguucugcgacaugcugagacuguucgacuucaacaagcaggccauccagagacugaaggccgaggcccagaugagcauccagcugaucaacaaggccgugaacgcccugaucaacgaccagcugaucaugaagaaccaccugagagacaucaugggcauccccuacugcaacuacagcaaguacugguaccugaaccacaccaccaccggcagaaccagccugcccagaugcuggcuggugagcaacggcagcuaccugaacgagaccagauucagcgacgacaucgagcagcaggccgacaacaugaucaccgagaugcugcagaaggaguacaucgacagacagggcaagaccccccugggccugguggaccuguucguguucagcaccagcuucuaccugaucagcaucuuccugcaccugaucaagauccccacccacagacacaucgugggcggccccugccccaagccccacagacugaaccacaagggcaucugcagcugcggccuguacaagagacccggcgugagcgugagauggaagagauga

SEQ ID NO: 1431 - RNA, 1473 nt, Artificial Sequence
  derived and/or modified protein sequence (opt4) from LASV(ISTH2121-NIG-2012;Clade III)__AIT17540__GPC
augggccagaucgugaccuucuuccaggaggugccccacgugaucgaggagaucaugaacaucgugcugaucacccugagccugcuggccauccugaagggcaucuacaacuucgccaccugcggccugaucggccugaucaccuuccuguuccugugcggcagaagcugcagcaccaucuacaagggcagcuaccagcugcagacccuggagcugaacauggagacccugaacaugaccaugccccugagcugcaccaagaacaacagccaccacuacaucagagugggcaacgagaccggccuggagcugacccugaccaacaccagcaucaucaaccacaaguucugcaaccugagcgaggcccacaagaagaaccuguacgaccacgcccugaugagcaucaucagcaccuuccaccugagcauccccaacuucaaccaguacgaggccaugagcugcgacuucaacggcggcaagaucagcgugcaguacaaccugagccacagcuacgccguggacgccgccaaccacugcggcaccguggccaacggcgugcugcagaccuucaugagaauggccuggggcggcagcuacaucgcccuggacagcggcagaggcaacugggacugcaucaugaccagcuaccaguaccugaucauccagaacaccaccugggaggaccacugccaguucagcagacccagccccaucggcuaccugggccugcugagccagagaaccagagacaucuacaucagcagaagacugcugggcaccuucaccuggacccugagcgacagcgagggcaaggagacccccggcggcuacugccugaccagauggaugcugaucgaggccgagcugaagugcuucggcaacaccgccguggccaagugcaacgagaagcacgacgaggaguucugcgacaugcugagacuguucgacuucaacaagcaggccauccagagacugaagaccgaggcccagaugagcauccagcugaucaacaaggccgugaacgcccugaucaacgaccagcugaucaugaagaaccaccugagagacaucaugggcauccccuacugcaacuacagcaaguacugguaccugaaccacaccagcaccggcagaaccagccugcccaagugcuggcuggugagcaacggcagcuaccugaacgagacccacuucagcgacgacaucgagcagcaggccgacaacaugaucaccgagaugcugcagaaggaguacaucgacagacagggcaagaccccccugggccugguggaccuguucguguucagcaccagcuucuaccugaucagcaucuuccugcaccuggugaagauccccacccacagacacaucgugggcaagagcugccccaagccccacagacugaaccacaugggcaucugcagcugcggccuguacaagcagcccggcgugcccgugaaguggaagagauga

SEQ ID NO: 1432 - RNA, 1473 nt, Artificial Sequence
  derived and/or modified protein sequence (opt4) from LASV(Nig08-A19;Clade III)__ADU56618__GPC
augggccagaucgugaccuucuuccaggaggugccccacgugaucgaggaggugaugaacaucgugcugaucgcccugagcauccuggccauccugaagggccuguacaacaucgccaccugcggccugaucggccuggugaccuuccugcugcugagcggcagaagcugcagcaugaccuacaagggcguguacgagcugcagacccuggagcugaacaugaacacccugaacaugaccaugccccugagcugcaccaagaacaacagccaccacuacaucauggugggcaacgagaccggccuggagcugacccugaccaacaccagccugcugcaccacaaguucugcaaccugagcgacgcccacaagaagaaccuguacgaccacacccugaugagcaucaucagcaccuuccaccugagcauccccaacuucaaccaguacgaggccaugagcugcgacuucaacggcggcaagaucaccgugcaguacaaccugagccacagcuacgccaucgacgccgccaaccacugcggcaccguggccaacggcgugcugcagaccuucaugagaauggccuggggcggcagcuacaucgcccuggacagcggcagaggcaagugggacugcaucaugaccagcuaccaguaccugaucauccagaacaccaccugggaggaccacugccaguucagcagacccagccccaucggcuaccugggccugcugagccagagaaccagagacaucuacaucagcagaagacugcugggcaccuucaccuggacccugagcgacagcgagggcaacgagacccccggcggcuacugccugaccagauggaugcugaucgaggccgagcugaagugcuucggcaacaccgccguggccaagugcaacgagaagcacgacgaggaguucugcgacaugcugagacuguucgacuucaacaagcaggccaucagaagacugaaggccgaggcccagaugagcauccagcugaucaacaaggccgugaacgcccugaucaacgaccagcugaucaugaagaaccaccugagagacaucaugggcauccccuacugcaacuacagcaaguacugguaccugaaccacaccagcaccggcagaaccagccugcccagaugcuggcuggugagcaacggcagcuaccugaacgagacccacuucagcgacgacaucgagcagcaggccgacaacaugaucaccgagaugcugcagaaggaguaccuggacagacagggcaagaccccccugggccugguggaccuguucguguucagcaccagcuucuaccugaucagcaucuuccugcaccuggugaagauccccacccacagacacaucgugggcaagcccugccccaagccccacagacugaaccacaugggcaucugcagcugcggccuguacaagcagcccggcgugcccgugagauggaagagauga

SEQ ID NO: 1433 - RNA, 1473 nt, Artificial Sequence
  derived and/or modified protein sequence (opt4) from LASV(ONM-299;Clade III)__ANH09734__GPC
augggccagaucgugaccuucuuccaggaggugccccacgugaucgaggagaucaugaacaucgugcugaucacccugagccugcuggccauccugaagggccuguacaacuucgccaccugcggccugaucggccugaucaccuuccuguuccugugcggcagaagcugcagcaugaucuacaagggcagcuaccagcuggagacccuggagcugaacauggagacccugaacaugaccaugccccugagcugcaccaagaacaacagccaccacuacaucagagugggcaacgagaccggccuggagcugacccugaccaacaccagcaucaucggccacaaguucugcaaccugagcgacgcccacaagaagaaccuguacgaccacagccugaugagcaucaucagcaccuuccaccugagcauccccaacuucaaccaguacgaggccaugagcugcgacuucaacggcggcaagaucagcauccaguacaaccugagccacaccuacgccggcgacgccgccaagcacugcggcaccguggccaacggcgugcugcagaccuucaugagaauggccuggggcggcagcuacaucgcccuggacagcggcagaggcaacugggacugcaucaugaccagcuaccaguaccugaucauccagaacaccaccugggaggaccacugccaguucagcagacccagccccaucggcuaccugggccugcugagccagagaaccagagacaucuacaucagcagaagacugcugggcaccuucaccuggacccugagcgacagcgagggcaaggagacccccggcggcuacugccugaccagauggaugcugaucgaggccgagcugaagugcuucggcaacaccgccguggccaagugcaacgagaagcacgacgaggaguucugcgacaugcugagacuguucgacuucaacaagcaggccauccagagacugaagaccgaggcccagaugagcauccagcugaucaacaaggccgugaacgcccugaucaacgaccagcugaucaugaagaaccaccugagagacaucaugggcauccccuacugcaacuacagcaaguacugguaccugaaccacaccagcaccggcagaaccagccugcccaagugcuggcuggugagcaacggcagcuaccugaacgagacccacuucagcgacgacaucgagcagcaggccgacaacaugaucaccgagaugcugcagaaggaguacaucgacagacagggcaagaccccccugggccugguggacguguucguguucagcaccagcuucuaccugaucagcaucuuccugcaccuggugaagauccccacccacagacacaucgugggcaagagcugccccaagccccacagacugaaccacaugggcaucugcagcugcggccuguacaagcagcccggcgugcccgugagauggaagagauga

SEQ ID NO: 1434 - RNA, 1473 nt, Artificial Sequence
  derived and/or modified protein sequence (opt4) from LASV(ONM-700;Clade III)__ANH09738__GPC
augggccagaucgugaccuucuuccaggaggugccccacgugaucgaggagaucaugaacaucgugcugaucacccugagccugcuggccauccugaagggccuguacaacuucgccaccugcggccugaucggccugaucaccuuccuguuccugugcggcagaagcugcagcaugaucuacaagggcagcuaccagcuggagacccuggagcugaacauggagacccugaacaugaccaugccccugagcugcaccaagaacaacagccaccacuacaucagagugggcaacgagaccggccuggagcugacccugaccaacaccagcaucaucaaccacaaguucugcaaccugagcgacgcccacaagagaaaccuguacgaccacagccugaugagcaucaucagcaccuuccaccugagcauccccaacuucaaccaguacgaggccaugagcugcgacuucaacggcggcaagaucagcauccaguacaaccugagccacaccuacgccggcgacgccgccaagcacugcggcaccguggccaacggcgugcugcagaccuucaugagaauggccuggggcggcagcuacaucgcccuggacagcggcagaggcaacugggacugcaucaugaccagcuaccaguaccugaucauccagaacaccaccugggaggaccacugccaguucagcagacccagccccaucggcuaccugggccugcugagccagagaaccagagacaucuacaucagcagaagacugcugggcaccuucaccuggacccugagcgacagcgagggcaaggagacccccggcggcuacugccugaccagauggaugcugaucgaggccgagcugaagugcuucggcaacaccgccguggccaagugcaacgagaagcacgacgaggaguucugcgacaugcugagacuguucgacuucaacaagcaggccauccagagacugaagaccgaggcccagaugagcauccagcugaucaacaaggccgugaacgcccugaucaacgaccagcugaucaugaagaaccaccugagagacaucaugggcauccccuacugcaacuacagcaaguacugguaccugaaccacaccagcaccggcagaaccagccugcccaagugcuggcuggugagcaacggcagcuaccugaacgagacccacuucagcgacgacaucgagcagcaggccgacaacaugaucaccgagaugcugcagaaggaguacaucgacagacagggcaagaccccccugggccugguggacguguucauguucagcaccagcuucuaccugaucagcaucuuccugcaccuggugaagauccccacccacagacacaucgugggcaagagcugccccaagccccacagacugaaccacaugggcaucugcagcugcggccuguacaagcagcccggcgugcccgugagauggaagagauga

SEQ ID NO: 1435 - RNA, 1473 nt, Artificial Sequence
  derived and/or modified protein sequence (opt4) from LASV(Weller;Clade III)__AAT49010__GPC
augggccagaucgugaccuucuuccaggaggugccccacgugaucgaggaggugaugaacaucgugcugaucgcccugagcgugcuggccauccugaagggccuguacaacuucgccaccugcggccugaucggccuggugaccuuccugcugcugagcggcagaagcugcagcaugaucuacaagggcguguacgagcugcagacccuggagcugaacauggagacccugaacaugaccaugccccugagcugcaccaagaacaccagccaccacuacaucagagugggcaacgacaccggccuggagcugacccugaccaacgagacccugcugcaccacaaguucugcaaccugagcgacgcccacaagagaaaccuguacgaccacgcccugaugagcaucaucagcaccuuccaccugagcauccccaacuucaaccaguacgaggccaugagcugcgacuucaacggcggcaagaucaccgugcaguacaaccugagccacagcuacgccguggacgccgccaagcacugcggcaccguggccaacggcgugcugcagaccuucaugagaauggccuggggcggcagcuacaucgcccuggacagcagacacggcaacugggacugcaucaugaccagcuaccaguaccugaucauccagaacaccaccugggaggaccacugccaguucagcagacccagccccaucggcuaccugggccugcugagccagagaaccagagacaucuacaucagcagaagacugcugggcaccuucaccuggacccugagcgacagcgagggcaacgagacccccggcggcuacugccugaccagauggaugcugaucgaggccgagcugaagugcuucggcaacaccgccguggccaagugcaacgagaagcacgacgaggaguucugcgacaugcugagacuguucgacuucaacaagcaggccaucagaagacugaagaccgaggcccagaugagcauccagcugaucaacaaggccgugaacgcccugaucaacgaccagcugaucaugaagaaccaccugagagacaucaugggcauccccuacugcaacuacagcaaguacugguaccugaaccacaccagcaccggcaagaccagccugcccagaugcuggcuggugagcaacggcagcuaccugaacgagacccacuucagcgacgacaucgagcagcaggccgacaacaugaucaccgagaugcugcagaaggaguaccuggacagacagggcaagaccccccugggccugguggaccuguucguguucagcaccagcuucuaccugaucagcaucuuccugcaccugaucaagauccccacccacagacacaucgugggcaagcccugccccaagccccacagacugaaccacaugggcaucugcagcugcggccuguacaagcagcccggcgugcccgugagauggaagagauga

SEQ ID NO: 1436 - RNA, 1476 nt, Artificial Sequence
  derived and/or modified protein sequence (opt4) from LASV(BA366;Clade IV)__ADI39451__GPC
augggccagaucgugaccuucuuccaggaggugccccacgugaucgaggaggugaugaacaucgugcugaucgcccugagcgugcuggccgugcugaagggccuguacaacguggccaccugcggccugaucggccugaucgccuuccugcugcugugcggcagaagcugcaccaccacccuguacaagggcguguacgagcugcaggcccuggagcugaacauggagacccugaacaugaccaugccccugagcugcaccaagaacaacagccaccacuacaucauggugggcaacgagaccggccuggagcugacccugaccaacaccagcaucaucaaccacaaguucugcaaccugagcgacgcccacaagaagaaccuguacgaccacgcccugaugagcaucaucagcaccuuccaccugagcauccccaacuucaaccaguacgaggccaugagcugcgacuucaacggcggcaagaucagcgugcaguacaaccugagccacaccuacgccguggacgccgccaaccacugcggcaccguggccaacggcgugcugcagaccuucaugagaauggccuggggcggcagcuacaucgcccuggacagcggcagaggcagcugggacugcaucaugaccagcuaccaguaccugaucauccagaacaccaccugggaggaccacugccaguucagcagacccagccccaucggcuaccugggccugcugagccagagaaccagagacaucuacaucagcagaagacugcugggcaccuucaccuggacccugagcgacagcgagggcaaggacacccccggcggcuacugccugaccagauggaugcugaucgaggccgagcugaagugcuucggcaacaccgccguggccaagugcaacgagaagcacgacgaggaguucugcgacaugcugagacuguucgacuucaacaagcaggccauccagagacugaaggccgaggcccagaugagcauccagcugaucaacaaggccgugaacgcccugaucaacgaccagcugaucaugaagaaccaccugagagacaucaugggcauccccuacugcaacuacagcaaguacugguaccugaaccacaccaucaccggcagaaccagccugcccaagugcuggcuggugagcaacggcagcuaccugaacgagacccacuucagcgacgacaucgagcagcaggccgacaacaugaucaccgagaugcugcagaaggaguacaucgagagacagggcaagaccccccugggccugguggaccuguucguguucagcaccagcuucuaccugaucagcaucuuccugcaccugaucaagauccccacccacagacacaucgugaacaagcccugccccaagccccacagacugaaccacaugggcgugugcagcugcggccuguacaagcagcccggcgugcccgugagauggaagagauga

SEQ ID NO: 1437 - RNA, 1476 nt, Artificial Sequence
  derived and/or modified protein sequence (opt4) from LASV(G1180-SLE-2010;Clade IV)__AIT17168__GPC
augggccagaucgugaccuucuuccaggaggugccccacgugaucgaggaggugaugaacaucgugcugaucgcccugagcauccuggccgugcugaagggccuguacaacuucgccaccugcggccuggugggccugcugaccuuccugcugcugugcggcagaagcugcaccgccagcagauacaagggcguguacgagcugcagacccuggagcugaacauggagacccugaacaugaccaugccccugagcugcaccaagaacaacagccaccacuacaucauggugggcaacgagaccggccuggagcugacccugaccaacaccagcaucaucaaccacaaguucugcaaccugagcgacgcccacaagaagaaccuguacgaccacgcccugaugagcaucaucagcaccuuccaccugagcauccccaacuucaaccaguacgaggccaugagcugcgacuucaacggcggcaagaucagcgugcaguacaaccugagccacagcuacgccggcgacgccgccaaccacugcggcaccguggccaacggcgugcugcagaccuucaugagaauggccuggggcggcagcuacaucgcccuggacagcggccacggcagcugggacugcaucaugaccagcuaccaguaccugaucauccagaacaccaccugggaggaccacugccaguucagcagacccagccccaucggcuaccugggccugcugagccagagaaccagagacaucuacaucagcagaagacugcugggcaccuucaccuggacccugagcgacagcgagggcaaggacacccccggcggcuacugccugaccagauggaugcugaucgaggccgagcugaagugcuucggcaacaccgccguggccaagugcaacgagaagcacgacgaggaguucugcgacaugcugagacuguucgacuucaacaagcaggccauccagagacugaaggccgaggcccagaugagcauccagcugaucaacaaggccgugaacgcccugaucaacgaccagcugaucaugaagaaccaccugagagacaucaugggcauccccuacugcaacuacagcaaguacugguaccugaaccacaccaccaccggcaagaccagccugcccaagugcuggcuggugagcaacggcagcuaccugaacgagacccacuucagcgacgacaucgagcagcaggccgacaacaugaucaccgagaugcugcagaaggaguacauggagagacagggcaagaccccccugggccugguggaccuguucguguucagcaccagcuucuaccugaucagcaucuuccugcaccuggugaagauccccacccacagacacaucgugggcaagagcugccccaagccccacagacugaaccacaugggcaucugcagcugcggccuguacaagcagcccggcgugcccgugaaguggaagagauga

SEQ ID NO: 1438 - RNA, 1476 nt, Artificial Sequence
  derived and/or modified protein sequence (opt4) from LASV(G1190-SLE-2010;Clade IV)__AIT17172__GPC
augggccagaucgugaccuucuuccaggaggugccccacgugaucgaggaggugaugaacaucgugcugaucgcccugagcauccuggccgugcugaagggccuguacaacuucgccaccugcggccuggugggccuggugaccuuccugcugcugugcggcagaagcugcaccaccagccuguacaagggcguguacgagcugcagacccuggagcugaacauggagacccugaacaugaccaugccccugagcugcaccaagaacaacagccaccacuacaucauggugggcaacgagaccggccuggagcugacccugaccaacaccagcaucaucaaccacaaguucugcaaccugagcgacgcccacaagaagaaccuguacgaccacgcccugaugagcaucaucagcaccuuccaccugagcauccccaacuucaaccaguacgaggccaugagcugcgacuucaacggcggcaagaucagcgugcaguacaaccugagccacagcuacgccggcgacgccgccaaccacugcggcaccguggccaacggcgugcugcagaccuucaugagaauggccuggggcggcagcuacaucgcccuggacagcggcagaggcagaugggacugcaucaugaccagcuaccaguaccugaucauccagaacaccaccugggaggaccacugccaguucagcagacccagccccaucggcuaccugggccugcugagccagagaaccagagacaucuacaucagcagaagacugcugggcaccuucaccuggacccugagcgacagcgagggcaaggacacccccggcggcuacugccugaccagauggaugcugaucgaggccgagcugaagugcuucggcaacaccgccguggccaagugcaacgagaagcacgacgaggaguucugcgacaugcugagacuguucgacuucaacaagcaggccauccagagacugaaggccgaggcccagaugagcauccagcugaucaacaaggccgugaacgcccugaucaacgaccagcugaucaugaagaaccaccugagagacaucaugggcauccccuacugcaacuacagcaaguacugguaccugaaccacaccaccaccggcaagaccagccugcccaagugcuggcuggugagcaacggcagcuaccugaacgagacccacuucagcgacgacaucgagcagcaggccgacaacaugaucaccgagaugcugcagaaggaguacauggagagacagggcaagaccccccugggccugguggaccuguucguguucagcaccagcuucuaccugaucagcaucuuccugcaccuggugaagauccccacccacagacacaucgugggcaagcccugccccagaccccacagacugaaccacaugggcaucugcagcugcggccuguacaagcagcccggcgugcccgugaaguggaagagauga

SEQ ID NO: 1439 - RNA, 1476 nt, Artificial Sequence
  derived and/or modified protein sequence (opt4) from LASV(G1200-LIB-2010;Clade IV)__AIT17176__GPC
augggccagaucgugaccuucuuccaggaggugccccacgugaucgaggaggugaugaacaucgugcugaucgcccugagccugcuggccgugcugaagggccuguacaacguggccaccugcggccugaucggccugaucaccuuccugcugcugugcggcagaagcugcaccaccaaccuguacaagggcguguacgagcugcaggcccuggagcugaacauggagacccugaacaugaccaugccccugagcugcaccaagaacaacagccaccacuacaucauggugggcaacgagaccggccuggagcugacccugaccaacaccagcaucaucaaccacaaguucugcaaccugagcgacgcccacaagaagaaccuguacgaccacgcccugaugagcaucaucagcaccuuccaccugagcauccccaacuucaaccaguacgaggccaugagcugcgacuucaacggcggcagaaucagcgugcaguacaaccugagccacagcuacgccggcgacgccgccagccacugcggcaccaucgccaacggcgugcugcagaccuucaugagaauggccuggggcggcagcuacaucgcccuggacagcggccacggcggcugggacugcaucaugaccagcuaccaguaccugaucauccagaacaccaccugggaggaccacugccaguucagcagacccagccccaucggcuaccugggccugcugagccagagaaccagagacaucuacaucagcagaagacugcugggcaccuucaccuggacccugagcgacagcgagggcaaggacacccccggcggcuacugccugaccagauggaugcugaucgaggccgagcugaagugcuucggcaacaccgccguggccaagugcaacgagaagcacgacgaggaguucugcgacaugcugagacuguucgacuucaacaagcaggccauccagagacugaaggccgaggcccagaugagcauccagcugaucaacaaggccgugaacgcccugaucaacgaccagcugaucaugaagaaccaccugagagacaucaugggcauccccuacugcaacuacagcaaguacugguaccugaaccacaccgugaccggcaagaccagccugcccaagugcuggcuggugagcaacggcagcuaccugaacgagacccacuucagcgacgacaucgagcagcaggccgacaacaugaucaccgagaugcugcagaaggaguacauggagagacagggcaagaccccccugggccugguggaccuguucguguucagcaccagcuucuaccugaucagcaucuuccugcaccuggugaagauccccacccacagacacguggugggcaagcccugccccaagccccacagacugaaccacaugggcaucugcagcugcggccuguacaagcagcccggcgugcccgugagauggaagagauga

SEQ ID NO: 1440 - RNA, 1476 nt, Artificial Sequence
  derived and/or modified protein sequence (opt4) from LASV(G1442-SLE-2011;Clade IV)__AIT17180__GPC
augggccagaucgugaccuucuuccaggaggugccccacgugaucgaggaggugaugaacaucgugcugaucgcccugagcauccuggccgugcugaagggccuguacaacguggccaccugcggccugaucggccuggugaccuuccugcugcugugcggcagaagcugcaccaccacccuguacaagggcguguacgagcugcagacccuggagcugaacauggagacccugaacaugaccaugccccugagcugcaccaagaacaacagccaccacuacaucagagugggcaacgagaccggccuggagcugacccugaccaacaccagcaucaucaaccacaaguucugcaaccugagcgacgcccacaagaagaaccuguacgaccacgcccugaugagcaucaucagcaccuuccaccugagcauccccaacuucaaccaguacgaggccaugagcugcgacuucaacggcggcaagaucagcgugcaguacaaccugagccacagcuacgccggcgacgccgccaaccacugcggcaccguggccaacggcgugcugcagaccuucaugagaauggccuggggcggcagcuacaucgcccuggacagcggcagaggcaacugggacugcaucaugaccagcuaccaguaccugaucauccagaacaccaccugggacgaccacugccaguucagcagacccagccccaucggcuaccugggccugcugagccagagaaccagagacguguacaucagcagaagacugcugggcaccuucaccuggacccugagcgacagcgagggcaaggacacccccggcggcuacugccugaccagauggaugcugaucgaggccgagcugaagugcuucggcaacaccgccguggccaagugcaacgagaagcacgacgaggaguucugcgacaugcugagacuguucgacuucaacaagcaggccauccagagacugaaggccgaggcccagaugagcauccagcugaucaacaaggccgugaacgcccugaucaacgaccagcugaucaugaagaaccaccugagagacaucaugggcauccccuacugcaacuacagcaaguacugguaccugaacaacaccgccaccggcaagaccagccugcccaagugcuggcugaucagcaacggcagcuaccugaacgagacccacuucagcgacgacaucgagcaggaggccgacaacaugaucaccgagaugcugcagaaggaguacauggagagacagggcaagaccccccugggccugguggaccuguucguguucagcaccagcuucuaccugaucagcaucuuccugcaccuggugaagauccccacccacagacacaucgugggcaagagcugccccaagccccacagacugaaccacaugggcaucugcagcugcggccuguacaagcagcccggcgugcccgugagauggaagagauga

SEQ ID NO: 1441 - RNA, 1476 nt, Artificial Sequence
  derived and/or modified protein sequence (opt4) from LASV(G1529-SLE-2011;Clade IV)__AIT17184__GPC
augggccagaucgugaccuucuuccaggaggugccccacgugaucgaggaggugaugaacaucgugcugaucgcccugagcauccuggccgugcugaagggccuguacaacguggccaccugcggccugaucggccuggugaccuuccugcugcugugcggcagaagcugcaccaccacccuguacaagggcguguacgagcugcaggcccuggagcugaacauggagacccugaacaugaccaugccccugagcugcaccaagaacaacagccaccacuacaucagagugggcaacgagaccggccuggagcugacccugaccaacaccagcaucaucgaccacaaguucugcaaccugagcgacgcccacaagaagaaccuguacgaccacgcccugaugagcaucaucagcaccuuccaccugagcauccccaacuucaaccaguacgaggccaugagcugcgacuucaacggcggcaagaucagcgugcaguacaaccugagccacagcuacgccggcgacgccgccaaccacugcggcaccguggccaacggcgugcugcagaccuucaugagaauggccuggggcggcagcuacaucgcccuggacagcggcagaaacggcugggacugcaucaugaccagcuaccaguaccugaucauccagaacaccaccugggacgaccacugccaguucagcagacccagccccaucggcuaccugggccugcugagccagagaaccagagacaucuacaucagcagaagacugcugggcaccuucaccuggacccugagcgacagcgagggcaaggacacccccggcggcuacugccugaccagauggaugcugaucgaggccgagcugaagugcuucggcaacaccgccguggccaagugcaacgagaagcacgacgaggaguucugcgacaugcugagacuguucgacuucaacaagcaggccaucagaagacugaaggccgaggcccagaugagcauccagcugaucaacaaggccgugaacgcccugaucaacgaccagcugaucaugaagaaccaccugagagacaucaugggcauccccuacugcaacuacagcaaguacugguaccugaacaacaccgccaccggcaagaccagccugcccagaugcuggcuggugagcaacggcagcuaccugaacgagacccacuucagcgacgacaucgagcagcaggccgacaacaugaucaccgagaugcugcagagagaguacauggagagacagggcaagaccccccugggccugguggaccuguucguguucagcaccagcuucuaccugaucagcaucuuccugcaccuggugaagauccccacccacagacacaucgugggcaagcccugccccaagccccacagacugaaccacaugggcaucugcagcugcggccuguacaagcagcccggcgugcccgugaaguggaagagauga

SEQ ID NO: 1442 - RNA, 1476 nt, Artificial Sequence
  derived and/or modified protein sequence (opt4) from LASV(G1618-SLE-2011;Clade IV)__AIT17188__GPC
augggccagaucgugaccuucuuccaggaggugccccacgugaucgaggaggugaugaacaucgugcugaucgcccugagcauccuggccgugcugaagggccuguacaacuucgccaccugcggcuucgugggccuggugagcuuccugcugcugugcggcagaagcugcaccaccagccuguacaagggcguguacgagcugcagacccuggagcugaacauggagacccugaacaugaccaugccccugagcugcaccaagaacaacagccaccacuacaucauggugggcaacgagaccggccuggagcugacccugaccaacaccagcaucaucaaccacaaguucugcaaccugagcgacgcccacaagaagaaccuguacgaccacgcccugaugagcaucaucagcaccuuccaccugagcauccccaacuucaaccaguacgaggccaugagcugcgacuucaacggcggcaagaucagcgugcaguacaaccugagccacagcuacgccguggacgccgccaaccacugcggcaccguggccaacggcgugcugcagaccuucaugagaauggccuggggcggcagcuacaucgcccuggacagcggccacggcagcugggacugcaucaugaccagcuaccaguaccugaucauccagaacaccaccugggaggaccacugccaguucagcagacccagccccaucggcuaccugggccugcugagccagagaaccagagacaucuacaucagcagaagacugcugggcaccuucaccuggacccugagcgacagcgagggcaaggacacccccggcggcuacugccugaccagauggaugcugaucgaggccgagcugaagugcuucggcaacaccgccguggccaagugcaacgagaagcacgacgaggaguucugcgacaugcugagacuguucgacuucaacaagcaggccauccagagacugagagccgaggcccagaugagcauccagcugaucaacaaggccgugaacgcccugaucaacgaccagcugaucaugaagaaccaccugagagacaucaugggcauccccuacugcaacuacagcaaguacugguaccugaaccacaccaccaccggcagaaccagccugcccaagugcuggcuggugagcaacggcagcuaccugaacgagacccacuucagcgacgacaucgagcagcaggccgacaacaugaucaccgagaugcugcagaaggaguacauggagagacagggcaagaccccccugggccugguggaccuguucguguucagcaccagcuucuaccugaucagcaucuuccugcaccuggugaagauccccacccacagacacaucgugggcaagagcugccccaagccccacagacugaaccacaugggcaucugcagcugcggccuguacggccagcccggcgugcccgugaaguggaagagauga

SEQ ID NO: 1443 - RNA, 1476 nt, Artificial Sequence
  derived and/or modified protein sequence (opt4) from LASV(G1646-SLE-2011;Clade IV)__AIT17192__GPC
augggccagaucgugaccuucuuccaggaggugccccacgugaucgaggaggugaugaacaucgugcugaucgcccugagcauccuggccgugcugaagggccuguacaacuucgccaccugcggcuucaucggccuggugagcuuccugcugcugugcggcagaagcugcaccaccagccuguacaagggcguguacgagcugcagacccuggagcugaacauggagacccugaacaugaccaugccccugagcugcaccaagaacaacagccaccacuacaucauggugggcaacgagaccggccuggagcugacccugaccaacaccagcaucaucaaccacaaguucugcaaccugagcgacgcccacaagaagaaccuguacgaccacgcccugaugagcaucaucagcaccuuccaccugagcauccccaacuucaaccaguucgaggccaugagcugcgacuucaacggcggcaagaucagcgugcaguacaaccugagccacagcuacgccguggacgccgccaaccacugcggcaccguggccaacggcgugcugcagaccuucaugagaauggccuggggcggcagcuacaucgcccuggacagcggccacggcagcugggacugcaucaugaccagcuaccaguaccugaucauccagaacaccaccugggaggaccacugccaguucagcagacccagccccaucggcuaccugggccugcugagccagagaaccagagacaucuacaucagcagaagacugcugggcaccuucaccuggacccugagcgacagcgagggcaaggacacccccggcggcuacugccugaccagauggaugcugaucgaggccgagcugaagugcuucggcaacaccgccguggccaagugcaacgagaagcacgacgaggaguucugcgacaugcugagacuguucgacuucaacaagcaggccauccagagacugaaggccgaggcccagaugagcauccagcugaucaacaaggccgugaacgcccugaucaacgaccagcugaucaugaagaaccaccugagagacaucaugggcauccccuacugcaacuacagcaaguacugguaccugaaccacaccaccaccggcagaaccagccugcccaagugcuggcuggugagcaacggcagcuaccugaacgagacccacuucagcgacgacaucgagcagcaggccgacaacaugaucaccgagaugcugcagaaggaguacauggagagacagggcaagaccccccugggccugguggaccuguucguguucagcaccagcuucuaccugaucagcaucuuccugcaccuggugaagauccccacccacagacacaucgugggcaagagcugccccaagccccacagacugaaccacaugggcaucugcagcugcggccuguacggccagcccggcgugcccgugaaguggaagagauga

SEQ ID NO: 1444 - RNA, 1476 nt, Artificial Sequence
  derived and/or modified protein sequence (opt4) from LASV(G1647-SLE-2011;Clade IV)__AIT17196__GPC
augggccagaucgugaccuucuuccaggaggugccccacgugaucgaggaggugaugaacaucgugcugaucgcccugagcauccuggccgugcugaagggccuguacaaccuggccaccugcggccuggugggccuggugaccuuccugcugcugugcggcagaagcugcaccaccagccuguacaagggcguguacgagcugcagacccuggagcugaacauggagacccugaacaugaccaugccccugagcugcaccaagaacaacagccaccacuacaucauggugggcaacgagaccggccuggagcugacccugaccaacaccagcaucaucaaccacaaguucugcaaccugagcgacgcccacaagaagaaccuguacgaccacgcccugaugagcaucaucagcaccuuccaccugagcauccccaacuucaaccaguacgaggccaugagcugcgacuucaacggcggcaagaucagcgugcaguacaaccugagccacagcuacgccggcgacgccgccaaccacugcggcaccguggccaacggcgugcugcagaccuucaugagaauggccuggggcggcagcuacaucgcccuggacagcggcagaggcagaugggacugcaucaugaccagcuaccaguaccugaucauccagaacaccaccugggaggaccacugccaguucagcagacccagccccaucggcuaccugggccugcugagccagagaaccagagacaucuacaucagcagaagacugcugggcaccuucaccuggacccugagcgacagcgagggcaaggacacccccggcggcuacugccugaccagauggaugcugaucgaggccgagcugaagugcuucggcaacaccgccguggccaagugcaacgagaagcacgacgaggaguucugcgacaugcugagacuguucgacuucaacaagcaggccauccagagacugaaggccgaggcccagaugaacauccagcugaucaacaaggccgugaacgcccugaucaacgaccagcugaucaugaagaaccaccugagagacaucaugggcauccccuacugcaacuacagcaaguacugguaccugaaccacaccaccaccggcaagaccagccugcccagaugcuggcuggugagcaacggcagcuaccugaacgagacccacuucagcgacgacaucgagcagcaggccgacaacaugaucaccgagaugcugcagaaggaguacauggagagacagggcaagaccccccugggccugguggaccuguucguguucagcaccagcuucuaccugaucagcaucuuccugcaccuggugaagauccccacccacagacacaucgugggcaagcccugccccaagccccacagacugaaccacaugggcaucugcagcugcggcuucuacaagcagcccggcgugcccgugaaguggaagagauga

SEQ ID NO: 1445 - RNA, 1476 nt, Artificial Sequence
  derived and/or modified protein sequence (opt4) from LASV(G1774-SLE-2011;Clade IV)__AIT17204__GPC
augggccagaucgugaccuucuuccaggaggugccccacgugaucgaggaggugaugaacaucgugcugaucgcccugagcauccuggccgugcugaagggccuguacaaccuggccaccugcggccuggugggccuggugaccuuccugcugcugugcggcagaagcugcaccagcagccuguacaagggcguguacgagcugcagacccuggagcugaacauggagacccugaacaugaccaugccccugagcugcaccaagaacagcagccaccacuacaucagagugggcaacgagaccggccuggagcugacccugaccaacaccagcaucaucaaccacaaguucugcaaccugagcgacgcccacaagaagaaccuguacgaccacgcccugaugagcaucaucagcaccuuccaccugagcauccccaacuucaaccaguacgaggccaugagcugcgacuucaacggcggcaagaucagcgugcaguacaaccugagccacagcuacgccggcgacgccgccaaccacugcggcaccguggccaacggcgugcugcagaccuucaugagaauggccuggggcggcagcuacaucgcccuggacagcggccacgacagaugggacugcaucaugaccagcuaccaguaccugaucauccagaacaccaccugggaggaccacugccaguucagcagacccagccccaucggcuaccugggccugcugagccagagaaccagagacaucuacaucagcagaagacugcugggcaccuucaccuggacccugagcgacagcgagggcaaggacacccccggcggcuacugccugaccagauggaugcugaucgaggccgagcugaagugcuucggcaacaccgccguggccaagugcaacgagaagcacgacgaggaguucugcgacaugcugagacuguucgacuucaacaagcaggccauccagagacugaaggccgaggcccagaugagcauccagcugaucaacaaggccgugaacgcccugaucaacgaccagcugaucaugaagaaccaccugagagacaucaugggcauccccuacugcaacuacagcaaguacugguaccugaaccacaccaucaccggcaagaccagccugcccaagugcuggcuggugagcaacggcagcuaccugaacaagacccacuucagcgacgacaucgagcagcaggccgacaacaugaucaccgagaugcugcagaaggaguacauggagagacagggcaagaccccccugggccugguggaccuguucguguucagcaccagcuucuaccugaucagcaucuuccugcaccugaucaagauccccacccacagacacaucgugggcaagcccugccccaagccccacagacugaaccacaugggcaucugcagcugcggccuguacaagcagcccggcgugcccgugaaguggaagagauga

SEQ ID NO: 1446 - RNA, 1476 nt, Artificial Sequence
  derived and/or modified protein sequence (opt4) from LASV(G1792-SLE-2011;Clade IV)__AIT17208__GPC
augggccagaucgugaccuucuuccaggaggugccccacgugaucgaggaggugaugaacaucgugcugaucgcccugagcauccuggccgugcugaagggccuguacaacuucgccaccugcggccugaucggccuggugaccuuccugcugcugugcggcagaagcugcaccaccagccuguacaagggcguguacgagcugcagacccuggagcugaacauggagacccugaacaugaccaugccccugagcugcaccaagaacaacagccaccacuacaucauggugggcaacgagaccggccuggagcugacccugaccaacaccagcaucaucaaccacaaguucugcaaccugagcgacgcccacaagaagaaccuguacgaccacgcccugaugagcaucaucagcaccuuccaccugagcauccccaacuucaaccaguacgaggccaugagcugcgacuucaacggcggcaagaucagcgugcaguacaaccugagccacagcuacgccggcgacgccgccaaccacugcggcaccguggccaacggcgugcugcagaccuucaugagaauggccuggggcggcagcuacaucgcccuggacagcggcagaggccagugggacugcaucaugaccagcuaccaguaccugaucauccagaacaccaccugggaggaccacugccaguucagcagacccagccccaucggcuaccugggccugcugagccagagaaccagagacaucuacaucagcagaagacugcugggcaccuucaccuggacccugagcgacagcgagggcaaggacacccccggcggcuacugccugaccagauggaugcugaucgaggccgagcugaagugcuucggcaacaccgccguggccaagugcaacgagaagcacgacgaggaguucugcgacaugcugagacuguucgacuucaacaagcaggccauccagagacugaaggccgaggcccagaugagcauccagcugaucaacaaggccgugaacgcccugaucaacgaccagcugaucaugaagaaccaccugagagacaucaugggcauccccuacugcaacuacagcaaguacugguaccugaaccacaccaccaccggcaagaccagccugcccaagugcuggcuggugagcaacggcagcuaccugaacgagacccacuucagcgacgacaucgagcagcaggccgacaacaugaucaccgagaugcugcagaaggaguacauggagagacagggcaagaccccccugggccugguggaccuguucguguucagcaccagcuucuaccugaucagcaucuuccugcaccuggugaagauccccacccacagacacaucgugggcaagagcugccccaagccccacagacugaaccacaugggcaucugcagcugcggccuguacaagcagcccggcgugcccgugaaguggaagagauga

SEQ ID NO: 1447 - RNA, 1476 nt, Artificial Sequence
  derived and/or modified protein sequence (opt4) from LASV(G1897-SLE-2011;Clade IV)__AIT17210__GPC
augggccagaucgugaccuucuuccaggaggugccccacgugaucgaggaggugaugaacaucgugcugaucgcccugagcauccuggccgugcugaagggccuguacaaccuggccaccugcggccuggugggccuggugaccuuccugcugcugugcggcagaagcugcaccaccagccuguacaagggcguguacgagcugcagacccuggagcugaacauggagacccugaacaugaccaugccccugagcugcaccaagaacaacagccaccacuacaucauggugggcaacgagaccggccuggagcugacccugaccaacaccagcaucaucaaccacaaguucugcaaccugagcgacgcccacaagaagaaccuguacgaccacgcccugaugagcaucaucagcaccuuccaccugagcauccccaacuucaaccaguacgaggccaugagcugcgacuucaacggcggcaagaucagcgugcaguacaaccugagccacagcuacgccggcgacgccgccaaccacugcggcaccguggccaacggcgugcugcagaccuucaugagaauggccuggggcggcagcuacaucgcccuggacagcggcagagacagaugggacugcaucaugaccagcuaccaguaccugaucauccagaacaccaccugggaggaccacugccaguucagcagacccagccccaucggcuaccugggccugcugagccagagaaccagagacaucuacaucagcagaagacugcugggcaccuucaccuggacccugagcgacagcgagggcaaggacacccccggcggcuacugccugaccagauggaugcugaucgaggccgagcugaagugcuucggcaacaccgccguggccaagugcaacgagaagcacgacgaggaguucugcgacaugcugagacuguucgacuucaacaagcaggccauccagagacugaaggccgaggcccagaugagcauccagcugaucaacaaggccgugaacgcccugaucaacgaccagcugaucaugaagaaccaccugagagacaucaugggcauccccuacugcaacuacagcaaguacugguaccugaaccacaccaccaccggcaagaccagccugcccaagugcuggcuggugagcaacggcagcuaccugaacgagacccacuucagcgacgacaucgagcagcaggccgacaacaugaucaccgagaugcugcagaaggaguacauggagagacagggcaagaccccccugggccugguggaccuguucguguucagcaccagcuucuaccugaucagcaucuuccugagacuggugaagauccccacccacagacacaucgugggcaagcccugccccaagccccacagacugaaccacaugggcaucugcagcugcggccuguacaagcagcccggcgugcccgugaaguggaagagauga

SEQ ID NO: 1448 - RNA, 1476 nt, Artificial Sequence
  derived and/or modified protein sequence (opt4) from LASV(G1932-SLE-2011;Clade IV)__AIT17212__GPC
augggccagaucgugaccuucuuccaggaggugccccacgugaucgaggaggugaugaacaucgugcugaucgcccugagcauccuggccgugcugaagggccuguacaaccuggccaccugcggccuggugggccuggugaccuuccugcugcugugcggcagaagcugcaccaccagccuguacaagggcguguacgagcugcagacccuggagcugaacauggagacccugaacaugaccaugccccugagcugcaccaagaacaacagccaccacuacaucauggugggcaacgagaccggccuggagcugacccugaccaacaccagcaucaucaaccacaaguucugcaaccugagcgacgcccacagaaagaaccuguacgaccacgcccugaugagcaucaucagcaccuuccaccugagcauccccaacuucaaccaguacgaggccaugagcugcgacuucaacggcggcaagaucagcgugcaguacaaccugagccacagcuacgccggcgacgccgccaaccacugcggcaccguggccaacggcgugcugcagaccuucaugagaauggccuggggcggcagcuacaucgcccuggacagcggcagaggcaagugggacugcaucaugaccagcuaccaguaccugaucauccagaacaccaccugggaggaccacugccaguucagcagacccagccccaucggcuaccugggccugcugagccagagaaccagagacaucuacaucagcagaagacugcugggcaccuucaccuggacccugagcgacagcgagggcaaggacacccccggcggcuacugccugaccagauggaugcugaucgaggccgagcugaagugcuucggcaacaccgccguggccaagugcaacgagaagcacgacgaggaguucugcgacaugcugagacuguucgacuucaacaagcaggccauccagagacugaaggccgaggcccagaugagcauccagcugaucaacaaggccgugaacgcccugaucaacgaccagcugaucaugaagaaccaccugagagacaucaugggcauccccuacugcaacuacagcaaguacugguaccugaaccacaccaccaccggcaagaccagccugcccagaugcuggcuggugagcaacggcagcuaccugaacgagacccacuucagcgacgacaucgagcagcaggccgacaacaugaucaccgagaugcugcagaaggaguacauggagagacagggcaagaccccccugggccugguggaccuguucguguucagcaccagcuucuaccugaucagcaucuuccugcaccuggugaagauccccacccacagacacaucgugggcaagcccugccccaagccccacagacugaaccacaugggcaucugcagcugcggccuguacaagcagcccggcgugcccgugaaguggaagagauga

SEQ ID NO: 1449 - RNA, 1476 nt, Artificial Sequence
  derived and/or modified protein sequence (opt4) from LASV(G1959-SLE-2011;Clade IV)__AIT17216__GPC
augggccagaucgugaccuucuuccaggaggugccccacgugaucgaggaggugaugaacaucgugcugaucgcccugagcauccuggccgugcugaagggccuguacaacuucgccaccugcggccuggugggccuggugaccuuccugcugcugugcggcagaagcugcaccaccagccuguacaagggcguguacgagcugcagacccuggagcugaacauggagacccugaacaugaccaugccccugagcugcaccaagaacaacagccaccacuacaucauggugggcaacgagaccggccuggagcugacccugaccaacaccagcaucaucaaccacaaguucugcaaccugagcgacgcccacaagaagaaccuguacgaccacgcccugaugagcaucaucagcaccuuccaccugagcauccccaacuucaaccaguacgaggccaugagcugcgacuucaacggcggcaagaucagcgugcaguacaaccugagccacagcuacgccggcgacgccgccaaccacugcggcaccguggccaacggcgugcugcagaccuucaugagaauggccuggggcggcagcuacaucgcccuggacagcggccacggcagaugggacugcaucaugaccagcuaccaguaccugaucauccagaacaccaccugggaggaccacugccaguucagcagacccagccccaucggcuaccugggccugcugagccagagaaccagagacaucuacaucagcagaagacugcugggcaccuucaccuggacccugagcgacagcgagggcaaggacacccccggcggcuacugccugaccagauggaugcugaucgaggccgagcugaagugcuucggcaacaccgccguggccaagugcaacgagaagcacgacgaggaguucugcgacaugcugagacuguucgacuucaacaagcaggccauccagagacugaaggccgaggcccagaugagcauccagcugaucaacaaggccgugaacgcccugaucaacgaccagcugaucaugaagaaccaccugagagacaucaugggcauccccuacugcaacuacagcaaguacugguaccugaaccacaccaccaccggcaagaccagccugcccaagugcuggcuggugagcaacggcagcuaccugaacgagacccacuucagcgacgacaucgagcagcaggccgacaacaugaucaccgagaugcugcagaaggaguacauggagagacagggcaagaccccccugggccugguggaccuguucguguucagcaccagcuucuaccugaucagcaucuuccugcaccuggugaagauccccacccacagacacaucgugggcaagcccugccccaagccccacagacugaacuacaugggcaucugcagcugcggccuguacaagcagcccggcgugcccgugagauggaagagauga

SEQ ID NO: 1450 - RNA, 1476 nt, Artificial Sequence
  derived and/or modified protein sequence (opt4) from LASV(G2141-SLE-2011;Clade IV)__AIT17224__GPC
augggccagaucgugaccuucuuccaggaggugccccacgugaucgaggaggugaugaacaucgugcugaucgcccugagcauccuggccgugcugaagggccuguacaacguggccaccugcggccugaucggccuggugaccuuccugcugcugugcggcagaagcugcaccaccacccuguacaagggcguguacgagcugcaggcccuggagcugaacauggagacccugaacaugaccaugccccugagcugcaccaagaacaacagccaccacuacaucagagugggcaacgacaccggccuggagcugacccugaccaacaccagcaucauccagcacaaguucugcaaccugagcgacgcccacaagaagaaccuguacgaccacacccugaugagcaucaucagcaccuuccaccugagcauccccaacuucaaccaguacgaggccaugagcugcgacuucaacggcggcaagaucagcgugcaguacaaccugagccacagcuacgccggcgacgccgccagccacugcggcaccguggccaacggcgugcugcagaccuucaugagaauggccuggggcggcagcuacaucgcccuggacagcggcagaggcaacugggacugcaucaugaccagcuaccaguaccugaucauccagaacaccaccugggaggaccacugccaguucagcagacccagccccaucggcuaccugggccugcugagccagagaaccagagacaucuacaucagcagaagacugcugggcaccuucaccuggacccugagcgacagcgagggcagagacacccccggcggcuacugccugaccagauggaugcugaucgaggccgagcugaagugcuucggcaacaccgccguggccaagugcaacgagaagcacgacgaggaguucugcgacaugcugagacuguucgacuucaacaagcaggccauccagagacugaagaccgaggcccagaugagcauccagcugaucaacaaggccgugaacgcccugaucaacgaccagcugaucaugaagaaccaccugagagacaucaugggcauccccuacugcaacuacagcaaguacugguaccugaacaacaccaucaccggcaagagcagccugcccaagugcuggcuggugagcaacggcagcuaccugaacgagacccacuucagcgacgacaucgagcaggaggccgacaacaugaucaccgagaugcugcagaaggaguacauggagagacagggcaagaccccccugggccugguggaccuguucguguucagcaccagcuucuaccugaucagcaucuuccugcaccuggugaagauccccacccacagacacaucgugggcaagcccugccccaagccccacagacugaaccacaugggcgugugcagcugcggccuguacaagcagcccggcgugcccgugagauggaagagauga

SEQ ID NO: 1451 - RNA, 1476 nt, Artificial Sequence
  derived and/or modified protein sequence (opt4) from LASV(G2147-SLE-2011;Clade IV)__AIT17228__GPC
augggccagaucgugaccuucuuccaggaggugccccacgugaucgaggaggugaugaacaucgugcugaucgcccugagcauccuggccgugcugaagggccuguacaacuucgccaccugcggccuggugggccugcugaccuuccugcugcugugcggcagaagcugcaccaccagccuguacaagggcguguacgagcugcagacccuggagcugaacauggagacccugaacaugaccaugccccugagcugcaccaagaacaacagccaccacuacaucauggugggcaacgagaccggccuggagcugacccugaccaacaccagcaucaucgaccacaaguucugcaaccugagcgacgcccacaagaagaaccuguacgaccacgcccugaugagcaucaucagcaccuuccaccugagcauccccaacuucaaccaguacgaggccaugagcugcgacuucaacggcggcaagaucagcgugcaguacaaccugagccacagcuacgccggcgacgccgccaaccacugcggcaccguggccaacggcgugcugcagaccuucaugagaauggccuggggcggcagcuacaucgcccuggacagcggcagaggcggcugggacugcaucaugaccagcuaccaguaccugaucauccagaacaccaccugggaggaccacugccaguucagcagacccagccccaucggcuaccugggccugcugagccagagaaccagagacaucuacaucagcagaagacugcugggcaccuucaccuggacccugagcgacagcgagggcaaggacacccccggcggcuacugccugaccagauggaugcugaucgaggccgagcugaagugcuucggcaacaccgccguggccaagugcaacgagaagcacgacgaggaguucugcgacaugcugagacuguucgacuucaacaagcaggccauccagagacugaaggccgaggcccagaugagcauccagcugaucaacaaggccgugaacgcccugaucaacgaccagcugaucaugaagaaccaccugagagacaucaugggcauccccuacugcaacuacagcaaguacugguaccugaaccacaccaccaccggcaagaccagccugcccaagugcuggcuggugagcaacggcagcuaccugaacgagacccacuucagcgacgacaucgagcagcaggccgacaacaugaucaccgagaugcugcagaaggaguacauggagagacagggcaagaccccccugggccugguggaccuguucguguucagcaccagcuucuaccugaucagcaucuuccugcaccuggugaagauccccacccacagacacaucgugggcaagagcugccccaagccccacagacugaaccacaugggcaucugcagcugcggccuguacaagcagcccggcgugcccgugaaguggaagagauga

SEQ ID NO: 1452 - RNA, 1476 nt, Artificial Sequence
  derived and/or modified protein sequence (opt4) from LASV(G2165-SLE-2011;Clade IV)__AIT17232__GPC
augggccagaucgugaccuucuuccaggaggugccccacgugaucgaggaggugaugaacaucgugcugaucgcccugagcauccuggccgugcugaagggccuguacaacuucgccaccugcggccuggugggccuggugaccuuccugcugcugugcggcagaagcugcaccaccagccuguacaagggcguguacgagcugcagacccuggagcugaacauggagacccugaacaugaccaugccccugagcugcaccaagaacaacagccaccacuacaucagagugggcaacgagaccggccuggagcugacccugaccaacaccagcaucaucaaccacaaguucugcaaccugagcgacgcccacaagaagaaccuguacgaccacgcccugaugagcaucaucagcaccuuccaccugagcauccccaacuucaaccaguacgaggccaugagcugcgacuucaacgagggcaagaucagcgugcaguacaaccugagccacagcuacgccggcgacgccgccaaccacugcggcaccguggccaacggcgugcugcagaccuucaugagaauggccuggggcggcagcuacaucgcccuggacagcggcagaggcaagugggacugcaucaugaccagcuaccaguaccugaucauccagaacaccaccugggaggaccacugccaguucagcagacccagccccaucggcuaccugggccugcugagccagagaaccagagacaucuacaucagcagaagacugcugggcaccuucaccuggacccugagcgacagcgagggcaaggacacccccggcggcuacugccugaccagauggaugcugaucgaggccgagcugaagugcuucggcaacaccgccguggccaagugcaacgagaagcacgacgaggaguucugcgacaugcugagacuguucgacuucaacaagcaggccaucgagagacugaaggccgaggcccagaugagcauccagcugaucaacaaggccgugaacgcccugaucaacgaccagcugaucaugaagaaccaccugagagacaucaugggcauccccuacugcaacuacagcaaguacugguaccugaaccacaccaccaccggcaagaccagccugcccaagugcuggcuggugagcaacggcagcuaccugaacgagacccacuucagcgacgacaucgagcagcaggccgacaacaugaucaccgagaugcugcagaaggaguacauggagagacagggcaagaccccccugggccugguggaccuguucguguucagcaccagcuucuaccugaucagcaucuuccugcaccuggugaagauccccacccacagacacaucgugggcaagagcugccccaagccccacagacugaaccacaugggcaucugcagcugcggccuguacaagcagcccggcgugcccgugaaguggaagagauga

SEQ ID NO: 1453 - RNA, 1476 nt, Artificial Sequence
  derived and/or modified protein sequence (opt4) from LASV(G2184-SLE-2011;Clade IV)__AIT17236__GPC
augggccagaucgugaccuucuuccaggaggugccccacgugaucgaggaggugaugaacaucgugcugaucgcccugagcauccuggccgugcugaagggccuguacaacuucgccaccugcggccuggugggccuggugaccuuccugcugcugugcggcagaagcugcaccaccagccuguacaagggcguguacgagcugcagacccuggagcugaacauggagacccugaacaugaccaugccccugagcugcaccaagaacaacagccaccacuacaucauggugggcaacgagaccggccuggagcugacccugaccaacaccagcaucaucaaccacaaguucugcaaccugagcgacgcccacaagaagaaccuguacgaccacgcccugaugagcaucaucagcaccuuccaccugagcauccccaacuucaaccaguacgaggccaugagcugcgacuucaacggcggcagaaucagcgugcaguacaaccugagccacagcuacgccggcgaggccgccaaccacugcggcaccguggccaacggcgugcugcagaccuucaugagaauggccuggggcggcagcuacaucgcccuggacagcggcagaggcaagugggacugcaucaugaccagcuaccaguaccugaucauccagaacaccaccugggaggaccacugccaguucagcagacccagccccaucggcuaccugggccugcugagccagagaaccagagacaucuacaucagcagaagacugcugggcaccuucaccuggacccugagcgacagcgagggcaaggacacccccggcggcuacugccugaccagauggaugcugaucgaggccgagcugaagugcuucggcaacaccgccguggccaagugcaacgagaagcacgacgaggaguucugcgacaugcugagacuguucgacuucaacaagcaggccauccagagacugaaggccgaggcccagaugagcauccagcugaucaacaaggccgugaacgcccugaucaacgaccagcugaucaugaagaaccaccugagagacaucaugggcauccccuacugcaacuacagcagauacugguaccugaaccacaccaccaccggcaagaccagccugcccaagugcuggcuggugagcaacggcagcuaccugaacgagacccacuucagcgacgacaucgagcagcaggccgacaacaugaucaccgagaugcugcagaaggaguacauggagagacagggcaagaccccccugggccugguggaccuguucguguucagcaccagcuucuaccugaucagcaucuuccugcaccuggugaagauccccacccacagacacaucgugggcaagagcugccccaagccccacagacugaaccacaugggcaucugcagcugcggccuguacaagcagcccggcgugcccgugaaguggaagagauga

SEQ ID NO: 1454 - RNA, 1476 nt, Artificial Sequence
  derived and/or modified protein sequence (opt4) from LASV(G2197-SLE-2011;Clade IV)__AIT17240__GPC
augggccagaucgugaccuucuuccaggaggugccccacgugaucgaggaggugaugaacaucgugcugaucgcccugagcauccuggccgugcugaagggccuguacaaccuggccaccugcggccuggugggccuggugaccuuccugcugcugugcggcagaagcugcaccaccagccuguacaagggcuucuacgagcugcagacccuggagcugaacauggagacccugaacaugaccaugccccugagcugcaccaagaacaacagccaccacuacaucagagugggcaacgagaccggccuggagcugacccugaccaacaccagcaucaucgaccacaaguucugcaaccugagcgacgcccacaagaagaaccuguacgaccacgcccugaugagcaucaucagcaccuuccaccugagcauccccaacuucaaccaguacgaggccaugagcugcgacuucaacggcggcaagaucagcgugcaguacaaccugagccacagcuacgccggcgacgccgccaaccacugcggcaccguggccaacggcgugcugcagaccuucaugagaauggccuggggcggcagcuacaucgcccuggacagcggcagaggcagaugggacugcaucaugaccagcuaccaguaccugaucauccagaacaccaccugggaggaccacugccaguucagcagacccagccccaucggcuaccugggccugcugagccagaagaccagagacaucuacaucagcagaagacugcugggcaccuucaccuggacccugagcgacagcgagggcaaggacacccccggcggcuacugccugaccagauggaugcugaucgaggccgagcugaagugcuucggcaacaccgccguggccaagugcaacgagaagcacgacgaggaguucugcgacaugcugagacuguucgacuucaacaagcaggccauccagagacugaaggccgaggcccagaugagcauccagcugaucaacaaggccgugaacgcccugaucaacgaccagcugaucaugaagaaccaccugagagacaucaugggcauccccuacugcaacuacagcaaguacugguaccugaaccacaccaccaccggcaagaccagccugcccaagugcuggcuggugagcaacggcagcuaccugaacgagacccacuucagcgacgacaucgagcagcaggccgacaacaugaucaccgagaugcugcagaaggaguacauggagagacagggcaagaccccccugggccugguggaccuguucguguucagcaccagcuucuaccugaucagcaucuuccugcaccuggugaagauccccacccacagacacaucgugggcaagagcugccccaagccccacagacugaaccacaugggcaucugcagcugcggccuguacaagcagcccggcgugcccgugaaguggaagagauga

SEQ ID NO: 1455 - RNA, 1476 nt, Artificial Sequence
  derived and/or modified protein sequence (opt4) from LASV(G2222-SLE-2011;Clade IV)__AIT17244__GPC
augggccagaucgugaccuucuuccaggaggugccccacgugaucgaggaggugaugaacaucgugcugaucgcccugagcauccuggccgugcugaagggccuguacaaccuggccaccugcggccuggugggccuggugaccuuccugcugcugugcggcagaagcugcaccaccaaccuguacaagggcguguacgagcugcagacccuggagcugaacauggagacccugaacaugaccaugccccugagcugcaccaagaacagcagccaccacuacaucagagugggcaacgagaccggccuggagcugacccugaccaacaccagcaucaucgaccacaaguucugcaaccugagcgacgcccacaagaagaaccuguacgaccacgcccugaugagcaucaucagcaccuuccaccugagcauccccaacuucaaccaguacgaggccaugagcugcgacuucaacggcggcaagaucagcgugcaguacaaccugagccacagcuacgugggcgacgccgccgaccacugcggcaccguggccaacggcgugcugcagaccuucaugagaauggccuggggcggcagcuacaucgcccuggacagcggcagaggcaagugggacugcaucaucaccagcuaccaguaccugaucauccagaacaccaccugggaggaccacugccaguucagcagacccagccccaucggcuaccugggccugcugagccagagaaccagagacaucuacaucagcagaagacugcugggcaccuucaccuggacccugagcgacagcgagggcaaggacacccccggcggcuacugccugaccagauggaugcugaucgaggccgagcugaagugcuucggcaacaccgccguggccaagugcaacgagaagcacgacgaggaguucugcgacaugcugagacuguucgacuucaacaagcaggccauccagagacugaaggccgaggcccagaugagcauccagcugaucaacaaggccgugaacgcccugaucaacgaccagcugaucaugaagaaccaccugagagacaucaugggcauccccuacugcaacuacagcaaguacugguaccugaaccacaccaucaccggcaagaccagccugcccagaugcuggcuggugagcaacggcagcuaccugaacgagaccagauucagcgacgacaucgagcagcaggccgacaacaugaucaccgagaugcugcagaaggaguacauggagagacagggcaagaccccccugggccugguggaccuguucguguucagcaccagcuucuaccugaucagcaucuuccugcaccuggugaagauccccacccacagacacaucgugggcaagcccugccccaagccccacagacugaaccacaugggcaucugcagcugcggccuguacaagcagcccggcgugcccgugaaguggaagagauga

SEQ ID NO: 1456 - RNA, 1476 nt, Artificial Sequence
  derived and/or modified protein sequence (opt4) from LASV(G2230-SLE-2012;Clade IV)__AIT17246__GPC
augggccagaucgugaccuucuuccaggaggugccccacgugaucgaggaggugaugaacaucgugcugaucgcccugagccugcuggccgugcugaagggccuguacaacguggccaccugcggccugaucggccugaucaccuuccugcugcugugcggcagaagcugcaccaccaaccuguacaagggcguguacgagcugcagacccuggagcugaacauggagacccugaacaugaccaugccccugagcugcaccaagaacagcagccaccacuacaucauggugggcaacgagaccggccuggagcugacccugaccaacaccagcaucaucaaccacaaguucugcaaccugagcgacgcccacaagaagaaccuguacgaccacacccugaugagcaucaucagcaccuuccaccugagcauccccaacuucaaccaguacgaggccaugagcugcgacuucaacggcggcaagaucagcgugcaguacaaccugagccacagcuacgccguggacgccgccaaccacugcggcaccguggccaacggcauccugcagaccuucaugagaauggccuggggcggcagcuacaucgcccuggacagcggcagaggcaacugggacugcaucaugaccagcuaccaguaccugaucauccagaacaccaccugggaggaccacugccaguucagcagacccagccccaucggcuaccugggccugcugagccagagaaccagagacaucuacaucagcagaagacugcugggcaccuucaccuggacccugagcgacagcgagggcaacgacacccccggcggcuacugccugaccagauggaugcugaucgaggccgagcugaagugcuucggcaacaccgccguggccaagugcaacgagaagcacgacgaggaguucugcgacaugcugagacuguucgacuucaacaagcaggccauccagagacugaaggccgaggcccagaugagcauccagcugaucaacaaggccgugaacgcccugaucaacgaccagcugaucaugaagaaccaccugagagacaucaugggcauccccuacugcaacuacagcaaguacugguaccugaaccacaccaccaccggcaagaccagccugcccaagugcuggcuggugagcaacggcagcuaccugaacgagacccacuucagcgacgacaucgagcagcaggccgacaacaugaucaccgagaugcugcagaaggaguacauggagagacagggcaagaccccccugggccugguggaccuguucguguucagcaccagcuucuaccugaucagcaucuuccugcaccuggugaagauccccacccacagacacaucgugggcaagcccugccccaagccccacagacugaaccacaugggcaucugcagcugcggccuguacaagcagcccggcgugcccgugagauggaagagauga

SEQ ID NO: 1457 - RNA, 1476 nt, Artificial Sequence
  derived and/or modified protein sequence (opt4) from LASV(G2259-SLE-2012;Clade IV)__AIT17250__GPC
augggccagaucgugaccuucuuccaggaggugccccacgugaucgaggaggugaugaacaucgugcugaucgcccugagccugcuggccgugcugaagggccuguacaacguggccaccugcggccugaucggccuggugaccuuccugcugcugugcggcagaagcugcaccaccaaccuguacaagggcguguacgagcugcagacccuggagcugaacauggagacccugaacaugaccaugccccugagcugcaccaagaacaacagccaccacuacaucauggugggcaacgagaccggccuggagcugacccugaccaacaccagcaucaucaaccacaaguucugcaaccugagcgacgcccacaagaagaaccuguacgaccacacccugaugagcaucaucagcaccuuccaccugagcauccccaacuucaaccaguacgaggccaugagcugcgacuucaacggcggcaagaucagcgugcaguacaaccugagccacagcuacgccguggacgccgccaaccacugcggcaccguggccaacggcgugcugcagaccuucaugagaauggccuggggcggcagcuacaucgcccuggacagcggcagaggcaacugggacugcaucaugaccagcuaccaguaccugaucauccagaacaccaccugggaggaccacugccaguucagcagacccagccccaucggcuaccugggccugcugagccagagaaccagagacaucuacaucagcagaagacugcugggcaccuucaccuggacccugagcgacagcgagggcaacgacacccccggcggcuacugccugaccagauggaugcugaucgaggccgagcugaagugcuucggcaacaccgccguggccaagugcaacgagaagcacgacgaggaguucugcgacaugcugagacuguucgacuucaacaagcaggccauccagagacugaaggccgaggcccagaugagcauccagcugaucaacaaggccgugaacgcccugaucaacgaccagcugaucaugaagaaccaccugagagacaucaugggcauccccuacugcaacuacagcaaguacugguaccugaaccacaccaccaccggcaagaccagccugcccaagugcuggcuggugagcaacggcagcuaccugaacgagacccacuucagcgacgacaucgagcagcaggccgacaacaugaucaccgagaugcugcagaaggaguacauggagagacagggcaagaccccccugggccugguggaccuguucguguucagcaccagcuucuaccugaucagcaucuuccugcaccuggugaagauccccacccacagacacaucgugggcaagcccugccccaagccccacagacugaaccacaugggcaucugcagcugcggccuguacaagcagcccggcgugcccgugagauggaagagauga

SEQ ID NO: 1458 - RNA, 1476 nt, Artificial Sequence
  derived and/or modified protein sequence (opt4) from LASV(G2263-SLE-2012;Clade IV)__AIT17254__GPC
augggccagaucgugaccuucuuccaggaggugccccacgugaucgaggaggugaugaacaucgugcugaucgcccugagcauccuggccgugcugaagggccuguacaacuucgccaccugcggcaucgugggccuggugaccuuccugcugcugugcggcagaagcugcaccaccagccuguacaagggcguguacgagcugcagacccuggagcugaacauggagacccugaacaugaccaugccccugagcugcaccaagaacaacagccaccacuacaucauggugggcaacgagaccggccuggagcugacccugaccaacaccagcaucaucaaccacaaguucugcaaccugagcgacgcccacaagaagaaccuguacgaccacgcccugaugagcaucaucagcaccuuccaccugagcauccccaacuucaaccaguacgaggccaugagcugcgacuucaacggcggcaagaucagcgugcaguacaaccugagccacagcuacgccggcgacgccgccaaccacugcggcaccguggccaacggcgugcugcagaccuucaugagaauggccuggggcggcagcuacaucgcccuggacagcggcagagacagaugggacugcaucaugaccagcuaccaguaccugaucauccagaacaccaccugggaggaccacugccaguucagcagacccagccccaucggcuaccugggccugcugagccagagaaccagagacaucuacaucagcagaagacugcugggcaccuucaccuggacccugagcgacagcgagggcaagaacacccccggcggcuacugccugaccagauggaugcugaucgaggccgagcugaagugcuucggcaacaccgccguggccaagugcaacgagaagcacgacgaggaguucugcgacaugcugagacuguucgacuucaacaagcaggccauccagagacugaaggccgaggcccagaugagcaucagccugaucaacaaggccgugaacgcccugaucaacgaccagcugaucaugaagaaccaccugagagacaucaugggcauccccuacugcaacuacagcaaguacugguaccugaaccacaccaccaccggcaagaccagccugcccagaugcuggcuggugagcaacggcagcuaccugaacgagacccacuucagcgacgacaucgagcagcaggccgacaacaugaucaccgagaugcugcagaaggaguacauggacagacagggcaagaccccccugggccugguggaccuguucguguucagcaccagcuucuaccugaucagcaucuuccugcaccuggugaagauccccacccacagacacaucgugggcaagaccugccccaagccccacagacugaaccacaugggcaucugcagcugcggccuguacaagcagcccggcgugcccgugaaguggaagagauga

SEQ ID NO: 1459 - RNA, 1476 nt, Artificial Sequence
  derived and/or modified protein sequence (opt4) from LASV(G2280-SLE-2012;Clade IV)__AIT17258__GPC
augggccagaucgugaccuucuuccaggaggugccccacgugaucgaggaggugaugaacaucgugcugaucgcccugagcauccuggccgugcugaagggccuguacaacaucgccaccugcggccuggugggccuggugaccuuccugcugcugugcggcagaagcugcaccaccagccuguacaagggcguguacgagcugcagacccuggagcugaacauggagacccugaacaugaccaugccccugagcugcaccaagaacaacagccaccacuacaucauggugggcaacgagaccggccuggagcugacccugaccaacaccagcaucaucaaccacaaguucugcaaccugagcgacgcccacaagaagaaccuguacgaccacgcccugaugagcaucgugagcaccuuccaccugagcauccccaacuucaaccaguacgaggccaugagcugcgacuucaacggcggcaagaucagcgugcaguacaaccugagccacagcuacgccguggacgccgccaaccacugcggcaccguggccaacggcgugcugcagaccuucaugagaauggccuggggcggcagcuacaucgcccuggacagcggcagaggcggcugggacugcaucaugaccagcuaccaguaccugaucauccagaacgugaccugggaggaccacugccaguucagcagacccagccccaucggcuaccugggccugcugagccagagaaccagagacguguacaucagcagaagacugcugggcaccuucaccuggacccugagcgacagcgagggcaacgacacccccggcggcuacugccugaccagauggaugcugaucgaggccgagcugaagugcuucggcaacaccgccguggccaagugcaacgagaagcacgacgaggaguucugcgacaugcugagacuguucgacuucaacaagcaggccauccagagacugaaggccgaggcccagaugagcauccagcugaucaacaaggccgugaacgcccugaucaacgaccagcugaucaugaagaaccaccugagagacaucaugggcauccccuacugcaacuacagcaaguacugguaccugaaccacaccaccaccggcaagaccagccugcccaagugcuggcuggugagcaacggcagcuaccugaacgagacccacuucagcgacgacaucgagcagcaggccgacaacaugaucaccgagaugcugcagaaggaguacauggagagacagggcaagaccccccugggccugguggaccuguucguguucagcaccagcuucuaccugaucagcaucuuccugcaccuggugaagauccccacccacagacacaucgugggcaagcccugccccaagccccacagacugaaccacaugggcaucugcagcugcggccuguacaagcagcccggcgugcccgugaaguggaagagauga

SEQ ID NO: 1460 - RNA, 1476 nt, Artificial Sequence
  derived and/or modified protein sequence (opt4) from LASV(G2295-SLE-2012;Clade IV)__AIT17262__GPC
augggccagaucgugaccuucuuccaggaggugccccacgugaucgaggaggugaugaacaucgugcugaucgcccugagcauccuggccgugcugaagggccuguacaaccuggccaccugcggccuggugggccuggugaccuuccugcugcugugcggcagaagcugcaccaccagccuguacaagggcguguacgagcugcagacccuggagcugaacauggagacccugaacaugaccaugccccugagcugcaccaagaacaacagccaccacuacaucauggugggcaacgagaccggccuggagcugacccugaccaacaccagcaucaucaaccacaaguucugcaaccugagcgacgcccacaagaagaaccuguacgaccacgcccugaugagcaucaucagcaccuuccaccugagcauccccaacuucaaccaguacgaggccaugagcugcgacuucaacggcggcaagaucagcgugcaguacaaccugagccacagcuacgccggcgacgccgccacccacugcggcaccguggccaacggcgugcugcagaccuucaugagaauggccuggggcggcagcuacaucgcccuggacagcggcagaggcaagugggacugcaucaugaccagcuaccaguaccugaucauccagaacaccaccugggaggaccacugccaguucagcagacccagccccaucggcuaccugggccugcugagccagagaaccagagacaucuacaucagcagaagacugcugggcaccuucaccuggacccugagcgacagcgagggcaaggacacccccggcggcuacugccugaccagauggaugcugaucgaggccgagcugaagugcuucggcaacaccgccguggccaagugcaacgagaagcacgacgaggaguucugcgacaugcugagacuguucgacuucaacaagcaggccauccagagacugaagaccgaggcccagaugagcauccagcugaucaacaaggccgugaacgcccugaucaacgaccagcugaucaugaagaaccaccugagagacaucaugggcauccccuacugcaacuacagcaaguacugguaccugaaccacaccaccaccggcaagaccagccugcccagaugcuggcuggugagcaacggcagcuaccugaacgagacccacuucagcgacgacaucgagcagcaggccgacaacaugaucaccgagaugcugcagaaggaguacauggagagacagggcaagaccccccugggccugguggaccuguucguguucagcaccagcuucuaccugaucagcaucuuccugcaccuggugaagauccccacccacagacacaucgugggcaagcccugccccaagccccacagacugaaccacaugggcaucugcagcugcggccuguacaagcagcccggcgugcccgugaaguggaagagauga

SEQ ID NO: 1461 - RNA, 1476 nt, Artificial Sequence
  derived and/or modified protein sequence (opt4) from LASV(G2315-SLE-2012;Clade IV)__AIT17266__GPC
augggccagaucgugaccuucuuccaggaggugccccacgugaucgaggaggugaugaacaucgugcugaucgcccugagcauccuggccgugcugaagggccuguacaaccuggccaccugcggccuggugggccuggugaccuuccugcugcugugcggcagaagcugcaccaccagccuguacaagggcguguacgagcugcagacccuggagcugaacauggagacccugaacaugaccaugccccugagcugcaccaagaacaacagccaccacuacaucauggugggcaacgagaccggccuggagcugacccugaccaacaccagccugaucaaccacaaguucugcaaccugagcgacgcccacaagaagaaccuguacgaccacgcccugaugagcaucaucagcaccuuccaccugagcauccccaacuucaaccaguacgaggccaugagcugcgacuucaacggcggcaagaucagcgugcaguacaaccugagccacagcuacgccguggacgccgccaaccacugcggcaccguggccaacggcgugcugcagaccuucaugagaauggccuggggcggcagcuacaucgcccuggacagcggcagaggcggcugggacugcaucaugaccagcuaccaguaccugaucauccagaacaccaccugggaggaccacugccaguucagcagacccagccccaucggcuaccugggccugcugagccagagaaccagagacaucuacaucagcagaagacugcugggcaccuucaccuggacccugagcgacagcgagggcaaggacacccccggcggcuacugccugaccagauggaugcugaucgaggccgagcugaagugcuucggcaacaccgccguggccaagugcaacgagaagcacgacgaggaguucugcgacaugcugagacuguucgacuucaacaagcaggccauccagagacugaaggccgaggcccagaugagcauccagcugaucaacaaggccgugaacgcccugaucaacgaccagcugaucaugaagaaccaccugagagacaucaugggcauccccuacugcaacuacagcaaguacugguaccugaaccacaccaccaccggcagaaccagccugcccagaugcuggcuggugagcaacggcagcuaccugaacgagacccacuucagcgacgacaucgagcagcaggccgacaacaugaucaccgagaugcugcagaaggaguacauggagagacagggcaagaccccccugggccugguggaccuguucguguucagcaccagcuucuaccugaucagcaucuuccugcaccuggugaagauccccacccacagacacaucgugggcaagagcugccccaagccccacagacugaaccacaugggcaucugcagcugcggccuguacaagcagcccggcgugcccgugaaguggaagagauga

SEQ ID NO: 1462 - RNA, 1476 nt, Artificial Sequence
  derived and/or modified protein sequence (opt4) from LASV(G2318-SLE-2012;Clade IV)__AIT17270__GPC
augggccagaucgugaccuucuuccaggaggugccccacgugaucgaggaggugaugaacaucgugcugaucgcccugagcgugcuggccgugcugaagggccuguacaacuucgccaccugcggccuggugggccuggugaccuuccugcugcugugcggcagaagcugcagcaccagcguguacaagggcguguacgagcugcagacccuggagcugaacauggagacccugaacaugaccaugccccugagcugcaccaagaacaacagccaccacuacaucauggugggcaacgagaccggccuggagcugacccugaccaacaccagcaucaucaaccacaaguucugcaaccugagcgacgcccacaagaagaaccuguacgaccacgcccugaugagcaucaucagcaccuuccaccugagcauccccaacuucaaccaguacgaggccaugagcugcgacuucaacggcggcaagaucagcgugcaguacaaccugagccacagcuacgccguggacgccgccaaccacugcggcaccguggccaacggcgugcugcagaccuucaugagaauggccuggggcggcagcuacaucgcccuggacagcggccacggcggcugggacugcaucaugaccaacuaccaguaccugaucauccagaacaccaccugggaggaccacugccaguucagcagacccagccccaucggcuaccugggccugcugagccagagaaccagagacaucuacaucagcagaagacugcugggcaccuucaccuggacccugagcgacagcgagggcaaggacacccccggcggcuacugccugaccagauggaugcugaucgaggccgagcugaagugcuucggcaacaccgccguggccaagugcaacgagaagcacgacgaggaguucugcgacaugcugagacuguucgacuucaacaagcaggccauccagagacugaaggccgaggcccagaugagcauccagcugaucaacaaggccgugaacgcccugaucaacgaccagcugaucaugaagaaccaccugagagacaucaugggcauccccuacugcaacuacagcaaguacugguaccugaaccacaccaccaccggcagaaccagccugcccaagugcuggcuggugagcaacggcagcuaccugaacgagacccacuucagcgacgacaucgagcagcaggccgacaacaugaucaccgagaugcugcagagagaguacauggagagacagggcaagaccccccugggccugguggaccuguucguguucagcaccagcuucuaccugaucagcaucuuccugcaccuggugaagauccccacccacagacacaucgugggcaagagcugccccaagccccacagacugaaccacaugggcaucugcagcugcggccuguacaagcagcccggcgugcccgugaaguggaagagauga

SEQ ID NO: 1463 - RNA, 1476 nt, Artificial Sequence
  derived and/or modified protein sequence (opt4) from LASV(G2363-SLE-2012;Clade IV)__AIT17274__GPC
augggccagaucgugaccuucuuccaggaggugccccacgugaucgaggaggugaugaacaucgugcugaucgcccugagcauccuggccgugcugaagggccuguacaacguggccaccugcggccugaccggccugguggccuuccugcugcugugcggcagaagcugcaccaccacccuguacaagggcguguacgagcugcaggcccuggagcugaacauggagacccugaacaugaccaugccccugagcugcaccaagaacaacagccaccacuacaucagagugggcaacgagaccggccuggagcugacccugaccaacaccagcaucaucgagcacagauucugcaaccugagcgacgcccacaagaagaaccuguacgaccacgcccugaugagcaucaucagcaccuuccaccugagcauccccaacuucaaccaguacgaggccaugagcugcgacuucaacggcggcaagaucagcgugcaguacaaccugagccacagcuacgccguggacgccgccaaccacugcggcaccguggccaacggcgugcugcagaccuucaugagaauggccuggggcggcagcuacaucgcccuggacagcggcagaaacggcugggacugcaucaugaccagcuaccaguaccugaucauccagaacaccaccugggaggaccacugccaguucagcagacccagccccaucggcuaccugggccugcugagccagagaaccagagacaucuacaucagcagaagacugcugggcaccuucaccuggacccugagcgacagcgagggcaaggacacccccggcggcuacugccugaccagauggaugcugaucgaggccgagcugaagugcuucggcaacaccgccguggccaagugcaacgagaagcacgacgaggaguucugcgacaugcugagacuguucgacuucaacaagcaggccauccagagacugaaggccgaggcccagaugagcauccagcugaucaacaaggccgugaacgcccugaucaacgaccagcugaucaugaagaaccaccugagagacaucaugggcauccccuacugcaacuacagcaaguacugguaccugaacaacaccgccaccggcaagaccagccugcccagaugcuggcuggugagcaacggcagcuaccugaacgagacccacuucagcgacgacaucgagcagcaggccgacaacaugaucaccgagaugcugcagaaggaguacauggagagacagggcaagaccccccugggccugguggaccuguucguguucagcaccagcuucuaccugaucagcaucuuccugcaccuggugaagauccccacccacagacacaucgugggcaagcccugccccaagccccacagacugaaccacaugggcaucugcagcugcggccuguacaagcagcccggcgcccccgugagauggaagagauga

SEQ ID NO: 1464 - RNA, 1476 nt, Artificial Sequence
  derived and/or modified protein sequence (opt4) from LASV(G2384-SLE-2012;Clade IV)__AIT17276__GPC
augggccagaucgugaccuucuuccaggaggugccccacgugaucgaggaggugaugaacaucgugcugaucgcccugagcauccuggccgugcugaagggccuguacaacuucgccaccugcggccuggugggccuggugaccuuccugcugcugugcggcagaagcugcaccaccagccuguacaagggcguguacgagcugcagacccuggagcugaacauggagacccugaacaugaccaugccccugagcugcaccaagaacaacagccaccacuacaucauggugggcaacgagaccggccuggagcugacccugaccaacaccagcaucaucaaccacaaguucugcaaccugagcgacgcccacaagaagaaccuguacgaccacgcccugaugagcaucaucagcaccuuccaccugagcauccccaacuucaaccaguacgaggccaugagcugcgacuucaacggcggcaagaucagcgugcaguacaaccugagccacagcuacgccggcgacgccgccaaccacugcggcaccguggccaacggcgugcugcagaccuucaugagaauggccuggggcggcagcuacaucgcccuggacagcggccacggcaagugggacugcaucaugaccagcuaccaguaccugaucauccagaacaccaccugggaggaccacugccaguucagcagacccagccccaucggcuaccugggccugcugagccagagaaccagagacaucuacaucagcagaagacugcugggcaccuucaccuggacccugagcgacagcgagggcaaggacacccccggcggcuacugccugaccagauggaugcugaucgaggccgagcugaagugcuucggcaacaccgccguggccaagugcaacgagaagcacgacgaggaguucugcgacaugcugagacuguucgacuucaacaagcaggccauccagagacugaaggccgaggcccagaugagcauccagcugaucaacaaggccgugaacgcccugaucaacgaccagcugaucaugaagaaccaccugagagacaucaugggcauccccuacugcaacuacagcaaguacugguaccugaaccacaccaccaccggcaagaccagccugcccaagugcuggcuggugagcaacggcagcuaccugaacgagacccacuucagcgacgacaucgagcagcaggccgacaacaugaucaccgagaugcugcagaaggaguacauggagagacagggcaagaccccccugggccugguggaccuguucguguucagcaccagcuucuaccugaucagcaucuuccugcaccuggugaagauccccacccacagacacaucgugggcaagagcugccccaagccccacagacugaaccacaugggcaucugcagcugcggccuguacaagcagcccggcgugcccgugagauggaagagauga

SEQ ID NO: 1465 - RNA, 1473 nt, Artificial Sequence
  derived and/or modified protein sequence (opt4) from LASV(G2392-SLE-2012;Clade IV)__AIT17280__GPC
augggccagaucgugaccuucuuccaggaggugccccacgugaucgaggaggugaugaacaucgugcugaucgcccugagcauccuggccgugcugaagggccuguacaacuucgccaccugcggccuggugggccuggugaccuuccugcugcugugcggcagaagcugcaccaccagccuguacaagggcguguacgagcugcagacccuggagcugaacauggagacccugaacaugaccaugccccugagcugcaccaagaacaacagccaccacuacaucagagugggcaacgagaccggccuggagcugacccugaccaacaccagcaucaucgaccacaaguucugcaaccugagcgacgcccacaagaagaaccuguacgaccacgcccugaugagcaucaucagcaccuuccaccugagcauccccaacuucaaccaguacgaggccaugagcugcgacuucaacggcggcaagaucagcgugcaguacaaccugagccacagcuacgccggcgacgccgccaaccacugcggcaccguggccaacggcgugcugcagaccuucaugagaauggccuggggcggcagcuacaucgcccuggacagcggccacgagugggacugcaucaugaccagcuaccaguaccugaucauccagaacaccaccugggacaaccacugccaguucagcagacccagccccaucggcuaccugggccugcugagccagagaaccagagacaucuacaucagcagaagacugcugggcaccuucaccuggacccugagcgacagcgagggcaaggacacccccggcggcuacugccugaccagauggaugcugaucgaggccgagcugaagugcuucggcaacaccgccguggccaagugcaacgagaagcacgacgaggaguucugcgacaugcugagacuguucgacuucaacaagcaggccauccagagacugaagguggaggcccagaugagcauccagcugaucaacaaggccgugaacgcccugaucaacgaccagcugaucaugaagaaccaccugagagacaucaugggcauccccuacugcaacuacagcaaguacugguaccugaaccacaccaccaccggcaagaccagccugcccaagugcuggcuggugagcaacggcagcuaccugaacgagacccacuucagcgacgacaucgagcagcaggccgacaacaugaucaccgagaugcugcagaaggaguacauggagagacagggcaagaccccccugggccugguggaccuguucguguucagcaccagcuucuaccugaucagcaucuuccugcaccuggugaagauccccacccacagacacaucgugggcaagagcugccccaagccccacagacugaaccacaugggcaucugcagcugcggcuucuacaagcagcccggcgugcccgugaaguggaagagauga

SEQ ID NO: 1466 - RNA, 1476 nt, Artificial Sequence
  derived and/or modified protein sequence (opt4) from LASV(G2405-SLE-2012;Clade IV)__AIT17284__GPC
augggccagaucgugaccuucuuccaggaggugccccacgugaucgaggaggugaugaacaucgugcugaucgcccugagcgugcuggccgugcugaagggccuguacaacuucgccaccugcggcaucgugggccuggugaccuuccugcugcugugcggcagaagcugcaccaccagccuguacaagggcguguacgagcugcagacccuggagcugaacauggagacccugaacaugaccaugccccugagcugcaccaagaacaacagccaccacuacaucauggugggcaacgacaccggccuggagcugacccugaccaacaccagcaucaucaaccacaaguucugcaaccugagcgacgcccacaagaagaaccuguacgaccacgcccugaugagcaucaucagcaccuuccaccugagcauccccaacuucaaccaguacgaggccaugagcugcgacuucaacggcggcaagaucagcgugcaguacaaccugagccacagcuacgccggcgacgccgccgaccacugcggcaccguggccaacggcgugcugcagaccuucaugagaauggccuggggcggcagcuacaucgcccuggacagcggcagaggcagaugggacugcaucaugaccagcuaccaguaccugaucauccagaacaccaccugggaggaccacugccaguucagcagacccagccccaucggcuaccugggccugcugagccagagaaccagagacaucuacaucagcagaagacugcugggcaccuucaccuggacccugagcgacagcgagggcaaggacacccccggcggcuacugccugaccagauggaugcugaucgaggccgagcugaagugcuucggcaacaccgccguggccaagugcaacgagaagcacgacgaggaguucugcgacaugcugagacuguucgacuucaacaagcaggccauccagagacugaaggccgaggcccagaugagcauccagcugaucaacaaggccgugaacgcccugaucaacgaccagcugaucaugaagaaccaccugagagacaucaugggcauccccuacugcaacuacagcaaguacugguaccugaaccacaccaccaccggcaagaccagccugcccaagugcuggcuggugagcaacggcagcuaccugaacgagacccacuucagcgacgacaucgagcagcaggccgacaacaugaucaccgagaugcugcagaaggaguacauggagagacagggcaagaccccccugggccugguggaccuguucguguucagcaccagcuucuaccugaucagcaucuuccugcaccuggugaagauccccacccacagacacaucgugggcaagcccugccccaagccccacagacugaaccacaugggcaucugcagcugcggccuguacaagcagcccggcgugcccgugaaguggaagagauga

SEQ ID NO: 1467 - RNA, 1476 nt, Artificial Sequence
  derived and/or modified protein sequence (opt4) from LASV(G2427-SLE-2012;Clade IV)__AIT17288__GPC
augggccagaucgugaccuucuuccaggaggugccccacgugaucgaggaggugaugaacaucgugcugaucgcccugagcauccuggccgugcugaagggccuguacaacuucgccaccugcggccuggugggccuggugaccuuccugcugcugugcggcagaagcugcaccaccagccuguacaagggcguguacgagcugcagacccuggagcugaacauggagacccugaacaugaccaugccccugagcugcaccaagaacaacagccaccacuacaucauggugggcaacgagaccggccuggagcugacccugaccaacaccagcaucaucaaccacaaguucugcaaccugagcgacgcccacaagaagaaccuguacgaccacgcccugaugagcaucaucagcaccuuccaccugagcauccccaacuucaaccaguacgaggccaugagcugcgacuucaacggcggcaagaucagcgugcaguacaaccugagccacagcuacgccguggacgccgccaaccacugcggcaccguggccaacggcgugcugcagaccuucaugagaauggccuggggcggcggcuacaucgcccuggacagcggcagaggcaacugggacugcaucaugaccagcuaccaguaccugaucauccagaacaccaccugggaggaccacugccaguucagcagacccagccccaucggcuaccugggccugcugagccagagaaccagagacaucuacaucagcagaagacugcugggcaccuucaccuggacccugagcgacagcgagggcaaggacacccccggcggcuacugccugaccagauggaugcugaucgaggccgagcugaagugcuucggcaacaccgccguggccaagugcaacgagaagcacgacgaggaguucugcgacaugcugagacuguucgacuucaacaagcaggccauccagagacugaaggccgaggcccagaugagcauccagcugaucaacaaggccgugaacgcccugaucaacgaccagcugaucaugaagaaccaccugagagacaucaugggcauccccuacugcaacuacagcaaguacugguaccugaaccacaccgugaccggcaagaccagccugcccaagugcuggcuggugagcaacggcagcuaccugaacgagacccacuucagcgacgacaucgagcagcaggccgacaacaugaucaccgagaugcugcagaaggaguacauggagagacagggcaagaccccccugggccugguggaccuguucguguucagcaccagcuucuaccugaucagcaucuuccugcaccuggugaagauccccacccacagacacaucgugggcaagagcugccccaagccccacagacugaaccacaugggcaucugcagcugcggccuguacaagcagcccggcgugcccgugagauggaagagauga

SEQ ID NO: 1468 - RNA, 1476 nt, Artificial Sequence
  derived and/or modified protein sequence (opt4) from LASV(G2431-SLE-2012;Clade IV)__AIT17292__GPC
augggccagaucgugaccuucuuccaggaggugccccacgugaucgaggaggugaugaacaucgugcugaucgcccugagcaucauggccgugcugaagggccuguacaacaucgccaccugcggccuggugggccuggugaccuuccugcugcugugcggcagaagcugcaccaccacccuguacaagggcguguacgagcugcagacccuggagcugaacauggagacccugaacaugaccaugccccugagcugcaccaagaacaacagccaccacuacaucauggugggcaacgagaccggccuggagcugacccugaccaacaccagcaucaucaaccacaaguucugcaaccugagcgacgcccacaagaagaaccuguacgaccacgcccugaugagcaucaucagcaccuuccaccugagcauccccaacuucaaccaguacgaggccaugagcugcgacuucaacggcggcaagaucagcgugcaguacaaccugagccacagcuacgccggcgacgccgccaaccacugcggcaccguggccaacggcgugcugcagaccuucaugagaauggccuggggcggcagcuacaucgcccuggacagcggccacggcggcugggacugcaucaugaccagcuaccaguaccugaucauccagaacaccaccugggaggaccacugccaguucaccagacccagccccaucggcuaccugggccugcugagccagagaaccagagacaucuacaucagcagaagacugcugggcaccuucaccuggacccugagcgacagcgagggcaacgacacccccggcggcuacugccugaccagauggaugcugaucgaggccgagcugaagugcuucggcaacaccgccguggccaagugcaacgagaagcacgacgaggaguucugcgacaugcugagacuguucgacuucaacaagcaggccauccagagacugagagccgaggcccagaugagcauccagcugaucaacaaggccgugaacgcccugaucaacgaccagcugaucaugaagaaccaccugagagacaucaugggcauccccuacugcaacuacagcaaguacugguaccugaaccacaccaccaccggcagaaccagccugcccagaugcuggcuggugagcaacggcagcuaccugaacgagacccacuucagcgacgacaucgagcagcaggccgacaacaugaucaccgagaugcugcagaaggaguacauggagagacagggcaagaccccccugggccugguggaccuguucguguucagcaccagcuucuaccugaucagcaucuuccugcaccugaucaagauccccacccacagacacaucgugggcaagcccugccccaagccccacagacugaaccacaugggcgugugcagcugcggccuguacaagcagcccggcgugcccgugagauggaagagauga

SEQ ID NO: 1469 - RNA, 1476 nt, Artificial Sequence
  derived and/or modified protein sequence (opt4) from LASV(G2511-SLE-2012;Clade IV)__AIT17294__GPC
augggccagaucgugaccuucuuccaggaggugccccacgugaucgaggaggugaugaacaucgugcugaucgcccugagcauccuggccgugcugaagggccuguacaaccuggccaccugcggccuggugggccuggugaccuuccugcugcugugcggcagaagcugcaccaccagccuguacaagggcguguacgagcugcagacccuggagcugaacauggagacccugaacaugaccaugccccugagcugcaccaagaacaacagccaccacuacaucauggugggcaacgagaccggccuggagcugacccugaccaacaccagcaucaucgaccacaaguucugcaaccugagcgacgcccacaagaagaaccuguacgaccacgcccugaugagcaucaucagcaccuuccaccugagcauccccaacuucaaccaguacgaggccaugagcugcgacuucaacggcggcaagaucagcgugcaguacaaccugagccacagcuacgccggcgacgccgccaaccacugcggcaccguggccaacggcgugcugcagaccuucaugagaauggccuggggcggcagcuacaucgcccuggacagcggcagaggcggcugggacugcaucaugaccagcuaccaguaccugaucauccagaacaccaccugggaggaccacugccaguucagcagacccagccccgugggcuaccugggccugcugagccagagaaccagagacaucuacaucagcagaagacugcugggcaccuucaccuggacccugagcgacagcgagggcaaggacacccccggcggcuacugccugaccagauggaugcugaucgaggccgagcugaagugcuucggcaacaccgccguggccaagugcaacgagaagcacgacgaggaguucugcgacaugcugagacuguucgacuucaacaagcaggccauccagagacugaagaccgaggcccagaugagcauccagcugaucaacaaggccgugaacgcccugaucaacgaccagcugaucaugaagaaccaccugagagacaucaugggcauccccuacugcaacuacagcaaguacugguaccugaaccacaccaccaccggcaagaccagccugcccagaugcuggcuggugagcaacggcagcuaccugaacgagacccacuucagcgacgacaucgagcagcaggccgacaacaugaucaccgagaugcugcagaaggaguacauggagagacagggcaagaccccccugggccugguggaccuguucguguucagcaccagcuucuaccugaucagcaucuuccugcaccuggugaagauccccacccacagacacaucgugggcaagcccugccccaagccccacagacugaaccacaugggcaucugcagcugcggccuguacaagcagcccggcgugcccgugaaguggaagagauga

SEQ ID NO: 1470 - RNA, 1476 nt, Artificial Sequence
  derived and/or modified protein sequence (opt4) from LASV(G2554-SLE-2012;Clade IV)__AIT17298__GPC
augggccagaucgugaccuucuuccaggaggugccccacgugaucgaggaggugaugaacaucgugcugaucgcccugagcauccuggccgugcugaagggccuguacaacaucgccaccugcggccugcugggccuggugugcuuccugcugcugugcggcagaagcugcaccaccagccuguacaagggcguguacgagcugcagacccuggagcugaacauggagacccugaacaugaccaugccccugagcugcaccaagaacaacagccaccacuacaucauggugggcaacgagaccggccuggagcugacccugaccaacaccagcaucaucaaccacaaguucugcaaccugagcgacgcccacaagaagaaccuguacgaccacgcccugaugagcaucaucagcaccuuccaccugagcauccccaacuucaaccaguacgaggccaugagcugcgacuucaacggcggcaagaucagcgugcaguacaaccugagccacagcuacgccguggacgccgccagccacugcggcaccaucgccaacggcgugcugcagaccuucaugagaauggccuggggcggcagcuacaucgcccuggacagcggccacggcggcugggacugcaucaugaccagcuaccaguaccugaucauccagaacaccaccugggaggaccacugccaguucagcagacccagccccaucggcuaccugggccugcugagccagagaaccagagacaucuacaucagcagaagacugcugggcaccuucaccuggacccugagcgacagcgagggcaaggacacccccggcggcuacugccugaccagauggaugcugaucgaggccgagcugaagugcuucggcaacaccgccguggccaagugcaacgagaagcacgacgaggaguucugcgacaugcugagacuguucgacuucaacaagcaggccauccagagacugaaggccgaggcccagaugagcauccagcugaucaacaaggccgugaacgcccugaucaacgaccagcugaucaugaagaaccaccugagagacaucaugggcauccccuacugcaacuacagcaaguacugguaccugaaccacaccaccaccggcaagaccagccugcccaagugcuggcuggugagcaacggcagcuaccugaacgagacccacuucagcgacgacaucgagcagcaggccgacaacaugaucaccgagaugcugcagaaggaguacauggagagacagggcaagaccccccugggccugguggaccuguucguguucagcaccagcuucuaccugaucagcaucuuccugcaccuggugaagauccccacccacagacacguggugggcaagcccugccccaagccccacagacugaaccacaugggcaucugcagcugcggccuguacggccagcccggcgugcccgugaaguggaagagauga

SEQ ID NO: 1471 - RNA, 1476 nt, Artificial Sequence
  derived and/or modified protein sequence (opt4) from LASV(G2557-SLE-2012;Clade IV)__AIT17302__GPC
augggccagaucgugaccuucuuccaggaggugccccacgugaucgaggaggugaugaacaucgugcugaucgcccugagccugcuggccgugcugaagggccuguacaacguggccaccugcggccugaucggccuggugaccuuccugcugcugugcggcagaagcugcaccaccaaccuguacaagggcguguacgagcugcagacccuggagcugaacauggagacccugaacaugaccaugccccugagcugcaccaagaacaacagccaccacuacaucauggugggcaacgagaccggccuggagcugacccugaccaacaccagcaucaucagccacaaguucugcaaccugagcgacgcccacaagaagaaccuguacgaccacacccugaugagcaucaucagcaccuuccaccugagcauccccaacuucaaccaguacgaggccaugagcugcgacuucaacggcggcaagaucagcgugcaguacaaccugagccacagcuacgccguggacgccgccaaccacugcggcaccguggccaacggcgugcugcagaccuucaugagaauggccuggggcggcagcuacaucgcccuggacagcggcagaggcaacugggacugcaucaugaccagcuaccaguaccugaucauccagaacaccaccugggaggaccacugccaguucagcagacccagccccaucggcuaccugggccugcugagccagagaaccagagacaucuacaucagcagaagacugcugggcaccuucaccuggacccugagcgacagcgagggcaacgacacccccggcggcuacugccugaccagauggaugcugaucgaggccgagcugaagugcuucggcaacaccgccguggccaagugcaacgagaagcacgacgaggaguucugcgacaugcugagacuguucgacuucaacaagcaggccauccagagacugaaggccgaggcccagaugagcauccagcugaucaacaaggccgugaacgcccugaucaacgaccagcugaucaugaagaaccaccugagagacaucaugggcauccccuacugcaacuacagcaaguacugguaccugaaccacaccaccaccggcaagaccagccugcccaagugcuggcuggugagcaacggcagcuaccugaacgagacccacuucagcgacgacaucgagcagcaggccgacaacaugaucaccgagaugcugcagaaggaguacauggagagacagggcaagaccccccugggccugguggaccuguucguguucagcaccagcuucuaccugaucagcaucuuccugcaccuggugaagauccccacccacagacacaucgugggcaagcccugccccaagccccacagacugaaccacaugggcaucugcagcugcggccuguacaagcagcccggcgugcccgugagauggaagagauga

SEQ ID NO: 1472 - RNA, 1476 nt, Artificial Sequence
  derived and/or modified protein sequence (opt4) from LASV(G2587-SLE-2012;Clade IV)__AIT17310__GPC
augggccagaucgugaccuucuuccaggaggugccccacgugaucgaggaggugaugaacaucgugcugaucgcccugagcauccuggccgugcugaagggccuguacaaccuggccaccugcggccuggugggccuggugaccuuccugcugcugugcggcagaagcugcaccaccagccuguacaagggcguguacgagcugcagacccuggagcugaacauggagacccugaacaugaccaugccccugagcugcaccaagaacaacagccaccacuacaucauggugggcaacgagaccggccuggagcugacccugaccaacaccagcaucaucaaccacaaguucugcaaccugagcgacgcccacaagaagaaccuguacgaccacgcccugaugagcaucaucagcaccuuccaccugagcauccccaacuucaaccaguacgaggccaugagcugcgacuucaacggcggcaagaucagcgugcaguacaaccugagccacagcuacgccggcgacgccgccacccacugcggcaccguggccaacggcgugcugcagaccuucaugagaauggccuggggcggcagcuacaucgcccuggacagcggcagaggcaagugggacugcaucaugaccagcuaccaguaccugaucauccagaacaccaccugggaggaccacugccaguucagcagacccagccccaucggcuaccugggccugcugagccagagaaccagagacaucuacaucagcagaagacugcugggcaccuucaccuggacccugagcgacagcgagggcaaggacacccccggcggcuacugccugaccagauggaugcugaucgaggccgagcugaagugcuucggcaacaccgccguggccaagugcaacgagaagcacgacgaggaguucugcgacaugcugagacuguucgacuucaacaagcaggccauccagagacugaagaccgaggcccagaugagcauccagcugaucaacaaggccgugaacgcccugaucaacgaccagcugaucaugaagaaccaccugagagacaucaugggcauccccuacugcaacuacagcaaguacugguaccugaaccacaccaccaccggcaagaccagccugcccagaugcuggcuggugagcaacggcagcuaccugaacgagacccacuucagcgacgacaucgagcagcaggccgacaacaugaucaccgagaugcugcagaaggaguacauggagagacagggcaagaccccccugggccugguggaccuguucguguucagcaccagcuucuaccugaucagcaucuuccugcaccuggugaagauccccacccacagacacaucgugggcaagcccugccccaagccccacagacugaacuacaugggcaucugcagcugcggccuguacaagcagcccggcgugcccgugaaguggaagagauga

SEQ ID NO: 1473 - RNA, 1476 nt, Artificial Sequence
  derived and/or modified protein sequence (opt4) from LASV(G2612-SLE-2012;Clade IV)__AIT17314__GPC
augggccagaucgugaccuucuuccaggaggugccccacgugaucgaggaggugaugaacaucgugcugaucacccugagcauccuggccgugcugaagggccuguacaacguggccaccugcggccuggugggccuggugaccuuccugcugcugugcggcagaagcugcaccaccagccuguacaagggcguguacgagcugcagacccuggagcugaacauggagacccugaacaugaccaugccccugagcugcaccaagaacaacagccaccacuacaucauggugggcaacgagaccggccuggagcugacccugaccaacaccagcaucaucaaccacaaguucugcaaccugagcgacgcccacaagaaggaccuguacgaccacgcccugaugagcaucaucagcaccuuccaccugagcauccccaacuucaaccaguacgaggccaugagcugcgacuucaacggcggcaagaucagcgugcaguacaaccugagccacagcuacgccguggacgccgccaaccacugcggcaccguggccaacggcgugcugcagaccuucaugagaauggccuggggcggcagcuacaucgcccuggacagcggcagaggcggcugggacugcaucaugaccagcuaccaguaccugaucauccagaacaccaccugggaggaccacugccaguucagcagacccagccccaucggcuaccugggccugcugagccagagaaccagagacaucuacaucagcagaagacugcugggcaccuucaccuggacccugagcgacagcgagggcaacgacacccccggcggcuacugccugaccagauggaugcugaucgaggccgagcugaagugcuucggcaacaccgccguggccaagugcaacgagaagcacgacgaggaguucugcgacaugcugagacuguucgacuucaacaagcaggccauccagagacugaaggccgaggcccagaugagcauccagcugaucaacaaggccgugaacgcccugaucaacgaccagcugaucaugaagaaccaccugagagacaucaugggcauccccuacugcaacuacagcaaguacugguaccugaaccacaccaccaccggcaagaccagccugcccaagugcuggcuggugagcaacggcagcuaccugaacgagacccacuucagcgacgacaucgagcagcaggccgacaacaugaucaccgagaugcugcagaaggaguacauggagagacagggcaagaccccccugggccugguggaccuguucguguucagcaccagcuucuaccugaucagcaucuuccugcaccuggugaagauccccacccacagacacaucgugggcaagcccugccccaagccccacagacugaaccacaugggcaucugcagcugcggccuguacaagcagcccggcgugcccgugaaguggaagagauga

SEQ ID NO: 1474 - RNA, 1476 nt, Artificial Sequence
  derived and/or modified protein sequence (opt4) from LASV(G2615-SLE-2012;Clade IV)__AIT17318__GPC
augggccagaucgugaccuucuuccaggaggugccccacgugaucgaggaggugaugaacaucgugcugaucgcccugagccugcuggccgugcugaagggccuguacaacguggccaccugcggccugaucggccuggugaccuuccugcugcugugcggcagaagcugcaccaccaaccuguacaagggcguguacgagcugcagacccuggagcugaacauggagacccugaacaugaccaugccccugagcugcaccaagaacaacagccaccacuacaucauggugggcaacgagaccggccuggagcugacccugaccaacaccagcaucaucaaccacaaguucugcaaccugagcgacgcccacaagaagaaccuguacgaccacgcccugaugagcaucaucagcaccuuccaccugagcauccccaacuucaaccaguacgaggccaugagcugcgacuucaacggcggcaagaucagcgugcaguacaaccugagccacagcuacgccguggacgccgccaaccacugcggcaccguggccaacggcgugcugcagaccuucaugagaauggccuggggcggcagcuacaucgcccuggacagcggcagaggcaacugggacugcaucaugaccagcuaccaguaccugaucauccagaacaucaccugggaggaccacugccaguucagcagacccagccccaucggcuaccugggccugcugagccagagaaccagagacaucuacaucagcagaagacugcugggcaccuucaccuggacccugagcgacagcgagggcaacgacacccccggcggcuacugccugaccagauggaugcugaucgaggccgagcugaagugcuucggcaacaccgccguggccaagugcaacgagaagcacgacgaggaguucugcgacaugcugagacuguucgacuucaacaagcaggccauccagagacugaaggccgaggcccagaugagcauccagcugaucaacaaggccgugaacgcccugaucaacgaccagcugaucaugaagaaccaccugagagacaucaugggcauccccuacugcaacuacagcaaguacugguaccugaaccacaccaccaccggcaagaccagccugcccaagugcuggcuggugagcaacggcagcuaccugaacgagacccacuucagcgacgacaucgagcagcaggccgacaacaugaucaccgagaugcugcagaaggaguacauggagagacagggcaagaccccccugggccugguggaccuguucguguucagcaccagcuucuaccugaucagcaucuuccugcaccuggugaagauccccacccacagacacaucgugggcaagcccugccccaagccccacagacugaaccacaugggcaucugcagcugcggccuguacaagcagcccggcgugcccgugagauggaagagauga

SEQ ID NO: 1475 - RNA, 1476 nt, Artificial Sequence
  derived and/or modified protein sequence (opt4) from LASV(G2723-SLE-2012;Clade IV)__AIT17322__GPC
augggccagaucgugaccuucuuccaggaggugccccacgugaucgaggaggugaugaacaucgugcugaucgcccugagccugcuggccgugcugaagggccuguacaacguggccaccugcggccugaucggccuggugaccuuccugcugcugugcggcagaagcugcaccaccaaccuguacaagggcgccuacgagcugcagacccuggagcugaacauggagacccugaacaugaccaugccccugagcugcaccaagaacaacagccaccacuacaucauggugggcaacgagaccggccuggagcugacccugaccaacaccagcaucaucaaccacaaguucugcaaccugagcgacgcccacaagaagaaccuguacgaccacacccugaugagcaucaucagcaccuuccaccugagcauccccaacuucaaccaguacgaggccaugagcugcgacuucaacggcggcaagaucagcgugcaguacaaccugagccacagcuacgccguggacgccgccaaccacugcggcaccguggccaacggcgugcugcagaccuucaugagaauggccuggggcggcagcuacaucgcccuggacagcggcagaggcaacugggacugcaucaugaccagcuaccaguaccugaucauccagaacaccaccugggaggaccacugccaguucagcagacccagccccaucggcuaccugggccugcugagccagagaaccagagacaucuacaucagcagaagacugcugggcaccuucaccuggacccugagcgacagcgagggcaacgacacccccggcggcuacugccugaccagauggaugcugaucgaggccgagcugaagugcuucggcaacaccgccguggccaagugcaacgagaagcacgacgaggaguucugcgacaugcugagacuguucgacuucaacaagcaggccauccagagacugaaggccgaggcccagaugagcauccagcugaucaacaaggccgugaacgcccugaucaacgaccagcugaucaugaagaaccaccugagagacaucaugggcauccccuacugcaacuacagcaaguacugguaccugaaccacaccaccaccggcaagaccagccugcccaagugcuggcuggugagcaacggcagcuaccugaacgagacccacuucagcgacgacaucgagcagcaggccgacaacaugaucaccgagaugcugcagaaggaguacauggagagacagggcaagaccccccugggccugguggaccuguucguguucagcaccagcuucuaccugaucagcaucuuccugcaccuggugaagauccccacccacagacacaucgugggcaagcccugccccaagccccacagacugaaccacaugggcaucugcagcugcggccuguacaagcagcccggcgugcccgugagauggaagagauga

SEQ ID NO: 1476 - RNA, 1476 nt, Artificial Sequence
  derived and/or modified protein sequence (opt4) from LASV(G2868-SLE-2012;Clade IV)__AIT17328__GPC
augggccagaucgugaccuucuuccaggaggugccccacgugaucgaggaggugaugaacaucgugcugaucacccugagcauccuggccgugcugaagggccuguacaacaucgccaccugcggccuggugggccuggugaccuuccugcugcugugcggcaagagcugcaccaccagccuguacaagggcguguacgagcugcagacccuggagcugaacauggagacccugaacaugaccaugccccugagcugcaccaagaacaacagccaccacuacaucagagugggcaacgagaccggccuggagcugacccugaccaacaccagcaucaucaaccacaaguucugcaaccugagcgacgcccacaagaagaaccuguacgaccacgcccugaugagcaucaucagcaccuuccaccugagcauccccaacuucaaccaguacgaggccaugagcugcgacuucaacggcggcaagaucagcgugcaguacaaccugagccacagcuacgccguggacgccgccaaccacugcggcaccguggccaacggcgugcugcagaccuucaugagaauggccuggggcggcagcuacaucgcccuggacagcggccacggcaacugggacugcaucaugaccagcuaccaguaccugaucauccagaacaccaccugggaggaccacugccaguucagcagacccagccccaucggcuaccugggccugcugagccagagaaccagagacaucuacaucagcagaagacugcugggcaccuucaccuggacccugagcgacagcgagggcaacgacgcccccggcggcuacugccugaccagauggaugcugaucgaggccgagcugaagugcuucggcaacaccgccguggccaagugcaacgagaagcacgacgaggaguucugcgacaugcugagacuguucgacuucaacaagcaggccauccagagacugaaggccgaggcccagaugagcauccagcugaucaacaaggccgugaacgcccugaucaacgaccagcugaucaugaagaaccaccugagagacaucaugggcauccccuacugcaacuacagcaaguacugguaccugaaccacaccaccaccggcaagaccagccugcccaagugcuggcuggugagcaacggcagcuaccugaacgagacccacuucagcgacgacaucgagcagcaggccgacaacaugaucaccgagaugcugcagaaggaguacauggagagacagggcaagaccccccugggccugguggaccuguucguguucagcaccagcuucuaccugaucagcaucuuccugcaccuggugaagauccccacccacagacacguggugggcaagagcugccccaagccccacagacugaaccacaugggcaucugcagcugcggccuguacaagcagcccggcgugcccgugaaguggaagagauga

SEQ ID NO: 1477 - RNA, 1476 nt, Artificial Sequence
  derived and/or modified protein sequence (opt4) from LASV(G2903-SLE-2012;Clade IV)__AIT17332__GPC
augggccagaucgugaccuucuuccaggaggugccccacgugaucgaggaggugaugaacaucgugcugaucgcccugagcauccuggccgugcugaagggccuguacaaccuggccaccugcggccuggugggccuggugaccuuccugcugcugugcggcagaagcugcaccaccagccuguacaagggcguguacgagcugcagacccuggagcugaacauggagacccugaacaugaccaugccccugagcugcaccaagaacaacagccaccacuacaucagagugggcaacgagaccggccuggagcugacccugaccaacaccagcaucaucaaccacaaguucugcaaccugagcgacgcccacaagaagaaccuguacgaccacgcccugaugagcaucaucagcaccuuccaccugagcauccccaacuucaaccaguacgaggccaugagcugcgacuucaacggcggcaagaucagcgugcaguacaaccugagccacagcuacgccguggacgccgccaaccacugcggcaccguggccaacggcgugcugcagaccuucaugagaauggccuggggcggcagcuacaucgcccuggacagcggccacggcagaugggacugcaucaugaccagcuaccaguaccugaucauccagaacaccaccugggaggaccacugccuguucagcagacccagccccaucggcuaccugggccugcugagccagagaaccagagacaucuacaucagcagaagacugcugggcaccuucaccuggacccugagcgacagcgagggcagagacacccccggcggcuacugccugaccagauggaugcugaucgaggccgagcugaagugcuucggcaacaccgccguggccaagugcaacgagaagcacgacgaggaguucugcgacaugcugagacuguucgacuucaacaagcaggccauccagagacugaaggccgaggcccagaugagcauccagcugaucaacaaggccgugaacgcccugaucaacgaccagcugaucaugaagaaccaccugagagacaucaugggcauccccuacugcaacuacagcaaguacugguaccugaaccacaccaccaccggcagaaccagccugcccagaugcuggcuggugagcaacggcagcuaccugaacgagacccacuucagcgacgacaucgagcagcaggccgacaacaugaucaccgagaugcugcagaaggaguacauggagagacagggcaagaccccccugggccugguggaccuguucguguucagcaccagcuucuaccugaucagcaucuuccugcaccuggugaagauccccacccacagacacaucgugggcaagagcugccccaagccccacagacugaaccacaugggcaucugcagcugcggccuguacaagcagcccggcgugcccgugaaguggaagagauga

SEQ ID NO: 1478 - RNA, 1476 nt, Artificial Sequence
  derived and/or modified protein sequence (opt4) from LASV(G2944-SLE-2012;Clade IV)__AIT17340__GPC
augggccagaucgugaccuucuuccaggaggugccccacgugaucgaggaggugaugaacaucgugcugaucgcccugagcauccuggccgugcugaagggccuguacaacuucgccaccugcggccuggugggccuggugaccuuccugcugcugugcggcagaagcugcaccaccagccuguacaagggcguguacgagcugcagacccuggagcugaacauggagacccugaacaugaccaugccccugagcugcaccaagaacaacagccaccacuacaucauggugggcaacgagaccggccuggagcugacccugaccaacaucagcaucaucaaccacaaguucugcaaccugagcgacgcccacaagaagaaccuguacgaccacgcccugaugagcaucaucagcaccuuccaccugagcauccccaacuucaaccaguacgaggccaugagcugcgacuucaacggcggcaagaucagcgugcaguacaaccugagccacagcuacgccggcgacgccgccaaccacugcggcaccguggccaacggcgugcugcagaccuucaugagaauggccuggggcggcagcuacaucgcccuggacagcggcagaggcgagugggacugcaucaugaccagcuaccaguaccugaucauccagaacaccaccugggaggaccacugccaguucagcagacccagccccaucggcuaccugggccugcugagccagagaaccagagacaucuacaucagcagaagacugcugggcaccuucaccuggacccugagcgacagcgagggcaaggacacccccggcggcuacugccugaccagauggaugcugaucgaggccgagcugaagugcuucggcaacaccgccguggccaagugcaacgagaagcacgacgaggaguucugcgacaugcugagacuguucgacuucaacaagcaggccauccagagacugaaggccgaggcccagaugagcauccagcugaucaacaaggccgugaacgcccugaucaacgaccagcugaucaugaagaaccaccugagagacaucaugggcauccccuacugcaacuacagcaaguacugguaccugaaccacaccaccaccggcaagaccagccugcccaagugcuggcuggugagcaacggcagcuaccugaacgagacccacuucagcgacgacaucgagcagcaggccgacaacaugaucaccgagaugcugcagaaggaguacauggagagacagggcaagaccccccugggccugguggaccuguucguguucagcaccagcuucuaccugaucagcaucuuccugcaccuggugaagauccccacccacagacacaucgugggcaagcccugccccagaccccacagacugaaccacaugggcaucugcagcugcggccuguacaagcagcccggcgugcccgugaaguggaagagauga

SEQ ID NO: 1479 - RNA, 1476 nt, Artificial Sequence
  derived and/or modified protein sequence (opt4) from LASV(G3010-SLE-2013;Clade IV)__AIT17344__GPC
augggccagaucgugaccuucuuccaggaggugccccacgugaucgaggaggugaugaacaucgugcugaucgcccugagcauccuggccgugcugaagggccuguacaacuucgccaccugcggccuggugggccuggugaccuuccugcugcugugcggcagaagcugcaccaccagccuguacaagggcguguacgagcugcagacccuggagcugaacauggagacccugaacaugaccaugccccugagcugcaccaagaacaacagccaccacuacaucauggugggcaacgagaccggccuggagcugacccugaccaacaccagcaucaucaaccacaaguucugcaaccugagcgacgcccacaagaagaaccuguacaaccacgcccugaugagcaucaucagcaccuuccaccugagcauccccaacuucaaccaguacgaggccaugagcugcgacuucaacggcggcaagaucagcgugcaguacaaccugagccacagcuacgccggcgacgccgccagccacugcggcaccguggccaacggcgugcugcagaccuucaugagaauggccuggggcggcagcuacaucgcccuggacagcggcuacggcaagugggacugcaucaugaccagcuaccaguaccugaucauccagaacaccaccugggaggaccacugccaguucagcagacccagccccaucggcuaccugggccugcugagccagagaaccagagacaucuacaucagcagaagacugcugggcaccuucaccuggacccugagcgacagcgagggcaaggacacccccggcggcuacugccugaccagauggaugcugaucgaggccgagcugaagugcuucggcaacaccgccguggccaagugcaacgagaagcacgacgaggaguucugcgacaugcugagacuguucgacuucaacaagcaggccauccagagacugaagaccgaggcccagaugagcauccagcugaucaacaaggccgugaacgcccugaucaacgaccagcugaucaugaagaaccaccugagagacaucaugggcauccccuacugcaacuacagcaaguacugguaccugaaccacaccaccaccggcaagaccagccugcccaagugcuggcuggugagcaacggcagcuaccugaacgagacccacuucagcgacgacaucgagcagcaggccgacaacaugaucaccgagaugcugcagaaggaguacauggagagacagggcaagaccccccugggccugguggaccuguucguguucagcaccagcuucuaccugaucagcaucuuccugcaccuggugaagauccccacccacagacacaucgugggcaagagcugccccaagccccacagacugaaccacaugggcaucugcagcugcggccuguacaagcagcccggcgugcccgugagauggaagagauga

SEQ ID NO: 1480 - RNA, 1476 nt, Artificial Sequence
  derived and/or modified protein sequence (opt4) from LASV(G3016-SLE-2013;Clade IV)__AIT17348__GPC
augggccagaucgugaccuucuuccaggaggugccccacgugaucgaggaggugaugaacaucgugcugaucgcccugagcauccuggccgugcugaagggccuguacaacaucgccaccugcggccugaucggccuggugaccuuccugcugcugugcggcagaagcugcaccaccagccuguacaagggcguguacgagcugcagacccuggagcugaacauggagacccugaacaugaccaugccccugagcugcaccaagaacaacagccaccacuacaucauggugggcaacgagaccggccuggagcugacccugaccaacaccagcaucaucaaccacaaguucugcaaccugagcgacgcccacaagaagaaccuguacgaccacgcccugaugagcaucaucagcaccuuccaccugagcauccccaacuucaaccaguacgaggccaugagcugcgacuucaacggcggcaagaucagcgugcaguacaaccugagccacagcuacgccggcgacgccgccaaccacugcggcaccguggccaacggcgugcugcagaccuucaugagaauggccuggggcggcagcuacaucgcccuggacagcggcagaggcagaugggacugcaucaugaccagcuaccaguaccugaucauccagaacaccaccugggaggaccacugccaguucagcagacccagccccaucggcuaccugggccugcugagccagagaaccagagacaucuacaucagcagaagacugcugggcaccuucaccuggacccugagcgacagcgagggcaacgacacccccggcggcuacugccugaccagauggaugcugaucgaggccgagcugaagugcuucggcaacaccgccguggccaagugcaacgagaagcacgacgaggaguucugcgacaugcugagacuguucgacuucaacaagcaggccauccagagacugaaggccgaggcccagaugagcauccagcugaucaacaaggccgugaacgcccugaucaacgaccagcugaucaugaagaaccaccugagagacaucaugggcauccccuacugcaacuacagcaaguacugguaccugaaccacaccaccaccggcaagaccagccugcccaagugcuggcuggugagcaacggcagcuaccugaacgagacccacuucagcgacgacaucgagcagcaggccgacaacaugaucaccgagaugcugcagaaggaguacauggagagacagggcaagaccccccugggccugguggaccuguucguguucagcaccagcuucuaccugaucagcaucuuccugcaccuggugaagauccccacccacagacacaucgugggcaagcccugccccaagccccacagacugaaccacaugggcaucugcagcugcggccuguacaagcagcccggcgugcccgugaaguggaagagauga

SEQ ID NO: 1481 - RNA, 1476 nt, Artificial Sequence
  derived and/or modified protein sequence (opt4) from LASV(G3034-SLE-2013;Clade IV)__AIT17350__GPC
augggccagaucgugaccuucuuccaggaggugccccacgugaucgaggaggugaugaacaucgugcugaucgcccugagcauccuggccgugcugaagggccuguacaacguggccaccugcggccugaucggccuggugaccuuccugcugcugugcggcagaagcugcaccaccacccuguacaagggcguguacgagcugcaggcccuggagcugaacauggagacccugaacaugaccaugccccugagcugcaccaagaacaacagccaccacuacaucauggugggcaacgagaccggccuggagcugacccugaccaacaccagcaucaucgaccacaaguucugcaaccugagcgacgcccacaagaagaaccuguacgaccacgcccugaugagcaucaucagcaccuuccaccugagcauccccaacuucaaccaguacgaggccaugagcugcgacuucaacggcggcaagaucagcgugcaguacaaccugagccacagcuacgccggcgacgccgccaagcacugcggcaccguggccaacggcgugcugcagaccuucaugagaauggccuggggcggcagcuacaucgcccuggacagcggcagaaacggcugggacugcgugaugaccagcuaccaguaccugaucauccagaacaccaccugggaggaccacugccaguucagcagacccagccccaucggcuaccugggccugcugagccagagaaccagagacaucuacaucagcagaagacugcugggcaccuucaccuggacccugagcgacagcgagggcaaggacacccccggcggcuacugccugaccagauggaugcugaucgaggccgagcugaagugcuucggcaacaccgccguggccaagugcaacgagaagcacgacgaggaguucugcgacaugcugagacuguucgacuucaacaagcaggccauccagagacugaagaccgaggcccagaugagcauccagcugaucaacaaggccgugaacgcccugaucaacgaccagcugaucaugaagaaccaccugagagacaucaugggcauccccuacugcaacuacagcaaguacugguaccugaaccacaccgugaccggcaagaccagccugcccagaugcuggcuggugagcaacggcagcuaccugaacgagacccacuucagcgacgacaucgagcagcaggccgacaacaugaucaccgagaugcugcagaaggaguacaucgagagacagggcaagaccccccugggccugguggaccuguucguguucagcaccagcuucuaccugaucagcaucuuccugcaccuggugaagauccccacccacagacacaucaucggcaagcccugccccaagccccacagacugaaccacaugggcaucugcagcugcggccuguacaagcagcccggcgugcccgugagauggaagagauga

SEQ ID NO: 1482 - RNA, 1476 nt, Artificial Sequence
  derived and/or modified protein sequence (opt4) from LASV(G3101-SLE-2013;Clade IV)__AIT17354__GPC
augggccagaucgugaccuucuuccaggaggugccccacgugaucgaggaggugaugaacaucgugcugaucgcccugagcauccuggccgugcugaagggccuguacaacuucgccaccugcggccuggugggccuggugaccuuccugcugcugugcggcagaagcugcaccaccagccuguacaagggcguguacgagcugcagacccuggagcugaacauggagacccugaacaugaccaugccccugagcugcaccaagaacaacagccaccacuacaucauggugggcaacgagaccggccuggagcugacccugaccaacaucagcaucaucaaccacaaguucugcaaccugagcgacgcccacaagaagaaccuguacgaccacgcccugaugagcaucaucagcaccuuccaccugagcauccccaacuucaaccaguacgaggccaugagcugcgacuucaacggcggcaagaucagcgugcaguacaaccugagccacagcuacgccggcgacgccgccaaccacugcggcaccguggccaacggcgugcugcagaccuucaugagaauggccuggggcggcagcuacaucgcccuggacagcggccacggcggcugggacugcaucaugaccagcuaccaguaccugaucauccagaacaccaccugggaggaccacugccaguucagcagacccagccccaucggcuaccugggccugcugagccagagaaccagagacaucuacaucagcagaagacugcugggcaccuucaccuggacccugagcgacagcgagggcaaggacacccccggcggcuacugccugaccagauggaugcugaucgaggccgagcugaagugcuucggcaacaccgccguggccaagugcaacgagaagcacgacgaggaguucugcgacaugcugagacuguucgacuucaacaagcaggccauccagagacugaaggccgaggcccagaugagcauccagcugaucaacaaggccgugaacgcccugaucaacgaccagcugaucaugaagaaccaccugagagacaucaugggcauccccuacugcaacuacagcaaguacugguaccugaaccacaccaccaccggcaagaccagccugcccaagugcuggcuggugagcaacggcagcuaccugaacgagacccacuucagcgacgacaucgagcagcaggccgacaacaugaucaccgagaugcugcagaaggaguacauggagagacagggcaagaccccccugggccugguggaccuguucguguucagcaccagcuucuaccugaucagcaucuuccugcaccuggugaagauccccacccacagacacaucgugggcaagcccugccccagaccccacagacugaaccacaugggcaucugcagcugcggccuguacaagcagcccggcgugcccgugaaguggaagagauga

SEQ ID NO: 1483 - RNA, 1476 nt, Artificial Sequence
  derived and/or modified protein sequence (opt4) from LASV(G3110-SLE-2013;Clade IV)__AIT17360__GPC
augggccagaucgugaccuucuuccaggaggugccccacgugaucgaggaggugaugaacaucgugcugaucgcccugagcauccuggccgugcugaagggccuguacaacuucgccaccugcggccuggugggccuggugaccuuccugcugcugugcggcagaagcugcaccaccagccuguacaagggcguguacgagcugcagacccuggagcugaacauggagacccugaacaugaccaugccccugagcugcaccaagaacaacagccaccacuacaucagagugggcaacgagaccggccuggagcugacccugaccaacaccagcaucaucaaccacagauucugcaaccugagcgacgcccacaagaagaaccuguacgaccacgcccugaugagcaucaucagcaccuuccaccugagcauccccaacuucaaccaguacgaggccaugagcugcgacuucaacggcggcaagaucagcgugcaguacaaccugagccacagcuacgccggcgacgccgccaaccacugcggcaccguggccaacggcgugcugcagaccuucaugagaauggccuggggcggcagcuacaucgcccuggacagcggccacggcaagugggacugcaucaugaccagcuaccaguaccugaucauccagaacaccaccugggacgaccacugccaguucagcagacccagccccaucggcuaccugggccugcugagccagagaaccagagacaucuacaucagcagaagacugcugggcaccuucaccuggacccugagcgacagcgagggcaaggacacccccggcggcuacugccugaccagauggaugcugaucgaggccgagcugaagugcuucggcaacaccgccguggccaagugcaacgagaagcacgacgaggaguucugcgacaugcugagacuguucgacuucaacaagcaggccaucagaagacugaaggccgaggcccagaugagcauccagcugaucaacaaggccgugaacgcccugaucaacgaccagcugaucaugaagaaccaccugagagacaucaugggcauccccuacugcaacuacagcaaguacugguaccugaaccacaccaccaccggcaagaccagccugcccagaugcuggcuggugagcaacggcagcuaccugaacgagacccacuucagcgacgacaucgagcagcaggccgacaacaugaucaccgagaugcugcagaaggaguacauggagagacagggcaagaccccccugggccugguggaccuguucguguucagcaccagcuucuaccugaucagcaucuuccugcaccuggugaagauccccacccacagacacaucgugggcaagagcugccccaagccccacagacugaaccacaugggcaucugcagcugcggcuucuacaagcagcccggcgugcccgugaaguggaagagauga

SEQ ID NO: 1484 - RNA, 1476 nt, Artificial Sequence
  derived and/or modified protein sequence (opt4) from LASV(G3148-SLE-2013;Clade IV)__AIT17364__GPC
augggccagaucgugaccuucuuccaggaggugccccacgugaucgaggaggugaugaacaucgugcugaucgcccugagcauccuggccgugcugaagggccuguacaacuucgccaccugcggccuggugggccuggugaccuuccugcugcugugcggcagaagcugcaccaccagccuguacaagggcguguacgagcugcagacccuggagcugaacauggagacccugaacaugaccaugccccugagcugcaccaagaacaacagccaccacuacaucauggugggcaacgagaccggccuggagcugacccugaccaacaccagcaucaucaaccacaaguucugcaaccugagcgacgcccacaagaagaaccuguacgaccacgcccugaugagcaucaucagcaccuuccaccugagcauccccaacuucaaccaguacgaggccaugagcugcgacuucaacggcggcaagaucagcgugcaguacaaccugagccacagcuacgccggcgacgccgccaaccacugcggcaccguggccaacggcgugcugcagaccuucaugagaauggccuggggcggcagcuacaucgcccuggacagcggcagagacagaugggacugcaucaugaccagcuaccaguaccugaucauccagaacaccaccugggaggaccacugccaguucagcagacccagccccaucggcuaccugggccugcugagccagagaaccagagacaucuacaucagcagaagacugcugggcaccuucaccuggacccugagcgacagcgagggcaaggacacccccggcggcuacugccugaccagauggaugcugaucgaggccgagcugaagugcuucggcaacaccgccguggccaagugcaacgagaagcacgacgaggaguucugcgacaugcugagacuguucgacuucaacaagcaggccauccagagacugaaggccgaggcccagaugagcauccagcugaucaacaaggccgugaacgcccugaucaacgaccagcugaucaugaagaaccaccugagagacaucaugggcauccccuacugcaacuacagcaaguacugguaccugaaccacaccaccaccggcaagaccagccugcccaagugcuggcuggugagcaacggcagcuaccugaacgagacccacuucagcgacgacaucgagcagcaggccgacaacaugaucaccgagaugcugcagaaggaguacaucgagagacagggcaagaccccccugggccugguggaccuguucguguucagcaccagcuucuaccugaucagcaucuuccugcaccuggugaagauccccacccacagacacaucgugggcaagcccugccccaagccccacagacugaaccacaugggcaucugcagcugcggccuguacaagcagcccggcgugagcgugaaguggaagagauga

SEQ ID NO: 1485 - RNA, 1476 nt, Artificial Sequence
  derived and/or modified protein sequence (opt4) from LASV(G3151-SLE-2013;Clade IV)__AIT17368__GPC
augggccagaucgugaccuucuuccaggaggugccccacgugaucgaggaggugaugaacaucgugcugaucgcccugagcauccuggccgugcugaagggccuguacaacuucgccaccugcggccuggugggccuggugaccuuccugcugcugugcggcagaagcugcaccaccagccuguacaagggcguguacgagcugcagacccuggagcugaacauggagacccugaacaugaccaugccccugagcugcaccaagaacaacagccaccacuacaucauggugggcaacgagaccggccuggagcugacccugaccaacaccagcaucaucaaccacaaguucugcaaccugagcgacgcccacaagaagaaccuguacgaccacgcccugaugagcaucaucagcaccuuccaccugagcauccccaacuucaaccaguucgaggccaugagcugcgacuucaacggcggcaagaucagcgugcaguacaaccugagccacagcuacgccggcgacgccgccaaccacugcggcaccguggccaacggcgugcugcagaccuucaugagaauggccuggggcggcagcuacaucgcccuggacagcggccacagcaagugggacugcaucaugaccagcuaccaguaccugaucauccagaacaccaccugggacgaccacugccaguucagcagacccagccccaucggcuaccugggccugcugagccagagaaccagagacaucuacaucagcagaagacugcugggcaccuucaccuggacccugagcgacagcgagggcaaggacacccccggcggcuacugccugaccagauggaugcugaucgaggccgagcugaagugcuucggcaacaccgccguggccaagugcaacgagaagcacgacgaggaguucugcgacaugcugagacuguucgacuucaacaagcaggccauccagagacugaaggccgaggcccagaugagcauccagcugaucaacaaggccgugaacgcccugaucaacgaccagcugaucaugaagaaccaccugagagacaucaugggcauccccuacugcaacuacagcaaguacugguaccugaaccacaccaccaccggcaagaccagccugcccaagugcuggcuggugagcaacggcagcuaccugaacgagacccacuucagcgacgacaucgagcagcaggccgacaacaugaucaccgagaugcugcagaaggaguacauggagagacagggcaagaccccccugggccugguggaccuguucguguucagcaccagcuucuaccugaucagcaucuuccugcaccuggugaagauccccacccacagacacaucgugggcaagagcugccccaagccccacagacugaacuacaugggcaucugcagcugcggcuucuacaagcagcccggcgugcccgugaaguggaagagauga

SEQ ID NO: 1486 - RNA, 1476 nt, Artificial Sequence
  derived and/or modified protein sequence (opt4) from LASV(G3157-SLE-2013;Clade IV)__AIT17370__GPC
augggccagaucgugaccuucuuccaggaggugccccacgugaucgaggaggugaugaacaucgugcugaucgcccugagcauccuggccgugcugaagggccuguacaacuucgccaccugcggccuggugggccuggugaccuuccugcugcugugcggcagaagcugcaccaccagccuguacaagggcguguacgagcugcagacccuggagcugaacauggagacccugaacaugaccaugccccugagcugcaccaagaacaacagccaccacuacaucauggugggcaacgagaccggccuggagcugacccugaccaacaccagcaucaucaaccacaaguucugcaaccugagcgacgcccacaagaagaaccuguacgaccacgcccugaugagcaucaucagcaccuuccaccugagcauccccaacuucaaccaguacgaggccaugagcugcgacuucaacggcggcaagaucagcgugcaguacaaccugagccacagcuacgccggcgacgccgccaaccacugcggcaccguggccaacggcgugcugcagaccuucaugagaauggccuggggcggcagcuacaucgcccuggacagcggcagagacagaugggacugcaucaugaccagcuaccaguaccugaucauccagaacaccaccugggaggaccacugccaguucagcagacccagccccaucggcuaccugggccugcugagccagagaaccagagacaucuacaucagcagaagacugcugggcaccuucaccuggacccugagcgacagcgagggcaaggacacccccggcggcuacugccugaccagauggaugcugaucgaggccgagcugaagugcuucggcaacaccgccguggccaagugcaacgagaagcacgacgaggaguucugcgacaugcugagacuguucgacuucaacaagcaggccauccagagacugaaggccgaggcccagaugagcauccagcugaucaacaaggccgugaacgcccugaucaacgaccagcugaucaugaagaaccaccugagagacaucaugggcauccccuacugcaacuacagcaaguacugguaccugaaccacaccaccaccggcaagaccagccugcccaagugcuggcuggugagcaacggcagcuaccugaacgagacccacuucagcgacgacaucgagcagcaggccgacaacaugaucaccgagaugcugcagaaggaguacauggagagacagggcaagaccccccugggccugguggaccuguucguguucagcaccagcuucuaccugaucagcaucuuccugcaccuggugaagauccccacccacagacacaucgugggcaagcccugccccaagccccacagacugaaccacaugggcaucugcagcugcggccuguacaagcagcccggcgugagcgugaaguggaagagauga

SEQ ID NO: 1487 - RNA, 1476 nt, Artificial Sequence
  derived and/or modified protein sequence (opt4) from LASV(G3206-SLE-2013;Clade IV)__AIT17378__GPC
augggccagaucgugaccuucuuccaggaggugccccacgugaucgaggaggugaugaacaucgugcugaucgcccugagcauccuggccgugcugaagggccuguacaaccuggccaccugcggccuggugggccuggugaccuuccugcugcugugcggcagaagcugcaccaccagccuguacaagggcguguacgagcugcagacccuggagcugaacauggagacccugaacaugaccaugccccugagcugcaccaagaacaacagccaccacuacaucauggugggcaacgagaccggccuggagcugacccugaccaacaccagcaucaucaaccacaaguucugcaaccugagcgacgcccacaagaagaaccuguacgaccacacccugaugagcaucaucagcaccuuccaccugagcauccccaacuucaaccaguacgaggccaugagcugcgacuucaacggcggcaagaucagcgugcaguacaaccugagccacagcuacgccguggacgccgccaaccacugcggcaccguggccaacggcgugcugcagaccuucaugagaauggccuggggcggcagcuacaucgcccuggacagcggcagaagcggcugggacugcaucaugaccagcuaccaguaccuggugauccagaacaccaccugggaggaccacugccaguucagcagacccagccccaucggcuaccugggccugcugagccagagaaccagagacaucuacaucagcagaagacugcugggcaccuucaccuggacccugagcgacagcgagggcaagaacacccccggcggcuacugccugaccagauggaugcugaucgaggccgagcugaagugcuucggcaacaccgccguggccaagugcaacgagaagcacgacgaggaguucugcgacaugcugagacuguucgacuucaacaagcaggccauccagagacugaaggccgaggcccagaugagcauccagcugaucaacaaggccgugaacgcccugaucaacgaccagcugaucaugaagaaccaccugagagacaucaugggcauccccuacugcaacuacagcaaguacugguaccugaaccacaccaccaccggcagaaccagccugcccagaugcuggcuggugagcaacggcagcuaccugaacgagacccacuucagcgacgacaucgagcagcaggccgacaacaugaucaccgagaugcugcagaaggaguacauggagagacagggcaagaccccccugggccugguggaccuguucguguucagcaccagcuucuaccugaucagcaucuuccugcaccuggugaagauccccacccacagacacaucgugggcaagagcugccccaagccccacagacugaaccacaugggcaucugcagcugcggcuucuacaagcagcccggcgugcccgugaaguggaagagauga

SEQ ID NO: 1488 - RNA, 1476 nt, Artificial Sequence
  derived and/or modified protein sequence (opt4) from LASV(G3234-SLE-2013;Clade IV)__AIT17388__GPC
augggccagaucgugaccuucuuccaggaggugccccacgugaucgaggaggugaugaacaucgugcugaucgcccugagcauccuggccgugcugaagggccuguacaacguggccaccugcggccugaucggccuggugaccuuccugcugcugugcggcagaagcugcaccaccacccuguacaagggcguguacgagcugcaggcccuggagcugaacauggagacccugaacaugaccaugccccugagcugcaccaagaacaacagccaccacuacaucagagugggcaacgagaccggccuggagcugacccugaccaacaccagcaucaucaaccacaaguucugcaaccugagcgacgcccacaagaagaaccuguacgaccacgcccugaugagcaucaucagcaccuuccaccugagcauccccaacuucaaccaguacgaggccaugagcugcgacuucaacggcggcaucaucagcgugcaguacaaccugagccacagcuacgccggcgacgccgccaaccacugcggcaccguggccaacggcgugcugcagaccuucaugagaauggccuggggcggcagcuacaucgcccuggacagcggcagaaacggcugggacugcaucaugaccagcuaccaguaccugaucauccagaacaccaccugggacgaccacugccaguucagcagacccagccccaucggcuaccugggccugcugagccagagaaccagagacaucuacaucagcagaagacugcugggcaccuucaccuggacccugagcgacagcgagggcaaggacacccccggcggcuacugccugaccagauggaugcugaucgaggccgagcugaagugcuucggcaacaccgccguggccaagugcaacgagaagcacgacgaggaguucugcgacaugcugagacuguucgacuucaacaagcaggccauccagagacugaagaccgaggcccagaugaacauccagcugaucaacaaggccgugaacgcccugaucaacgaccagcugaucaugaagaaccaccugagagacaucaugggcauccccuacugcaacuacagcaaguacugguaccugaacaacaccgccaccggcaagaccagccugcccagaugcuggcuggugagcaacggcagcuaccugaacgagacccacuucagcgacgacaucgagcagcaggccgacaacaugaucaccgagaugcugcagaaggaguacauggagagacagggcaagaccccccugggccugguggaccuguucguguucagcaccagcuucuaccugaucagcaucuuccugcaccuggugaagauccccacccacagacacaucgugggcaagcccugccccaagccccacagacugaaccacaucggcaucugcagcugcggccuguacaagcagcccggcgugcccgugaaguggaagagauga

SEQ ID NO: 1489 - RNA, 1476 nt, Artificial Sequence
  derived and/or modified protein sequence (opt4) from LASV(G502-SLE-2009;Clade IV)__AIT17126__GPC
augggccagaucgugaccuucuuccaggaggugccccacgugaucgaggaggugaugaacaucgugcugaucgcccugagcauccuggccgugcugaagggccuguacaacuucgccaccugcggccuggugggccugcugaccuuccugcugcugugcggcagaagcugcaccaccggccuguacaagggcguguacgagcugcagacccuggagcugaacauggagacccugaacaugaccaugccccugagcugcaccaagaacaacagccaccacuacaucauggugggcaacgagaccggccuggagcugacccugaccaacaccagcaucaucaaccacaaguucugcaaccugagcgacgcccacaagaagaaccuguacgaccacgcccugaugagcaucaucagcaccuuccaccugagcauccccaacuucaaccaguacgaggccaugagcugcgacuucaacggcggcaagaucagcgugcaguacaaccugagccacagcuacgccggcgacgccgccgaccacugcggcaccguggccaacggcgugcugcagaccuucaugagaauggccuggggcggcagcuacaucgcccuggacagcggcagaggcagaugggacugcaucaugaccagcuaccaguaccugaucauccagaacaccaccugggaggaccacugccaguucagcagacccagccccaucggcuaccugggccugcugagccagagaaccagagacaucuacaucagcagaagacugcugggcaccuucaccuggacccugagcgacagcgagggcaaggacacccccggcggcuacugccugaccagauggaugcugaucgaggccgagcugaagugcuucggcaacaccgccguggccaagugcaacgagaagcacgacgaggaguucugcgacaugcugagacuguucgacuucaacaagcaggccauccagagacugaaggccgaggcccagaugagcauccagcugaucaacaaggccgugaacgcccugaucaacgaccagcuggugaugaagaaccaccugagagacaucaugggcauccccuacugcaacuacagcagauacugguaccugaaccacaccaccaccggcagaaccagccugcccaagugcuggcuggugagcaacggcagcuaccugaacgagacccacuucagcgacgacaucgagcagcaggccgacaacaugaucaccgagaugcugcagaaggaguacauggagagacagggcaagaccccccugggccugguggaccuguucguguucagcaccagcuucuaccugaucagcaucuuccugcaccuggugaagauccccacccacagacacaucgugggcaagagcugccccaagccccacagacugaaccacaugggcaucugcagcugcggccuguacaagcagcccggcgugcccgugaaguggaagagauga

SEQ ID NO: 1490 - RNA, 1476 nt, Artificial Sequence
  derived and/or modified protein sequence (opt4) from LASV(G503-SLE-2009;Clade IV)__AIT17130__GPC
augggccagaucgugaccuucuuccaggaggugccccacgugaucgaggaggugaugaacaucgugcugaucgcccugagcauccuggccgugcugaagggccuguacaacuucgccaccugcggcuucgugggccuggugaccuuccugcugcugugcggcagaagcugcaccaccagccuguacaagggcguguacgagcugcagacccuggagcugaacauggagacccugaacaugaccaugccccugagcugcaccaagaacaacagccaccacuacaucagagugggcaacgacaccggccuggagcugacccugaccaacaccagcaucaucaaccacaaguucugcaaccugagcgacgcccacaagaagaaccuguacgaccacgcccugaugagcaucaucagcaccuuccaccugagcauccccaacuucaaccaguacgaggccaugagcugcgacuucaacggcggcaagaucagcgugcaguacaaccugagccacagcuacgccguggacgccgccagccacugcggcaccaucgccaacggcgugcugcagaccuucaugagaauggccuggggcggcagcuacaucgcccuggacagcggcagagacagaugggacugcaucaugaccagcuaccaguaccugaucauccagaacaccaccugggaggaccacugccaguucagcagacccagccccaucggcuaccugggccugcugagccagagaaccagagacaucuacaucagcagaagacugcugggcaccuucaccuggacccugagcgacagcgagggcaaggacacccccggcggcuacugccugaccagauggaugcugaucgaggccgagcugaagugcuucggcaacaccgccguggccaagugcaacgagaagcacgacgaggaguucugcgacaugcugagacuguucgacuucaacaagcaggccauccagagacugaaggccgaggcccagaugagcauccagcugaucaacaaggccgugaacgcccugaucaacgaccagcugaucaugaagaaccaccugagagacaucaugggcauccccuacugcaacuacagcaaguacugguaccugaaccacaccaccaccggcaagaccagccugcccaagugcuggcuggugagcaacggcagcuaccugaacgagacccacuucagcgacgacaucgagcagcaggccgacaacaugaucaccgagaugcugcagaaggaguacauggagagacagggcaagaccccccugggccugguggaccuguucguguucagcaccagcuucuaccugaucagcaucuuccugcaccuggugaagauccccacccacagacacaucgugggcaagagcugccccaagccccacagacugaaccacaugggcaucugcagcugcggccuguacaagcagcccggcgugcccgugaaguggaagagauga

SEQ ID NO: 1491 - RNA, 1476 nt, Artificial Sequence
  derived and/or modified protein sequence (opt4) from LASV(G610-SLE-2009;Clade IV)__AIT17134__GPC
augggccagaucgugaccuucuuccaggaggugccccacgugaucgaggaggugaugaacaucgugcugaucgcccugagcauccuggccgugcugaagggccuguacaacuucgccaccugcggccuggugggccuggugaccuuccugcugcugugcggcagaagcugcaccaccagccuguacaagggcguguacgagcugcagacccuggagcugaacauggagacccugaacaugaccaugccccugagcugcaccaagaacaacagccaccacuacaucauggugggcaacgagaccggccuggagcugacccugaccaacaccagcaucaucaaccacaaguucugcaaccugagcgacgcccacaagaagaaccuguacgaccacgcccugaugagcaucaucagcaccuuccaccugagcauccccaacuucaaccaguacgaggccaugagcugcgacuucaacggcggcaagaucagcgugcaguacaaccugagccacagcuacgccggcgacgccgccaaccacugcggcaccguggccaacggcgugcugcagaccuucaugagaauggccuggggcggcagcuacaucgcccuggacagcggcagaggcagaugggacugcaucaugaccagcuaccaguaccugaucauccagaacaccaccugggaggaccacugccaguucagcagacccagccccaucggcuaccugggccugcugagccagagaaccagagacaucuacaucagcagaagacugcugggcaccuucaccuggacccugagcgacagcgagggcaaggacacccccggcggcuacugccugaccagauggaugcugaucgaggccgagcugaagugcuucggcaacaccgccguggccaagugcaacgagaagcacgacgaggaguucugcgacaugcugagacuguucgacuucaacaagcaggccauccagagacugaaggccgaggcccagaugagcauccagcugaucaacaaggccgugaacgcccugaucaacgaccagcugaucaugaagaaccaccugagagacaucaugggcauccccuacugcaacuacagcaaguacugguaccugaaccacaccaccaccggcaagaccagccugcccaagugcuggcuggugagcaacggcagcuaccugaacgagacccacuucagcgacgacaucgagcagcaggccgacaacaugaucaccgagaugcugcagaaggaguacauggagagacagggcaagaccccccugggccugguggaccuguucguguucagcaccagcuucuaccugaucagcaucuuccugcaccuggugaagauccccacccacagacacaucgugggcaagagcugccccaagccccacagacugaaccacaugggcaucugcagcugcggccuguacaagcagcccggcgugcccgugaaguggaagagauga

SEQ ID NO: 1492 - RNA, 1476 nt, Artificial Sequence
  derived and/or modified protein sequence (opt4) from LASV(G636-SLE-2009;Clade IV)__AIT17138__GPC
augggccagaucgugaccuucuuccaggaggugccccacgugaucgaggaggugaugaacaucgugcugaucgcccugagcauccuggccgugcugaagggccuguacaaccuggccaccugcggccuggugggccuggugaccuuccugcugcugugcggcagaagcugcaccaccagccuguacaagggcguguacgagcugcagacccuggagcugaacauggagacccugaacaugaccaugccccugagcugcaccaagaacaacagccaccacuacaucauggugggcaacgagaccggccuggagcugacccugaccaacaccagccugaucaaccacaaguucugcaaccugagcgacgcccacaagaagaaccuguacgaccacgcccugaugagcaucaucagcaccuuccaccugagcauccccaacuucaaccaguacgaggccaugagcugcgacuucaacggcggcaagaucagcgugcaguacaaccugagccacagcuacgccguggacgccgccagccacugcggcaccguggccaacggcgugcugcagaccuucaugagaauggccuggggcggcagcuacaucgcccuggacagcggcagaggcggcugggacugcaucaugaccagcuaccaguaccugaucauccagaacaccaccugggaggaccacugccaguucagcagacccagccccaucggcuaccugggccugcugagccagagaaccagagacaucuacaucagcagaagacugcugggcaccuucaccuggacccugagcgacagcgagggcaaggacacccccggcggcuacugccugaccagauggaugcugaucgaggccgagcugaagugcuucggcaacaccgccguggccaagugcaacgagaagcacgacgaggaguucugcgacaugcugagacuguucgacuucaacaagcaggccauccagagacugaaggccgaggcccagaugagcauccagcugaucaacaaggccgugaacgcccugaucaacgaccagcugaucaugaagaaccaccugagagacaucaugggcauccccuacugcaacuacagcaaguacugguaccugaaccacaccaccaccggcagaaccagccugcccagaugcuggcuggugagcaacggcagcuaccugaacgagacccacuucagcgacgacaucgagcagcaggccgacaacaugaucaccgagaugcugcagaaggaguacauggagagacagggcaagaccccccugggccugguggaccuguucguguucagcaccagcuucuaccugaucagcaucuuccugcaccuggugaagauccccacccacagacacaucgugggcaagagcugccccaagccccacagacugaaccacaugggcaucugcagcugcggccuguacaagcagcccggcgugcccgugaaguggaagagauga

SEQ ID NO: 1493 - RNA, 1476 nt, Artificial Sequence
  derived and/or modified protein sequence (opt4) from LASV(G692-SLE-2009;Clade IV)__AIT17146__GPC
augggccagaucgugaccuucuuccaggaggugccccacgugaucgaggaggugaugaacaucgugcugaucgcccugagcauccuggccgugcugaagggccuguacaaccuggccaccugcggccuggugggccuggugaccuuccugcugcugugcggcagaagcugcaccaccagccuguacaagggcguguacgagcugcagacccuggagcugaacauggagacccugaacaugaccaugccccugagcugcaccaagaacaacagccaccacuacaucauggugggcaacgagaccggccuggagcugacccugaccaacaccagcaucaucaaccacaaguucugcaaccugagcgacgcccacaagaagaaccuguacgaccacgcccugaugagcaucaucagcaccuuccaccugagcauccccaacuucaaccaguacgaggccaugagcugcgacuucaacggcggcaagaucagcgugcaguacaaccugagccacagcuacgccggcgacgccgccaaccacugcggcaccguggccaacggcgugcugcagaccuucaugagaauggccuggggcggcagcuacaucgcccuggacagcggcagaggcagaugggacugcaucaugaccagcuaccaguaccugaucauccagaacaccaccugggaggaccacugcagcuucagcagacccagccccaucggcuaccugggccugcugagccagagaaccagagacaucuacaucagcagaagacugcugggcaccuucaccuggacccugagcgacagcgagggcaaggacacccccggcggcuacugccugaccagauggaugcugaucgaggccgagcugaagugcuucggcaacaccgccguggccaagugcaacgagaagcacgacgaggaguucugcgacaugcugagacuguucgacuucaacaagcaggccauccagagacugaaggccgaggcccagaugagcauccagcugaucaacaaggccgugaacgcccugaucaacgaccagcugaucaugaagaaccaccugagagacaucaugggcauccccuacugcaacuacagcaaguacugguaccugaaccacaccaccaccggcaagaccagccugcccaagugcuggcuggugagcaacggcagcuaccugaacgagacccacuucagcgacgacaucgagcagcaggccgacaacaugaucaccgagaugcugcagaaggaguacauggagagacagggcaagaccccccugggccugguggaccuguucguguucagcaccagcuucuaccugaucagcaucuuccugcaccuggugaagauccccacccacagacacaucgugggcaagagcugccccaagccccacagacugaaccacaugggcaucugcagcugcggcuucuacaagcagcccggcgugcccgugaaguggaagagauga

SEQ ID NO: 1494 - RNA, 1476 nt, Artificial Sequence
  derived and/or modified protein sequence (opt4) from LASV(G733-SLE-2010;Clade IV)__AIT17154__GPC
augggccagaucgugaccuucuuccaggaggugccccacgugaucgaggaggugaugaacaucgugcugaucgcccugagcauccuggccgugcugaagggccuguacaacuucgccaccugcggcaucgugggccuggugagcuuccugcugcugugcggcagaagcugcaccaccagccuguacaagggcguguacgagcugcagacccuggagcugaacauggagacccugaacaugaccaugccccugagcugcaccaagaacaacagccaccacuacaucauggugggcaacgagaccggccuggagcugacccugaccaacaccagcaucaucaaccacaaguucugcaaccugagcgacgcccacaagaagaaccuguacgaccacgcccugaugagcaucaucagcaccuuccaccugagcauccccaacuucaaccaguacgaggccaugagcugcgacuucaacggcggcaagaucagcgugcaguacaaccugagccacagcuacgccggcgacgccgccaaccacugcggcaccaucgccaacggcgugcugcagaccuucaugagaauggccuggggcggcagcuacaucgcccuggacagcggcagagacagaugggacugcaucaugaccagcuaccaguaccugaucauccagaacaccaccugggaggaccacugccaguucagcagacccagccccaucggcuaccugggccugcugagccagagaaccagagacaucuacaucagcagaagacugcugggcaccuucaccuggacccugagcgacagcgagggcaaggacacccccggcggcuacugccugaccagauggaugcugaucgaggccgagcugaagugcuucggcaacaccgccguggccaagugcaacgagaagcacgacgaggaguucugcgacaugcugagacuguucgacuucaacaagcaggccauccagagacugaaggccgaggcccagaugagcauccagcugaucaacaaggccgugaacgcccugaucaacgaccagcugaucaugaagaaccaccugagagacaucaugggcauccccuacugcaacuacagcaaguacugguaccugaaccacaccaccaccggcaagaccagccugcccaagugcuggcuggugagcaacggcagcuaccugaacgagacccacuucagcgacgacaucgagcagcaggccgacaacaugaucaccgagaugcugcagaaggaguacauggagagacagggcaagaccccccugggccugguggaccuguucguguucagcaccagcuucuaccugaucagcaucuuccugcaccuggugaagauccccacccacagacacguggugggcaagagcugccccaagccccacagacugaaccacaugggcaucugcagcugcggccuguacggccagcccggcgugcccgugaaguggaagagauga

SEQ ID NO: 1495 - RNA, 1476 nt, Artificial Sequence
  derived and/or modified protein sequence (opt4) from LASV(G771-SLE-2010;Clade IV)__AIT17158__GPC
augggccagaucgugaccuucuuccaggaggugccccacgugaucgaggaggugaugaacaucgugcugaucgcccugagcauccuggccgugcugaagggccuguacaacuucgccaccugcggccuggugggccuggugaccuuccugcugcugugcggcagaagcugcaccaccagccuguacaagggcguguacgagcugcagacccuggagcugaacauggagacccugaacaugaccaugccccugagcugcaccaagaacaacagccaccacuacaucauggugggcaacgagaccggccuggagcugacccugaccaacaccagcaucaucaaccacaaguucugcaaccugagcgacgcccacaagaagaaccuguacgaccacgcccugaugagcaucaucagcaccuuccaccugagcauccccaacuucaaccaguacgaggccaugagcugcgacuucaacggcggcaagaucagcgugcaguacaaccugagccacagcuacgccggcgacgccgccaaccacugcggcaccguggccaacggcgugcugcagaccuucaugagaauggccuggggcggcagcuacaucgcccuggacagcggcagagacagaugggacugcaucaugaccagcuaccaguaccugaucauccagaacaccaccugggaggaccacugccaguucagcagacccagccccaucggcuaccugggccugcugagccagagaaccagagacaucuacaucagcagaagacugcugggcaccuucaccuggacccugagcgacagcgagggcaaggacacccccggcggcuacugccugaccagauggaugcugaucgaggccgagcugaagugcuucggcaacaccgccguggccaagugcaacgagaagcacgacgaggaguucugcgacaugcugagacuguucgacuucaacaagcaggccauccagagacugaaggccgaggcccagaugagcauccagcugaucaacaaggccgugaacgcccugaucaacgaccagcugaucaugaagaaccaccugagagacaucaugggcauccccuacugcaacuacagcaaguacugguaccugaaccacaccaccaccggcaagaccagccugcccaagugcuggcuggugagcaacggcagcuaccugaacgagacccacuucagcgacgacaucgagcagcaggccgacaacaugaucaccgagaugcugcagaaggaguacauggagagacagggcaagaccccccugggccugguggaccuguucguguucagcaccagcuucuaccugaucagcaucuuccugcaccuggugaagauccccacccacagacacaucgugggcaagagcugccccaagccccacagacugaaccacaugggcaucugcagcugcggccuguacaagcagcccggcgugcccgugaaguggaagagauga

SEQ ID NO: 1496 - RNA, 1476 nt, Artificial Sequence
  derived and/or modified protein sequence (opt4) from LASV(G808-SLE-2010;Clade IV)__AIT17164__GPC
augggccagaucgugaccuucuuccaggaggugccccacgugaucgaggaggugaugaacaucgugcugaucgcccugagcauccuggccgugcugaagggccuguacaacuucgccaccugcggccuggugggccuggugaccuuccugcugcugugcggcagaagcugcaccagcagccuguacaagggcguguacgagcugcagacccuggagcugaacauggagacccugaacaugaccaugccccugagcugcaccaagaacaacagccaccacuacaucagagugggcaacgagaccggccuggagcugacccugaccaacaccagcaucaucgaccacaaguucugcaaccugagcgacgcccacaagaagaaccuguacgaccacgcccugaugagcaucaucagcaccuuccaccugagcauccccaacuucaaccaguacgaggccaugagcugcgacuucaacggcggcaagaucagcgugcaguacaaccugagccacagcuacgccggcgacgccgccaagcacugcggcaccguggccaacggcgugcugcagaccuucaugagaauggccuggggcggcagcuacaucgcccuggacagcggccacggcaacugggacugcaucaugaccagcuaccaguaccugaucauccagaacaccaccugggaggaccacugccaguucagcagacccagccccaucggcuaccugggccugcugagccagagaaccagagacaucuacaucagcagaagacugcugggcaccuucaccuggacccugagcgacagcgagggcaacgacgcccccggcggcuacugccugaccagauggaugcugauccaggccgagcugaagugcuucggcaacaccgccguggccaagugcaacgagaagcacgacgaggaguucugcgacaugcugagacuguucgacuucaacaagcaggccauccagagacugaaggccgaggcccagaugagcauccagcugaucaacaaggccgugaacgcccugaucaacgaccagcugaucaugaagaaccaccugagagacaucaugggcauccccuacugcaacuacagcaaguacugguaccugaaccacaccaccaccggcagaaccagccugcccagaugcuggcuggugagcaacggcagcuaccugaacgagacccacuucagcgacgacaucgagcagcaggccgacaacaugaucaccgagaugcugcagaaggaguacauggagagacagggcaagaccccccugggccugguggaccuguucguguucagcaccagcuucuaccugaucagcaucuuccugcaccuggugaagauccccacccacagacacaucgugggcaagagcugccccaagccccacagacugaaccacaugggcaucugcagcugcggccuguucaagcagcccggcgugcccgugaaguggaagagauga

SEQ ID NO: 1497 - RNA, 1476 nt, Artificial Sequence
  derived and/or modified protein sequence (opt4) from LASV(Guinea Faranah;Clade IV)__AMZ00381__GPC
augggccagaucgugaccuucuuccaggaggugccccacgugaucgaggaggugaugaacaucgugcugaucgcccugagcauccuggccgugcugaagggccuguacaacguggccaccugcggccugaucggccugaucgccuuccugcugcugugcggcagaagcugcaccagcacccuguacaagggcguguacgagcugcaggcccuggagcugaacauggagacccugaacaugaccaugccccugagcugcaccaagaacaacagccaccacuacaucauggugggcaacgagaccggccuggagcugacccugaccaacaccagcaucaucaaccacaaguucugcaaccugagcgacgcccacaagaagaaccuguacaaccacgcccugaugagcaucaucagcaccuuccaccugagcauccccaacuucaaccaguacgaggccaugagcugcgacuucaacggcggcaagaucagcgugcaguacaaccugagccacagcuacgccguggacgccgccaaccacugcggcaccguggccaacggcauccugcagaccuucaugagaauggccuggggcggcagcuacaucgcccuggacagcggccacggcggcugggacugcaucaugagcagcuaccaguaccuggugauccagaacaccaccugggaggaccacugccaguucagcagacccagccccaucggcuaccugggccugcugagccagagaaccagagacaucuacaucagcagaagacugcugggcaccuucaccuggacccugagcgacagcgagggcaaggacacccccggcggcuacugccugaccagauggaugcugaucgaggccgagcugaagugcuucggcaacaccgccguggccaagugcaacgagaagcacgacgaggaguucugcgacaugcugagacuguucgacuucaacaagcaggccauccagagacugaaggccgaggcccagaugagcauccagcugaucaacaaggccgugaacgcccugaucaacgaccagcugaucaugaagaaccaccugagagacaucaugggcauccccuacugcaacuacagcaaguacugguaccugaaccacaccaucaccggcagaaccagccugcccaagugcuggcuggugagcaacggcagcuaccugaacgagacccacuucagcgacgacaucgagcagcaggccgacaacaugaucaccgagaugcugcagaaggaguaccuggagagacagggcaagaccccccugggccugguggaccuguucguguucagcaccagcuucuaccugaucagcaucuuccugcaccugaucaagauccccacccacagacacaucgugggcaagagcugccccaagccccacagacugaaccacaugggcgugugcagcugcggccuguacaagcagcccggcgugcccgugagauggaagagauga

SEQ ID NO: 1498 - RNA, 1476 nt, Artificial Sequence
  derived and/or modified protein sequence (opt4) from LASV(GUINEA Z-185a;Clade IV)__AMZ00377__GPC
augggccagaucgugaccuucuuccaggaggugccccacgugaucgaggaggugaugaacaucgugcugaucgcccugagcauccuggccgugcugaagggccuguacaacguggccaccugcggccugaucggccuggugaccuuccuguuccugugcggcagaagcugcagcaccagccuguacaagggcguguacgagcugcagacccuggagcugaacauggagacccugaacaugaccaugccccugagcugcaccaagaacaacagccaccacuacaucauggugggcaacgagaccggccuggagcugacccugaccaacaccagcaucaucaaccacaaguucugcaaccugagcgacgcccacaagaagaaccuguacgaccacacccugaugagcaucaucagcaccuuccaccugagcauccccaacuucaaccaguacgaggccaugagcugcgacuucaacggcggcaagaucagcgugcaguacaaccugagccacagcuacgccguggacgccgccaaccacugcggcaccguggccaacggcgugcugcagaccuucaugagaauggccuggggcggcagcuacaucgcccuggacagcggcagaggcaacugggacugcaucaugaccagcuaccaguaccuggugauccagaacaccaccugggaggaccacugccaguucagcagacccagccccaucggcuaccugggccugcugagccagagaaccagagacaucuacaucagcagaagacugcugggcaccuucaccuggacccugagcgacagcgagggcaaggacacccccggcggcuacugccugaccagauggaugcugaucgaggccgagcugaagugcuucggcaacaccgccguggccaagugcaacgagaagcacgacgaggaguucugcgacaugcugagacuguucgacuucaacaagcaggccauccagagacugaaggccgaggcccagaugagcauccagcugaucaacaaggccgugaacgcccugaucaacgaccagcugaucaugaagaaccaccugagagacaucaugggcauccccuacugcaacuacagcaaguacugguaccugaaccacaccgugaccggcaagaccagccugcccaagugcuggcuggugagcaacggcagcuaccugaacgagacccacuucagcgacgacaucgagcagcaggccgacaaccugaucaccgagaugcugcagaaggaguacauggagagacagggcaagaccccccugggccugguggaccuguucguguucagcaccagcuucuaccugaucagcaucuuccugcaccuggugaagauccccacccacagacacaucgugggcaagcccugccccaagccccacagacugaaccacaugggcaucugcagcugcggcguguacaagcagcccggcgugcccgugagauggaagagauga

SEQ ID NO: 1499 - RNA, 1476 nt, Artificial Sequence
  derived and/or modified protein sequence (opt4) from MOPV/LASV reassortant(IGS-1;Clade IV)__AFY05576__GPC
augggccagaucgugaccuucuuccaggaggugccccacgugaucgaggaggugaugaacaucgugcugaucgcccugagcgugcuggccgugcugaagggccuguacaacuucgccaccugcggccuggugggccuggugaccuuccugcugcugugcggcagaagcugcaccaccagccuguacaagggcguguacgagcugcagacccuggagcugaacauggagacccugaacaugaccaugccccugagcugcaccaagaacaacagccaccacuacaucauggugggcaacgagaccggccuggagcugacccugaccaacaccagcaucaucaaccacaaguucugcaaccugagcgacgcccacaagaagaaccuguacgaccacgcccugaugagcaucaucagcaccuuccaccugagcauccccaacuucaaccaguacgaggccaugagcugcgacuucaacggcggcaagaucagcgugcaguacaaccugagccacagcuacgccggcgacgccgccaaccacugcggcaccguggccaacggcgugcugcagaccuucaugagaauggccuggggcggcagcuacaucgcccuggacagcggcagaggcaacugggacugcaucaugaccagcuaccaguaccugaucauccagaacaccaccugggaggaccacugccaguucagcagacccagccccaucggcuaccugggccugcugagccagagaaccagagacaucuacaucagcagaagacugcugggcaccuucaccuggacccugagcgacagcgagggcgaggacacccccggcggcuacugccugaccagauggaugcugaucgaggccgagcugaagugcuucggcaacaccgccguggccaagugcaacgagaagcacgacgaggaguucugcgacaugcugagacuguucgacuucaacaagcaggccauccagagacugaaggccgaggcccagaugagcauccagcugaucaacaaggccgugaacgcccugaucaacgaccagcugaucaugaagaaccaccugagagacaucaugggcauccccuacugcaacuacagcaaguacugguaccugaaccacaccaccaccggcagaaccagccugcccaagugcuggcuggugagcaacggcagcuaccugaacgagacccacuucagcgacgacaucgagcagcaggccgacaacaugaucaccgagaugcugcagaaggaguacauggagagacagggcaagaccccccugggccugguggaccuguucguguucagcaccagcuucuaccugaucagcaucuuccugcaccuggugaagauccccacccacagacacaucgugggcaagagcugccccaagccccacagacugaaccacaugggcaucugcagcugcggccuguacaagcagcccggcgugcccgugaaguggaagagauga

SEQ ID NO: 1500 - RNA, 1476 nt, Artificial Sequence
  derived and/or modified protein sequence (opt4) from MOPV/LASV reassortant(IGS-11;Clade IV)__AFY05588__GPC
augggccagaucgugaccuucuuccaggaggugccccacgugaucgaggaggugaugaacaucgugcugaucgcccugagcgugcuggccgugcugaagggccuguacaacuucgccaccugcggccuggugggccuggugaccuuccugcugcugugcggcagaagcugcaccaccagccuguacaagggcguguacgagcugcagacccuggagcugaacauggagacccugaacaugaccaugccccugagcugcaccaagaacaacagccaccacuacaucauggugggcaacgagaccggccuggagcugacccugaccaacaccagcaucaucaaccacaaguucugcaaccugagcgacgcccacaagaagaaccuguacgaccacgcccugaugagcaucaucagcaccuuccaccugagcauccccaacuucaaccaguacgaggccaugagcugcgacuucaacggcggcaagaucagcgugcaguacaaccugagccacagcuacgccggcgacgccgccaaccacugcggcaccguggccaacggcgugcugcagaccuucaugagaauggccuggggcggcagcuacaucgcccuggacagcggcagaggcaacugggacugcaucaugaccagcuaccaguaccugaucauccagaacaccaccugggaggaccacugccaguucagcagacccagccccaucggcuaccugggccugcugagccagagaaccagagaccuguacaucagcagaagacugcugggcaccuucaccuggacccugagcgacagcgagggcgaggacacccccggcggcuacugccugaccagauggaugcugaucgaggccgagcugaagugcuucggcaacaccgccguggccaagugcaacgagaagcacgacgaggaguucugcgacaugcugagacuguucgacuucaacaagcaggccauccagagacugaaggccgaggcccagaugagcauccagcugaucaacaaggccgugaacgcccugaucaacgaccagcugaucaugaagaaccaccugagagacaucaugggcauccccuacugcaacuacagcaaguacugguaccugaaccacaccaccaccggcagaaccagccugcccaagugcuggcuggugagcaacggcagcuaccugaacgagacccacuucagcgacgacaucgagcagcaggccgacaacaugaucaccgagaugcugcagaaggaguacauggagagacagggcaagaccccccugggccugguggaccuguucguguucagcaccagcuucuaccugaucagcaucuuccugcaccuggugaagauccccacccacagacacaucgugggcaagagcugccccaagccccacagacugaaccacaugggcaucugcagcugcggccuguacaagcagcccggcgugcccgugaaguggaagagauga

SEQ ID NO: 1501 - RNA, 1476 nt, Artificial Sequence
  derived and/or modified protein sequence (opt4) from MOPV/LASV reassortant(IGS-12;Clade IV)__AFY05590__GPC
augggccagaucgugaccuucuuccaggaggugccccacgugaucgaggaggugaugaacaucgugcugaucgcccugagcgugcuggccgugcugaagggccuguacaacuucgccaccugcggccuggugggccuggugaccuuccugcugcugugcggcagaagcugcaccaccagccuguacaagggcguguacgagcugcagacccuggagcugaacauggagacccugaacaugaccaugccccugagcugcaccaagaacaacagccaccacuacaucauggugggcaacgagaccggccuggagcugacccugaccaacaccagcaucaucaaccacaaguucugcaaccugagcgacgcccacaagaagaaccuguacgaccacgcccugaugagcaucaucagcaccuuccaccugagcauccccaacuucaaccaguacgaggccaugagcugcgacuucaacggcggcaagaucagcgugcaguacaaccugagccacagcuacgccggcgacgccgccaaccacugcggcaccguggccaacggcgugcugcagaccuucaugagaauggccuggggcggcagcuacaucgcccuggacagcggcagaggcaacugggacugcaucaugaccagcuaccaguaccugaucauccagaacaccaccugggaggaccacugccaguucagcagacccagccccaucggcuaccugggccugcugagccagagaaccagagacauguacaucagcagaagacugcugggcaccuucaccuggacccugagcgacagcgagggcgaggacacccccggcggcuacugccugaccagauggaugcugaucgaggccgagcugaagugcuucggcaacaccgccguggccaagugcaacgagaagcacgacgaggaguucugcgacaugcugagacuguucgacuucaacaagcaggccauccagagacugaaggccgaggcccagaugagcauccagcugaucaacaaggccgugaacgcccugaucaacgaccagcugaucaugaagaaccaccugagagacaucaugggcauccccuacugcaacuacagcaaguacugguaccugaaccacaccaccaccggcagaaccagccugcccaagugcuggcuggugagcaacggcagcuaccugaacgagacccacuucagcgacgacaucgagcagcaggccgacaacaugaucaccgagaugcugcagaaggaguacauggagagacagggcaagaccccccugggccugguggaccuguucguguucagcaccagcuucuaccugaucagcaucuuccugcaccuggugaagauccccacccacagacacaucgugggcaagagcugccccaagccccacagacugaaccacaugggcaucugcagcugcggccuguacaagcagcccggcgugcccgugaaguggaagagauga

SEQ ID NO: 1502 - RNA, 1476 nt, Artificial Sequence
  derived and/or modified protein sequence (opt4) from LASV(LM032-SLE-2010;Clade IV)__AIT17802__GPC
augggccagaucgugaccuucuuccaggaggugccccacgugaucgaggaggugaugaacaucgugcugaucgcccugagcauccuggccgugcugaagggccuguacaaccuggccaccugcggccuggugggccuggugaccuuccugcugcugugcggcagaagcugcaccaccagccuguacaagggcguguacgagcugcagacccuggagcugaacauggagacccugaacaugaccaugccccugagcugcaccaagaacaacagccaccacuacaucauggugggcaacgagaccggccuggagcugacccugaccaacaccagcaucaucaaccacaaguucugcaaccugagcgacgcccacaagaagaaccuguacaaccacgcccugaugagcaucaucagcaccuuccaccugagcauccccaacuucaaccaguacgaggccaugagcugcgacuucaacggcggcaagaucagcgugcaguacaaccugagccacagcuacgccggcgacgccgccaaccacugcggcaccguggccaacggcgugcugcagaccuucaugagaauggccuggggcggcagcuacaucgcccuggacagcggcagagacagaugggacugcaucaugaccagcuaccaguaccugaucauccagaacaccaccugggaggaccacugccaguucagcagacccagccccaucggcuaccugggccugcugagccagagaaccagagacaucuacaucagcagaagacugcugggcaccuucaccuggacccugagcgacagcgagggcaaggacacccccggcggcuacugccugaccagauggaugcugaucgaggccgagcugaagugcuucggcaacaccgccguggccaagugcaacgagaagcacgacgaggaguucugcgacaugcugagacuguucgacuucaacaagcaggccauccagagacugaaggccgaggcccagaugagcauccagcugaucaacaaggccgugaacgcccugaucaacgaccagcugaucaugaagaaccaccugagagacaucaugggcauccccuacugcaacuacagcaaguacugguaccugaaccacaccaccaccggcaagaccagccugcccaagugcuggcuggugagcaacggcagcuaccugaacgagacccacuucagcgacgacaucgagcagcaggccgacaacaugaucaccgagaugcugcagaaggaguacauggagagacugggcaagaccccccugggccugguggaccuguucguguucagcaccagcuucuaccugaucagcaucuuccugcaccuggugaagauccccacccacagacacaucgugggcagaagcugccccaagccccacagacugaaccacaugggcaucugcagcugcggccuguacaagcagcccggcgugcccgugaaguggaagagauga

SEQ ID NO: 1503 - RNA, 1476 nt, Artificial Sequence
  derived and/or modified protein sequence (opt4) from LASV(LM222-SLE-2010;Clade IV)__AIT17806__GPC
augggccagaucgugaccuucuuccaggaggugccccacgugaucgaggaggugaugaacaucgugcugaucgcccugagcauccuggccgugcugaagggccuguacaacuucgccaccugcggccugaucggccuggugaccuuccugcugcugugcggcagaagcugcaccaccagccuguacaagggcguguacgagcugcagacccuggagcugaacauggagacccugaacaugaccaugccccugagcugcaccaagaacaacagccaccacuacaucauggugggcaacgagaccggccuggagcugacccugaccaacaccagcaucaucaaccacaaguucugcaaccugagcgacgcccacaagaagaaccuguacgaccacgcccugaugagcaucaucagcaccuuccaccugagcauccccaacuucaaccaguacgaggccaugagcugcgacuucaacggcggcaagaucagcgugcaguacaaccugagccacagcuacgccggcgacgccgccaaccacugcggcaccguggccaacggcgugcugcagaccuucaugagaauggccuggggcggcagcuacaucgcccuggacagcggcagaggcaagugggacugcaucaugaccagcuaccaguaccugaucauccagaacaccaccugggaggaccacugccaguucagcagacccagccccaucggcuaccugggccugcugagccagagaaccagagacaucuacaucagcagaagacugcugggcaccuucaccuggacccugagcgacagcgagggcaaggacacccccggcggcuacugccugaccagauggaugcugaucgaggccgagcugaagugcuucggcaacaccgccguggccaagugcaacgagaagcacgacgaggaguucugcgacaugcugagacuguucgacuucaacaagcaggccauccagagacugaaggccgaggcccagaugagcauccagcugaucaacaaggccgugaacgcccugaucaacgaccagcugaucaugaagaaccaccugagagacaucaugggcauccccuacugcaacuacagcaaguacugguaccugaaccacaccaccaccggcaagaccagccugcccaagugcuggcuggugagcaacggcagcuaccugaacgagacccacuucagcgacgacaucgagcagcaggccgacaacaugaucaccgagaugcugcagaaggaguacauggagagacagggcaagaccccccugggccugguggaccuguucguguucagcaccagcuucuaccugaucagcaucuuccugcaccuggugaagauccccacccacagacacaucgugggcaagagcugccccaagccccacagacugaaccacaugggcaucugcagcugcggccuguacaagcagcccggcgugcccgugaaguggaagagauga

SEQ ID NO: 1504 - RNA, 1476 nt, Artificial Sequence
  derived and/or modified protein sequence (opt4) from LASV(LM395-SLE-2009;Clade IV)__AIT17810__GPC
augggccagaucgugaccuucuuccaggaggugccccacgugaucgaggaggugaugaacaucgugcugaucgcccugagcauccuggccgugcugaagggccuguacaaccuggccaccugcggccuggugggccuggugaccuuccugcugcugugcggcagaagcugcaccaccagccuguacaagggcguguacgagcugcagacccuggagcugaacauggagacccugaacaugaccaugccccugagcugcaccaaggacaacagccaccacuacaucagagugggcaacgagaccggccuggagcugacccugaccaacaccagcauccugaaccacaaguucugcaaccugagcgacgcccacaagaagaaccuguacgaccacgcccugaugagcaucaucagcaccuuccaccugagcauccccaacuucaaccaguacgaggccaugagcugcgacuucaacggcggcagaaucagcgugcaguacaaccugagccacagcuacgccggcgacgccgccaaccacugcggcaccguggccaacggcgugcugcagaccuucaugagaauggccuggggcggcagcuacaucgcccuggacagcggcagaggcagaugggacugcaucaugaccagcuaccaguaccugaucauccagaacaccaccugggaggaccacugccaguucagcagacccagccccaucggcuaccugggccugcugagccagagaaccagagacaucuacaucagcagaagacugcugggcaccuucaccuggacccugagcgacagcgagggcaaggacacccccggcggcuacugccugaccagauggaugcugaucgaggccgagcugaagugcuucggcaacaccgccguggccaagugcaacgagaagcacgacgaggaguucugcgacaugcugagacuguucgacuucaacaagcaggccauccagagacugaaggccgaggcccagaugagcauccagcugaucaacaaggccgugaacgcccugaucaacgaccagcugaucaugaagaaccaccugagagacaucaugggcauccccuacugcaacuacagcaaguacugguaccugaaccacaccaccaccggcaagaccagccugcccagaugcuggcuggugagcaacggcagcuaccugaacgagacccacuucagcgacgacaucgagcagcaggccgacaacaugaucaccgagaugcugcagaaggaguacauggagagacagggcaagaccccccugggccugguggaccuguucguguucagcaccagcuucuaccugaucagcaucuuccugcaccuggugaagauccccacccacagacacguggugggcaagcccugccccaagccccacagacugaaccacaugggcaucugcagcugcggccuguacaagcagcccggcgugcccgugaaguggaagagauga

SEQ ID NO: 1505 - RNA, 1476 nt, Artificial Sequence
  derived and/or modified protein sequence (opt4) from LASV(LM765-SLE-2012;Clade IV)__AIT17814__GPC
augggccagaucgugaccuucuuccaggaggugccccacgugaucgaggaggugaugaacaucgugcugaucgcccugagcauccuggccgugcugaagggccuguacaacuucgccaccugcggccuggugggccuggugaccuuccugcugcugugcggcagaagcugcaccaccagccuguacaagggcguguacgagcugcagacccuggagcugaacauggagacccugaacaugaccaugccccugagcugcaccaagaacaacagccaccacuacaucauggugggcaacgagaccggccuggagcugacccugaccaacaccagcaucaucgaccacaaguucugcaaccugagcgacgcccacagaaagaaccuguacgaccacgcccugaugagcaucaucagcaccuuccaccugagcauccccaacuucaaccaguacgaggccaugagcugcgacuucaacggcggcaagaucagcgugcaguacaaccugagccacagcuacgccaaggacgccgccgaccacugcggcaccguggccaacggcgugcugcagaccuucaugagaauggccuggggcggcagcuacaucgcccuggacagcggcagaggcagaugggacugcaucaugaccagcuaccaguaccugaucauccagaacaccaccugggaggaccacugccaguucagcagacccagccccaucggcuaccugggccugcugagccagagaaccagagacaucuacaucagcagaagacugcugggcaccuucaccuggacccugagcgacagcgagggcaaggacacccccggcggcuacugccugaccagauggaugcugaucgaggccgagcugaagugcuucggcaacaccgccguggccaagugcaacgagaagcacgacgaggaguucugcgacaugcugagacuguucgacuucaacaagcaggccauccagagacugaaggccgaggcccagaugagcauccagcugaucaacaaggccgugaacgcccugaucaacgaccagcugaucaugaagaaccaccugagagacaucaugggcauccccuacugcaacuacagcaaguacugguaccugaaccacaccaccaccggcaagaccagccugcccaagugcuggcuggugagcaacggcagcuaccugaacgagacccacuucagcgacgacaucgagcagcaggccgacaacaugaucaccgagaugcugcagaaggaguacauggagagacagggcaagaccccccugggccugguggaccuguucguguucagcaccagcuucuaccugaucagcaucuuccugcaccuggugaagauccccacccacagacacaucgugggcaagcccugccccaagccccacagacugaaccacaugggcaucugcagcugcggccuguacaagcagcccggcgugcccgugaaguggaagagauga

SEQ ID NO: 1506 - RNA, 1476 nt, Artificial Sequence
  derived and/or modified protein sequence (opt4) from LASV(LM774-SLE-2012;Clade IV)__AIT17820__GPC
augggccagaucgugaccuucuuccaggaggugccccacgugaucgaggaggugaugaacaucgugcugaucgcccugagcauccuggccgugcugaagggccuguacaacuucgccaccugcggccuggugggccuggugaccuuccugcugcugugcggcagaagcugcaccaccagccuguacaagggcguguacgagcugcagacccuggagcugaacauggagacccugaacaugaccaugccccugagcugcaccaagaacaacagccaccacuacaucauggugggcaacgagaccggccuggagcugacccugaccaacaccagcaucaucaaccacaaguucugcaaccugagcgacgcccacaagaagaaccuguacgaccacgcccugaugagcaucaucagcaccuuccaccugagcauccccaacuucaaccaguacgaggccaugagcugcgacuucaacggcggcaagaucagcgugcaguacaaccugagccacagcuacgccgaggacgccgccaaccacugcggcaccguggccaacggcgugcugcagaccuucaugagaauggccuggggcggcagcuacaucgcccuggacagcggcagaggcaacugggacugcaucaugaccagcuaccaguaccugaucauccagaacaccaccugggaggaccacugccaguucagcagacccagccccaucggcuaccugggccugcugagccagagaaccagagacaucuacaucagcagaagacugcugggcaccuucaccuggacccugagcgacagcgagggcaaggacacccccggcggcuacugccugaccagauggaugcugaucgaggccgagcugaagugcuucggcaacaccgccguggccaagugcaacgagaagcacgacgaggaguucugcgacaugcugagacuguucgacuucaacaagcaggccauccagagacugaaggccgaggcccagaugagcauccagcugaucaacaaggccgugaacgcccugaucaacgaccagcugaucaugaagaaccaccugagagacaucaugggcauccccuacugcaacuacagcaaguacugguaccugaaccacaccaccaccggcaagaccagccugcccaagugcuggcuggugagcaacggcagcuaccugaacgagacccacuucagcgacgacaucgagcagcaggccgacaacaugaucaccgagaugcugcagaaggaguacauggagagacagggcaagaccccccugggccugguggaccuguucguguucagcaccagcuucuaccugaucagcaucuuccugcaccuggugaagauccccacccacagacacaucgugggcaagagcugccccaagccccacagacugaaccacaugggcaucugcagcugcggccuguacaagcagcccggcgugcccgugaaguggaagagauga

SEQ ID NO: 1507 - RNA, 1476 nt, Artificial Sequence
  derived and/or modified protein sequence (opt4) from LASV(LM776-SLE-2012;Clade IV)__AIT17824__GPC
augggccagaucgugaccuucuuccaggaggugccccacgugaucgaggaggugaugaacaucgugcugaucgcccugagcauccuggccgugcugaagggccuguacaacuucgccaccugcggccuggugggccuggugaccuuccugcugcugugcggcagaagcugcaccaccagcguguacaagggcguguacgagcugcagacccuggagcugaacauggagacccugaacaugaccaugccccugagcugcaccaagaacaacagccaccacuacaucauggugggcaacgagaccggccuggagcugacccugaccaacaccagcaucaucaaccacaaguucugcaaccugagcgacgcccacaagaagaaccuguacgaccacgcccugaugagcaucaucagcaccuuccaccugagcauccccaacuucaaccaguacgaggccaugagcugcgacuucaacggcggcaagaucagcgugcaguacaaccugagccacagcuacgccggcgacgccgccaaccacugcggcaccguggccaacggcgugcugcagaccuucaugagaauggccuggggcggcagcuacaucgcccuggacagcggccacggcaagugggacugcaucaugaccagcuaccaguaccugaucauccagaacaccaccugggaggaccacugccaguucagcagacccagccccaucggcuaccugggccugcugagccagagaaccagagacaucuacaucagcagaagacugcugggcaccuucaccuggacccugagcgacagcgagggcaaggacacccccggcggcuacugccugaccagauggaugcugaucgaggccgagcugaagugcuucggcaacaccgccguggccaagugcaacgagaagcacgacgaggaguucugcgacaugcugagacuguucgacuucaacaagcaggccauccagagacugaaggccgaggcccagaugagcauccagcugaucaacaaggccgugaacgcccugaucaacgaccagcugaucaugaagaaccaccugagagacaucaugggcauccccuacugcaacuacagcaaguacugguaccugaaccacaccaccaccggcaagaccagccugcccaagugcuggcuggugagcaacggcagcuaccugaacgagacccacuucagcgacgacaucgagcagcaggccgacaacaugaucaccgagaugcugcagaaggaguacauggagagacagggcaagaccccccugggccugguggaccuguucguguucagcaccagcuucuaccugaucagcaucuuccugcaccuggugaagauccccacccacagacacaucgugggcaagagcugccccaagccccacagacugaaccacaugggcaucugcagcugcggccuguacaagcagcccggcgugcccgugagauggaagagauga

SEQ ID NO: 1508 - RNA, 1476 nt, Artificial Sequence
  derived and/or modified protein sequence (opt4) from LASV(LM778-SLE-2012;Clade IV)__AIT17828__GPC
augggccagaucgugaccuucuuccaggaggugccccacgugaucgaggaggugaugaacaucgugcugaucgcccugagcauccuggccgugcugaagggccuguacaacuucgccaccugcggccuggugggccuggugaccuuccugcugcugugcggcagaagcugcaccaccagccuguacaagggcgacuacgagcugcagacccuggagcugaacauggagacccugaacaugaccaugccccugagcugcaccaagaacaacagccaccacuacaucauggugggcaacgagaccggccuggagcugacccugaccaacaccagcaucaucaaccacaaguucugcaaccugagcgacgcccacaagaagaaccuguacgaccacgcccugaugagcaucaucagcaccuuccaccugagcauccccaacuucaaccaguacgaggccaugagcugcgacuucaacggcggcaagaucagcgugcaguacaaccugagccacagcuacgccggcgacgccgccaaccacugcggcaccguggccaacggcgugcugcagaccuucaugagaauggccuggggcggcagcuacaucgcccuggacagcggcagaggcaacugggacugcaucaugaccagcuaccaguaccugaucauccagaacaccaccugggaggaccacugccaguucagcagacccagccccaucggcuaccugggccugcugagccagagaaccagagacaucuacaucagcagaagacugcugggcaccuucaccuggacccugagcgacagcgagggcaaggacacccccggcggcuacugccugaccagauggaugcugaucgaggccgagcugaagugcuucggcaacaccgccguggccaagugcaacgagaagcacgacgaggaguucugcgacaugcugagacuguucgacuucaacaagcaggccauccagagacugaaggccgaggcccagaugagcauccagcugaucaacaaggccgugaacgcccugaucaacgaccagcugaucaugaagaaccaccugagagacaucaugggcauccccuacugcaacuacagcaaguacugguaccugaaccacaccaccaccggcaagaccagccugcccaagugcuggcuggugagcaacggcagcuaccugaacgagacccacuucagcgacgacaucgagcagcaggccgacaacaugaucaccgagaugcugcagaaggaguacauggagagacagggcaagaccccccugggccugguggaccuguucguguucagcaccagcuucuaccugaucagcaucuuccugcaccuggugaagauccccacccacagacacaucgugggcaagagcugccccaagccccacagacugaaccacaugggcaucugcagcugcggccuguacaagcagcccggcgugcccgugaaguggaagagauga

SEQ ID NO: 1509 - RNA, 1476 nt, Artificial Sequence
  derived and/or modified protein sequence (opt4) from LASV(Mad39;Clade IV)__ANH09722__GPC
augggccagaucgugaccuucuuccaggaggugccccacgugaucgaggaggugaugaacaucgugcugaucgcccugagcauccuggccgugcugaagggccuguacaacguggccaccugcggccugaucggccuggugaccuuccugcugcugugcggcagaagcugcaccaccacccuguacaagggcguguacgagcugcaggcccuggagcugaacauggagacccugaacaugaccaugccccugagcugcaccaagaacaacagccaccacuacaucagagugggcaacgagaccggccuggagcugacccugaccaacaccagccugaucaaccacaaguucugcaaccugagcgacgcccacaagaagaaccuguacgaccacgcccugaugagcaucaucagcaccuuccaccugagcauccccaacuucaaccaguacgaggccaugagcugcgacuucaacgacggcaagaucagcgugcaguacaaccugagccacaccuacgccggcgacaccgccaaccacugcggcaccguggccaacggcgugcugcagaccuucaugagaauggccuggggcggcagcuacaucgcccuggacagcggcagaggcggcugggacugcaucaugaccagcuaccaguaccugaucauccagaacaccaccugggaggaccacugccaguucagcagacccagccccaucggcuaccugggccugcugagccagagaaccagagacaucuacaucagcagaagacugcugggcaccuucaccuggacccugagcgacagcgagggcaaggacacccccggcggcuacugccugaccagauggaugcugaucgaggccgagcugaagugcuucggcaacaccgccguggccaagugcaacgagaagcacgacgaggaguucugcgacaugcugagacuguucgacuucaacaagcaggccauccagagacugaaggccgaggcccagaugagcauccagcugaucaacaaggccgugaacgcccugaucaacgaccagcugaucaugaagaaccaccugagagacaucaugggcauccccuacugcaacuacagcaaguacugguaccugaaccacaccgugaccggcaagaccagccugcccaagugcuggcuggugagcaacggcagcuaccugaacgagacccacuucagcgacgacaucgagcagcaggccgacaacaugaucaccgagaugcugcagaaggaguacauggagagacagggcaagaccccccugggccugguggaccuguucguguucagcaccagcuucuaccugaucagcaucuuccugcaccuggugaagauccccacccacagacacguggugggcaagcccugccccaagccccacagacugaaccacaugggcaucugcagcugcggcuucuacaagcagcccggcgugcccgugagauggaagagauga

SEQ ID NO: 1510 - RNA, 1476 nt, Artificial Sequence
  derived and/or modified protein sequence (opt4) from LASV(Mad41;Clade IV)__ANH09724__GPC
augggccagaucgugaccuucuuccaggaggugccccacgugaucgaggaggugaugaacaucgugcugaucgcccugagcauccuggccgugcugaagggccuguacaacguggccaccugcggccugaucggccuggugaccuuccugcugcugugcggcagaagcugcaccaccacccuguacaagggcguguacgagcugcaggcccuggagcugaacauggagacccugaacaugaccaugccccugagcugcaccaagaacgacagccaccacuacaucauggugggcaacgagaccggccuggagcugacccugaccaacaccagcaucaucagccacaaguucugcaaccugagcgacgcccacaagcagaaccuguacgaccacgcccugaugagcaucaucagcaccuuccaccugagcauccccaacuucaaccaguacgaggccaugagcugcgacuucaacggcggcaagaucagcgugcaguacaaccugagccacaccuacgccggcgacgccgccaaccacugcggcaccguggccaacggcgugcugcagaccuucaugagaauggccuggggcggcagcuacaucgcccuggacagcggcagaggcggcugggacugcaucaugaccagcuaccaguaccugaucauccagaacaccaccugggaggaccacugccaguucagcagacccagccccaucggcuaccugggccugcugagccagagaaccagagacaucuacaucagcagaagacugcugggcaccuucaccuggacccugagcgacagcgagggcaaggacacccccggcggcuacugccugaccagauggaugcugaucgaggccgagcugaagugcuucggcaacaccgccguggccaagugcaacgagaagcacgacgaggaguucugcgacaugcugagacuguucgacuucaacaagcaggccauccagagacugaaggccgaggcccagaugagcauccagcugaucaacaaggccgugaacgcccugaucaacgaccagcugaucaugaagaaccaccugagagacaucaugggcauccccuacugcaacuacagcaaguacugguaccugaaccacaccgugaccggcaagaccagccugcccaagugcuggcuggugagcaacggcagcuaccugaacgagacccacuucagcgacgacaucgagcagcaggccgacaacaugaucaccgagaugcugcagaaggaguacauggagagacagggcaagaccccccugggccugguggaccuguucguguucagcaccagcuucuaccugaucagcaucuuccugcaccuggugaagauccccacccacagacacguggugggcaagcccugccccaagccccacagacugaaccacaugggcaucugcagcugcggcuucuacggccagcccggcgugcccgugagauggaagagauga

SEQ ID NO: 1511 - RNA, 1476 nt, Artificial Sequence
  derived and/or modified protein sequence (opt4) from LASV(Mad63;Clade IV)__ANH09728__GPC
augggccagaucgugaccuucuuccaggaggugccccacgugaucgaggaggugaugaacaucgugcugaucgcccugagcgugcuggccgugcugaagggccuguacaacguggccaccugcggccugaucggccuggugaccuuccugcugcugugcggcagaagcugcaccaccacccuguacaagggcguguacgagcugcaggcccuggagcugaacaugggcacccugaacaugaccaugccccugagcugcaccaagaacaacagccaccacuacaucauggugggcaacgagaccggccuggagcugacccugaccaacaccagcaucaucaaccacaaguucugcaaccugagcgacgcccacaagaaggaccuguacgaccacgcccugaugagcaucaucagcaccuuccaccugagcgugcccaacuucaaccaguacgaggccaugagcugcgacuucaacggcggcaagaucagcgugcaguacaaccugagccacgccuacgccggcgacaccgccaaccacugcggcaccguggccaacggcgugcugcagaccuucaugagaauggccuggggcggcagcuacaucgcccuggacagcggcagaggcggcugggacugcaucaugaccagcuaccaguaccugaucauccagaacaccaccugggaggaccacugccaguucagcagacccagccccaucggcuaccugggccugcugagccagagaaccagagacaucuacaucagcagaagacugcugggcaccuucaccuggacccugagcgacagcgagggcgaguacacccccggcggcuacugccugaccagauggaugcugaucgaggccgagcugaagugcuucggcaacaccgccguggccaagugcaacgagaagcacgacgaggaguucugcgacaugcugagacuguucgacuucaacaagcaggccauccagagacugaaggccgaggcccagaugagcauccagcugaucaacaaggccgugaacgcccugaucaacgaccagcugaucaugaagaaccaccugagagacaucaugggcauccccuacugcaacuacagcaaguacugguaccugaaccacaccgugaccggcaagaccagccugcccaagugcuggcuggugagcaacggcagcuaccugaacgagacccacuucagcgacgacaucgagcagcaggccgacaacaugaucaccgagaugcugcagaaggaguacauggagagacagggcaagaccccccugggccugguggaccuguucguguucagcaccagcuucuaccugaucagcaucuuccugcaccuggugaagauccccacccacagacacguggugggcaagcccugccccaagccccacagacugaaccacaugggcaucugcagcugcggcuucuacaagcagcccggcgugcccgugagauggaagagauga

SEQ ID NO: 1512 - RNA, 1476 nt, Artificial Sequence
  derived and/or modified protein sequence (opt4) from LASV(Mad69;Clade IV)__ANH09730__GPC
augggccagaucgugaccuucuuccaggaggugccccacgugaucgaggaggugaugaacaucgugcugaucgcccugagcgugcuggccgugcugaagggccuguacaacguggccaccugcggccugaucggccuggugaccuuccugcugcugugcggcagaagcugcaccaccacccuguacaagggcguguacgagcugcaggcccuggagcugaacauggagacccugaacaugaccaugccccugagcugcaccaagaacaacagccaccacuacaucauggugggcaacgagaccggccuggagcugacccugaccaacaccagcaucaucaaccacaaguucugcaaccugagcgacgcccacaagaagaaccuguacgaccacgcccugaugagcaucaucagcaccuuccaccugagcauccccaacuucaaccaguacgaggccaugagcugcgacuucaaccagggcaagaucagcgugcaguacaaccugagccacgccuacgccggcgacgccgccaaccacugcggcaccguggccaacggcgugcugcagaccuucaugagaauggccuggggcggcagcuacaucgcccuggacagcggcagaggcggcugggacugcaucaugaccagcuaccaguaccugaucauccagaacaccaccugggagaaccacugccaguucagcagacccagccccaucggcuaccugggccugcugagccagagaaccagagacaucuacaucagcagaagacugcugggcaccuucaccuggacccugagcgacagcgagggcaagggcacccccggcggcuacugccugaccagauggaugcugaucgaggccgagcugaagugcuucggcaacaccgccguggccaagugcaacgagaagcacgacgaggaguucugcgacaugcugagacuguucgacuucaacaagcaggccauccagagauucaaggccgaggcccagaugagcauccagcugaucaacaaggccgugaacgcccugaucaacgaccagcugaucaugaagaaccaccugagagacaucaugggcauccccuacugcaacuacagcaaguacugguaccugaaccacaccgugaccggcaagaccagccugcccaagugcuggcuggugagcaacggcagcuaccugaacgagacccacuucagcgacgacaucgagcagcaggccgacaacaugaucaccgagaugcugcagaaggaguacauggagagacagggcagaaccccccugggccugguggaccuguucguguucagcaccagcuucuaccugaucagcaucuuccugcaccuggugaagauccccacccacagacacguggugggcaagcccugccccaagccccacagacugaaccacaugggcaucugcagcugcggcuucuacaagcagcccggcgugcccgugagauggaagagauga

SEQ ID NO: 1513 - RNA, 1476 nt, Artificial Sequence
  derived and/or modified protein sequence (opt4) from LASV(Mad83;Clade IV)__ANH09732__GPC
augggccagaucgugaccuucuuccaggaggugccccacgugaucgaggaggugaugaacaucgugcugaucgcccugagcauccuggccgugcugaagggcguguacaacguggccaccugcggccugaucggccuggugaccuuccugcugcugagcggcagaagcugcaccaccaccaucuacaagggcguguacgagcugcaggcccuggagcugaacauggagacccugaacaugaccaugccccugagcugcaccaagaacaacagccaccacuacaucauggugggcaacgagaccggccuggagcugacccugaccaacaccagcaucaucaaccacaaguucugcaaccugagcgacgcccacaagaagaaccuguacgaccacgcccugaugagcaucaucagcaccuuccaccugagcauccccaacuucaaccaguacgaggccaugagcugcgacuucaacggcggcaagaucagcgugcaguacaaccugagccacaccuacgccggcgacgccgccaaccacugcggcaccguggccaacggcgugcugcagaccuucaugagaauggccuggggcggcagcuacaucgcccuggacagcggccacggcggcugggacugcaucaugaccagcuaccaguaccugaucauccagaacaccaccugggagaaccacugccaguucagcagacccagccccaucggcuaccugggccugcugagccagagaaccagagacaucuacaucagcagaagacugcugggcaccuucaccuggacccugagcgacagcgagggcaaggacacccccggcggcuacugccugaccagauggaugcugaucgaggccgagcugaagugcuucggcaacaccgccguggccaagugcaacgagaagcacgacgaggaguucugcgacaugcugagacuguucgacuucaacaagcaggccauccagagacugaaggccgaggcccagaugagcauccagcugaucaacaaggccgugaacgcccugaucaacgaccagcugaucaugaagaaccaccugagagacaucaugggcauccccuacugcaacuacagcaaguacugguaccugaaccacaccgugaccggcaagaccagccugcccaagugcuggcuggugagcaacggcagcuaccugaacgagacccacuucagcgacgacaucgagcagcaggccgacaacaugaucaccgagaugcugcagaaggaguacauggagagacagggcaagaccccccugggccugguggaccuguucguguucagcaccagcuucuaccugaucagcaucuuccugcaccuggugaagauccccacccacagacacaucgugggcaagcccugccccaagccccacagacugaaccacaugggcaucugcagcugcggcuucuacaagcagcccggcgugcccgugagauggaagagauga

SEQ ID NO: 1514 - RNA, 1476 nt, Artificial Sequence
  derived and/or modified protein sequence (opt4) from LASV(NL;Clade IV)__AAO59512__GPC
augggccagaucgugaccuucuuccaggaggugccccacgugaucgaggaggugaugaacaucgugcugaucgcccugagcauccuggccgugcugaagggccuguacaacuucgccaccugcggccuggugggccugguggccuuccugcugcugugcggcagaagcugcaccagcagccuguacaagggcguguacgagcugcagacccuggagcugaacauggagacccugaacaugaccaugccccugagcugcaccaagaacaacagccaccacuacaucagagugggcaacgagaccggccuggagcugacccugaccaacaccagcaucaucaaccacaaguucugcaaccugagcgacgcccacaagaagaaccuguacgaccacgcccugaugagcaucaucagcaccuuccaccugagcauccccaacuucaaccaguacgaggccaugagcugcgacuucaacggcggcaagaucagcgugcaguacaaccugagccacagcuacgccguggacgccgccaagcacugcggcaccguggccaacggcgugcugcagaccuucaugagaauggccuggggcggcagcuacaucgcccuggacagcggccacggcagaugggacugcaucaugaccagcuaccaguaccugaucauccagaacaccaccugggaggaccacugccaguucagcagacccagccccaucggcuaccugggccugcugagccagagaaccagagacaucuacaucagcagaagacugcugggcaccuucaccuggacccugagcgacagcgagggcaaggacacccccggcggcuacugccugaccagauggaugcugaucgaggccgagcugaagugcuucggcaacaccgccguggccaagugcaacgagaagcacgacgaggaguucugcgacaugcugagacuguucgacuucaacaagcaggccauccagagacugaagaccgaggcccagaugagcauccagcugaucaacaaggccgugaacgcccugaucaacgaccagcugaucaugaagaaccaccugagagacaucaugggcauccccuacugcaacuacagcagauacugguaccugaaccacaccaccaccggcaagaccagccugcccaagugcuggcuggugagcaacggcagcuaccugaacgagaccagauucagcgacgacaucgagcagcaggccgacaacaugaucaccgagaugcugcagaaggaguacauggagagacagggcaagaccccccugggccugguggaccuguucguguucagcaccagcuucuaccugaucagcaucuuccugcaccuggugaagauccccacccacagacacaucgugggcaagagcugccccaagccccacagacugaaccacaugggcaucugcagcugcggccuguacaagcagcccggcgugcccgugaaguggaagagauga

SEQ ID NO: 1515 - RNA, 1476 nt, Artificial Sequence
  derived and/or modified protein sequence (opt4) from LASV(Z0947-SLE-2011;Clade IV)__AIT17840__GPC
augggccagaucgugaccuucuuccaggaggugccccacgugaucgaggaggugaugaacaucgugcugaucgcccugagcauccuggccgugcugaagggccuguacaacuucgccaccugcggccuggugggccuggugaccuuccugcugcugugcggcagaagcugcaccaucagccuguacaagggcguguacgagcugcagacccuggagcugaacauggagacccugaacaugaccaugccccugagcugcaccaagaacaacagccaccacuacaucauggugggcaacgagaccggccuggagcugacccugaccaacaccagcaucaucaaccacaaguucugcaaccugagcgacgcccacaagaagaaccuguacgaccacgcccugaugagcaucaucagcaccuuccaccugagcauccccaacuucaaccaguacgaggccaugagcugcgacuucaacggcggcaagaucagcgugcaguacaaccugagccacagcuacgccggcgacgccgccaaccacugcggcaccguggccaacggcgugcugcagaccuucaugagaauggccuggggcggcagcuacaucgcccuggacagcggcagagacagaugggacugcaucaugaccagcuaccaguaccugaucauccagaacaccaccugggaggaccacugccaguucagcagacccagccccaucggcuaccugggccugcugagccagagaaccagagacaucuacaucagcagaagacugcugggcaccuucaccuggacccugagcgacagcgagggcaaggacacccccggcggcuacugccugaccagauggaugcugaucgaggccgagcugaagugcuucggcaacaccgccguggccaagugcaacgagaagcacgacgaggaguucugcgacaugcugagacuguucgacuucaacaagcaggccauccagagacugaaggccgaggcccagaugagcauccagcugaucaacaaggccgugaacgcccugaucaacgaccagcugaucaugaagaaccaccugagagacaucaugggcauccccuacugcaacuacagcaaguacugguaccugaaccacaccaccaccggcaagaccagccugcccaagugcuggcuggugagcaacggcagcuaccugaacgagacccacuucagcgacgacaucgagcagcaggccgacaacaugaucaccgagaugcugcagaaggaguacauggagagacagggcaagaccccccugggccugguggaccuguucguguucagcaccagcuucuaccugaucagcaucuuccugcaccuggugaagauccccacccacagacacaucgugggcaagcccugccccaagccccacagacugaaccacaugggcaucugcagcugcggccuguacaagcagcccggcgugcccgugaaguggaagagauga

SEQ ID NO: 1516 - RNA, 1476 nt, Artificial Sequence
  derived and/or modified protein sequence (opt4) from LASV(Z0948-SLE-2011;Clade IV)__AIT17844__GPC
augggccagaucgugaccuucuuccaggaggugccccacgugaucgaggaggugaugaacaucgugcugaucgcccugagcauccuggccgugcugaagggccuguacaacuucgccaccugcggccuggugggccuggugaccuuccugcugcugugcggcagaagcugcaccaucagccuguacaagggcguguacgagcugcagacccuggagcugaacauggagacccugaacaugaccaugccccugagcugcaccaagaacaacagccaccacuacaucauggugggcaacgagaccggccuggagcugacccugaccaacaccagcaucaucaaccacaaguucugcaaccugagcgacgcccacaagaagaaccuguacgaccacgcccugaugagcaucaucagcaccuuccaccugagcauccccaacuucaaccaguacgaggccaugagcugcgacuucaacggcggcaagaucagcgugcaguacaaccugagccacagcuacgccggcgacgccgccaaccacugcggcaccguggccaacggcgugcugcagaccuucaugagaauggccuggggcggcagcuacaucgcccuggacagcggcagagacagaugggacugcaucaugaccagcuaccaguaccugaucauccagaacaccaccugggaggaccacugccaguucagcagacccagccccaucggcuaccugggccugcugagccagagaaccagagacaucuacaucagcagaagacugcugggcaccuucaccuggacccugagcgacagcgagggcaaggacacccccggcggcuacugccugaccagauggaugcugaucgaggccgagcugaagugcuucggcaacaccgccguggccaagugcaacgagaagcacgacgaggaguucugcgacaugcugagacuguucgacuucaacaagcaggccauccagagacugaaggccgaggcccagaugagcauccagcugaucaacagagccgugaacgcccugaucaacgaccagcugaucaugaagaaccaccugagagacaucaugggcauccccuacugcaacuacagcaaguacugguaccugaaccacaccaccaccggcaagaccagccugcccaagugcuggcuggugagcaacggcagcuaccugaacgagacccacuucagcgacgacaucgagcagcaggccgacaacaugaucaccgagaugcugcagaaggaguacauggagagacagggcaagaccccccugggccugguggaccuguucguguucagcaccagcuucuaccugaucagcaucuuccugcaccuggugaagauccccacccacagacacaucgugggcaagcccugccccaagccccacagacugaaccacaugggcaucugcagcugcggccuguacaagcagcccggcgugcccgugaaguggaagagauga

SEQ ID NO: 1517 - RNA, 1476 nt, Artificial Sequence
  derived and/or modified protein sequence (opt4) from LASV(Z148;Clade IV)__AAT49008__GPC
augggccagaucgugaccuucuuccaggaggugccccacgugaucgaggaggugaugaacaucgugcugaucgcccugagcauccuggccgugcugaagggccuguacaacguggccaccugcggccugaucggccuggugaccuuccuguuccugugcggcagaagcugcagcaccacccuguacaagggcguguacgagcugcagacccuggagcugaacauggagacccugaacaugaccaugccccugagcugcaccaagaacaacagccaccacuacaucauggugggcaacgagaccggccuggagcugacccugaccaacaccagcaucaucaaccacaaguucugcaaccugagcgacgcccacaagaagaaccuguacgaccacacccugaugagcaucaucagcaccuuccaccugagcauccccaacuucaaccaguacgaggccaugagcugcgacuucaacggcggcaagaucagcgugcaguacaaccugagccacagcuacgccguggacgccgccaaccacugcggcaccguggccaacggcgugcugcagaccuucaugagaauggccuggggcggcagcuacaucgcccuggacagcggcagaggcaacugggacugcaucaugaccagcuaccaguaccugaucauccagaacaccaccugggaggaccacugccaguucagcagacccagccccaucggcuaccugggccugcugagccagagaaccagagacaucuacaucagcagaagacugcugggcaccuucaccuggacccugagcgacagcgagggcaaggacacccccggcggcuacugccugaccagauggaugcugaucgaggccgagcugaagugcuucggcaacaccgccguggccaagugcaacgagaagcacgacgaggaguucugcgacaugcugagacuguucgacuucaacaagcaggccauccagagacugaaggccgaggcccagaugagcauccagcugaucaacaaggccgugaacgcccugaucaacgaccagcugaucaugaagaaccaccugagagacaucaugggcauccccuacugcaacuacagcagauacugguaccugaaccacaccgugaccggcaagaccagccugcccaagugcuggcuggugagcaacggcagcuaccugaacgagacccacuucagcgacgacaucgagcagcaggccgacaaccugaucaccgagaugcugcagaaggaguacauggagagacagggcaagaccccccugggccugguggaccuguucguguucagcaccagcuucuaccugaucagcaucuuccugcaccuggugaagauccccacccacagacacaucgugggcaagcccugccccaagccccacagacugaaccacaugggcaucugcagcugcggcguguacaagcagcccggcgugcccgugagauggaagagauga

SEQ ID NO: 1518 - RNA, 1476 nt, Artificial Sequence
  derived and/or modified protein sequence (opt4) from LASV(Bamba-R114;Clade V)__AHC95555__GPC
augggccagaucgugaccuucuuccaggaggugccccacgugaucgaggaggugaugaacaucgugcugaucgcccugagcauccuggccgugcugaagggccuguacaacaucgccaccugcggccugaucggccuggugaccuuccugcugcugugcggcagaagcugcagcagcaaccuguacaagggcguguacgagcugcagagccuggaccugaacauggagacccugaacaugaccaugccccugagcugcaccaagaacaacagccaccacuacaucagagccggcaacgagaccggccuggagcugacccugaccaacaccagccugaucaaccacaaguucugcaaccugagcgacgcccacaagaagaaccuguacgaccacacccugaugagcaucaucagcaccuuccaccugagcauccccaacuucaaccaguacgaggccaugagcugcgacuucaacggcggcaagaucagcgugcaguacaaccugagccacgccuacgccaucgacgccgccgagcacugcggcaccguggccaacggcgugcugcagaccuucaugagaauggccuggggcggcagcuacaucgcccuggacagcggcagaggcaacugggacugcaucaugaccagcuaccaguaccugaucauccagaacaccaccugggaggaccacugccaguucagcagacccagccccaucggcuaccugggccugcugagccagagaaccagagacaucuacaucagcagaagacugcugggcaccuucaccuggacccugagcgacagcgagggcaacgccacccccggcggcuacugccugaccagauggaugcugaucgaggccgagcugaagugcuucggcaacaccgccguggccaagugcaacgagaagcacgacgaggaguucugcgacaugcugagacuguucgacuucaacaagcaggccaucagcagacugaagagcgaggcccagaugagcauccagcugaucaacaaggccgugaacgcccugaucaacgaccagcugaucaugaagaaccaccugagagacaucaugggcauccccuacugcaacuacagcaaguacugguaccugaaccacaccaucaccggcagaaccagccugcccaagugcuggcuggugagcaacggcagcuaccugaacgagacccacuucagcgacgacaucgagcagcaggccgacaacaugaucaccgagaugcugcagaaggaguacauggagagacagggcaagaccccccugggccugguggaccuguucguguucagcaccagcuucuaccugaucagcaucuuccugcaccuggugaagauccccacccacagacacaucgugggcaagcccugccccaagccccacagacugaaccacaugggcaucugcagcugcggccuguacaagcagcccggcgugccccugaaguggaagagauga

SEQ ID NO: 1519 - RNA, 1476 nt, Artificial Sequence
  derived and/or modified protein sequence (opt4) from LASV(Komina-R16;Clade V)__AHC95557__GPC
augggccagaucgugaccuucuuccaggaggugccccacgugaucgaggaggugaugaacaucgugcugaucgcccugagcauccuggccgugcugaagggccuguacaacaucgccaccugcggccugaucggccuggugaccuucuuccugcugugcggcagaagcugcagcagcaaccuguacaagggcguguacgagcugcagagccuggaccugaacauggagacccugaacaugaccaugccccugagcugcaccaagaacaacagccaccacuacaucagagugggcaacgagaccggccuggagcugacccugaccaacaccagccugcugaaccacaaguucugcaaccugagcgacgcccacaagagaaaccuguacgaccacgcccugaugagcaucaucagcaccuuccaccugagcauccccaacuucaaccaguacgaggccaugagcugcgacuucaacggcggcaagaucaccgugcaguacaaccugagccacagcuacgccggcgacaccgccaagcacugcggcaccaucgccaacggcgugcugcagaccuucaugagaauggccuggggcggcagcuacaucgcccuggacagcggccacggcaacugggacugcaucaugaccagcuaccaguaccugaucauccagaacaccaccugggaggaccacugccaguucagcagacccagccccaucggcuaccugggccugcugagccagagaaccagagacaucuacaucagcagaagacugcugggcaccuucaccuggacccugagcgacagcgagggcaacgccacccccggcggcuacugccugaccagauggaugcugaucgaggccgagcugaagugcuucggcaacaccgccguggccaagugcaacgagaagcacgacgaggaguucugcgacaugcugagacuguucgacuucaacaagcaggccaucagcagacugagaagcgaggcccagaugagcauccagcugaucaacaaggccgugaacgcccugaucaacgaccagcugaucaugaagaaccaccugagagacaucaugggcauccccuacugcaacuacagcaaguacugguaccugaaccacaccgugaccggcagaaccagccugcccaagugcuggcuggugagcaacggcagcuaccugaacgagacccacuucagcgacgacaucgagcagcaggccgacaacaugaucaccgagaugcugcagaaggaguacauggacagacagggcaagaccccccugggccugguggaccuguucguguucagcaccagcuucuaccugaucagcaucuuccugcaccuggugaagauccccacccacagacacaucgugggcaagcccugccccaagccccacagacugaacagaaugggcaucugcagcugcggccuguacaagcagcccggcgugcccgugaaguggaagagauga

SEQ ID NO: 1520 - RNA, 1476 nt, Artificial Sequence
  derived and/or modified protein sequence (opt4) from LASV(Ouoma-R123;Clade V)__AHC95559__GPC
augggccagaucaucaccuucuuccaggaggugccccacgugaucgaggaggugaugaacaucgugcugaucgcccugagcauccuggccgugcugaagggccuguacaacaucgccaccugcggccugaucggccuggugaccuuccugcugcugugcggcagaagcugcagcagcagccuguacaagggcguguacgagcugcagagccuggaccugaacauggagacccugaacaugaccaugccccugagcugcaccaagaacaacagccaccacuacaucagagugggcaacgagaccggccuggagcugacccugaccaacaccagccugaucaaccacaaguucugcaaccugagcgacgcccacaagaagaaccuguacgaccacgcccugaugagcaucaucagcaccuuccaccugagcauccccaacuucaaccaguacgaggccaugagcugcgacuucaacggcggcaagaucagcgugcaguacaaccugagccacgccuacgccaucgacgccgccagccacugcggcaccguggccaacggcgugcugcagaccuucaugagaauggccuggggcggcagcuacaucgcccuggacagcggccacggcaacugggacugcaucaugaccagcuaccaguaccugaucauccagaacaccaccugggaggaccacugccaguucagcagacccagccccaucggcuaccugggccugcugagccagagaaccagagacaucuacaucagcagaagacugcugggcaccuucaccuggacccugagcgacagcgagggcaacgccacccccggcggcuacugccugaccagauggaugcugaucgaggccgagcugaagugcuucggcaacaccgccguggccaagugcaacgagaagcacgacgaggaguucugcgacaugcugagacuguucgacuucaacaagcaggccaucagcagacugaagagcgaggcccagaugagcauccagcugaucaacaaggccgugaacgcccugaucaacgaccagcugaucaugaagaaccaccugagagacaucaugggcauccccuacugcaacuacagcaaguacugguaccugaaccacaccgugaccggcaagaccagccugcccaagugcuggcuggugagcaacggcagcuaccugaacgagacccacuucagcgacgacaucgagcagcaggccgacaacaugaucaccgagaugcugcagaaggaguacauggagagacagggcaagaccccccugggccugguggaccuguucguguucagcaccagcuucuaccugaucagcaucuuccugcaccuggugaagauccccacccacagacacaucgugggcaagcccugccccaagccccacagacugaaccacaugggcaucugcagcugcggccuguacaagcagcccggcgugcccgugaaguggaagagauga

SEQ ID NO: 1521 - RNA, 1476 nt, Artificial Sequence
  derived and/or modified protein sequence (opt4) from LASV(Soromba-R;Clade V)__AHC95553__GPC
augggccagaucgugaccuucuuccaggaggugccccacgugaucgaggaggugaugaacaucgugcugaucgcccugagcauccuggccgugcugaagggccuguacaacaucgccaccugcggccugaucggccuggugaccuucuuccugcugugcggcagaagcugcagcagcaaccuguacaagggcguguacgagcugcagagccuggaccugaacauggagacccugaacaugaccaugccccugagcugcaccaagaacaacagccaccacuacaucagagugggcaacgagaccggccuggagcugacccugaccaacaccagccugcuggaccacaaguucugcaaccugagcgacgcccacaagaagaaccuguacgaccacgcccugaugagcaucaucagcaccuuccaccugagcauccccaacuucaaccaguacgaggccaugagcugcgacuucaacggcggcaagaucaccgugcaguacaaccugagccacagcuacgccggcgacgccgccagacacugcggcaccaucgccaacggcgugcugcagaccuucaugagaauggccuggggcggcagcuacaucgcccuggacagcggccacggcaacugggacugcaucaugaccagcuaccaguaccugaucauccagaacaccaccugggaggaccacugccaguucagcagacccagccccaucggcuaccugagccugcugagccagagaaccagagacaucuacaucagcagaagacugcugggcaccuucaccuggacccugagcgacagcgagggcaacgccacccccggcggcuacugccugaccagauggaugcugaucgaggccgagcugaagugcuucggcaacaccgccguggccaagugcaacgagaagcacgacgaggaguucugcgacaugcugagacuguucgacuucaacaagcaggccaucagcagacugagaagcgaggcccagaugagcauccagcugaucaacaaggccgugaacgcccugaucaacgaccagcugaucaugaagaaccaccugagagacaucaugggcauccccuacugcaacuacagcaaguacugguaccugaaccacaccgugaccggcagaaccagccugcccaagugcuggcuggugagcaacggcagcuaccugaacgagacccacuucagcgacgacaucgagcagcaggccgacaacaugaucaccgagaugcugcagaaggaguacauggacagacagggcaagaccccccugggccugguggaccuguucguguucagcaccagcuucuaccugaucagcaucuuccugcaccuggugaagauccccacccacagacacaucgugggcaagcccugccccaagccccacagacugaacagaaugggcaucugcagcugcggccuguacaagcagcccggcgugcccgugaaguggaagagauga

SEQ ID NO: 1522 - RNA, 1473 nt, Artificial Sequence; identical to SEQ ID NO: 1276
  derived and/or modified protein sequence (opt4) from LASV(Alzey;Clade VI)__SCA79105__GPC

SEQ ID NO: 1523 - RNA, 1473 nt, Artificial Sequence
  derived and/or modified protein sequence (opt4) from LASV(Lassa/H.sapiens-wt/TGO/2016/201600568;Clade VI)__AVN98153__GPC
augggccagaucaucaccuucuuccaggaggugccccacgugaucgaggaggugaugaacaucgugcugaucgcccugagccugcuggccauccugaagggcguguacaacguggccaccugcggcaucaucggccuggugaccuuccuguuccugugcggcagaagcugcagccugaucuacaagggcagcuacgagcugcagacccuggagcugaacauggagacccugaacaugaccaugccccugagcugcaccaagaacagcagccaccacuacaucagagugggcaacgagaccggccuggagcugacccugaccaacaccagcaucaucaaccacaaguucugcaaccugagcgacgcccacaagagaaaccuguacgaccacgcccugaugagcauccugagcaccuuccaccugagcauccccaacuucaaccaguacgaggccaugagcugcgacuucaacggcggcaagaucagcgugcaguacaaccugagccacgccuacgccguggacgccgccgagcacugcggcaccguggccaacggcgugcugcagaccuucaugagaauggccuggggcggcagcuacaucgcccuggacagcggcagaggcaacugggacugcaucaugaccagcuaccaguaccugaucauccagaacaccaccugggaggaccacugccaguucagcagacccagccccaucggcuaccugggccugcugagccagagaaccagagacaucuacaucagcagaagacugcugggcaccuucaccuggacccugagcgacagcgagggcaacgagacccccggcggcuacugccugaccagauggaugcugaucgaggccgagcugaagugcuucggcaacaccgccguggccaagugcaacgagaagcacgacgaggaguucugcgacaugcugagacuguucgacuucaacaagcaggccauccagagacugaagagcgaggcccagaugagcauccagcugaucaacaaggccgugaacgcccugaucaacgaccagcugaucaugaagaaccaccugagagacaugaugggcauccccuacugcaacuacagcaaguacugguaccugaaccacaccagcagcggcagagccagccugcccaagugcuggcuggugagcaacggcagcuaccugaacgagacccacuucagcgacgacaucgagcagcaggccgacaacaugaucaccgagaugcugcagaaggaguacaucgacagacagggcaagaccccccugggccugguggaccuguucguguucagcaccagcuucuaccugaucagcaucuuccugcaccugaucaagauccccacccacagacacaucgugggcaagcccugccccaagccccacagacugaaccacaugggcaucugcagcugcggccuguacaagcagcccggcgugcccaccagauggaagagauga

SEQ ID NO: 1524 - RNA, 1473 nt, Artificial Sequence
  derived and/or modified protein sequence (opt4) from LASV(NIGERIA IKEJI;Clade II)__AMZ00373__GPC
augggccagaucaucaccuucuuccaggaggugccccacgugaucgaggaggugaugaacaucgugcugaucgcccugagccugcuggccauccugaagggcaucuacaacguggccaccugcggccuguucggccugaucagcuuccuguuccugugcggcagaagcugcagcaccauguacaagggcguguacgagcugcagacccuggagcuggacauggccaaccugaacaugaccaugccccugagcugcaccaagaacaacagccaccacuacaucauggugggcaacgagaccggccuggagcugacccugaccaaccagagcaucaucaaccacaaguucugcaaccugagcgacgcccacaagaagaaccuguacgaccacacccugaugagcaucaucagcaccuuccaccugagcauccccaacuucaaccaguacgaggccaugagcugcgacuucaacggcggcaagaucagcgugcaguacaaccugagccacagcuacgccguggacgccgccaaccacugcggcaccguggccaacggcgugcugcagaccuucaugagaauggccuggggcggcagcuacaucgcccuggacagcggcaagggcaacugggacugcaucaugaccagcuaccaguaccugaucauccagaacaccaccugggaggaccacugccaguucagcagacccagccccaucggcuaccugggccugcugagccagagaaccagagacaucuacaucagcagaagacugcugggcaccuucaccuggacccugagcgacagcgagggcaacgacgcccccggcggcuacugccugaccagauggaugcugaucgaggccgagcugaagugcuucggcaacaccgccaucgccaagugcaacgagaagcacgacgaggaguucugcgacaugcugagacuguucgacuucaacaagcaggccaucaagagacugaaggccgaggcccagaugagcauccagcugaucaacaaggccgugaacgcccugaucaacgaccagcugaucaugaagaaccaccugagagacaucaugggcauccccuacugcaacuacagcaaguacugguaccugaacaacaccgugaccggcaagagcagccugcccaagugcuggcuggugagcaacggcagcuaccugaacgagacccacuucagcgacgacaucgagcagcaggccgacaacaugaucaccgagaugcugcagaaggaguacauggacagacagggcaagaccccccugggccugguggaccuguucguguucagcaccagcuucuaccugaucagcaucuuccugcaccuggugaagauccccacccacagacacaucaccggcaagcccugccccaagccccacagacugaaccacaugggcaucugcagcugcggccuguacaagcagcccggcgugcccgugaaguggaagagauga

SEQ ID NO: 1525 - RNA, 1476 nt, Artificial Sequence
  derived and/or modified protein sequence (opt5) from LASV(Josiah;Clade IV)__NP_694870__GPC
augggccagaucgugaccuucuuucaagaggucccccacguuauugaagaggugaugaacaucgugcugauugcccucagcguccuggcugugcuuaaggggcuguacaauuucgccacaugcggacucguuggccuggugacguuucuucugcucugugggagauccugcaccacaucucuguauaaaggagucuacgaacugcagacccucgagcugaacauggaaacacuuaauaugaccaugccucugagcuguacaaagaacaauucccaucacuauaucauggugggcaacgagaccgggcucgagcugacgcuuaccaauacaucuauuaucaaccauaaauucugcaaucugagcgacgcgcacaagaaaaaccucuacgaucaugcucugauguccaucauuucuaccuuucaccugagcaucccgaauuucaaccaguaugaagccauguccugugacuuuaauggaggcaagauuagcguucaguacaaccucucucacuccuaugccggcgaugcugccaaucauugcgggacaguggcuaacggaguccugcaaaccuucaugcggauggccuggggcgggagcuacaucgcgcuugacucuggacgcggcaacugggauuguauuaugacguccuaccaguaucugaucauucagaauacaaccugggaggaccacugccaguuuagcagacccucuccuaucggguaccucggacugcuuucccaacggacacgcgauaucuauauuagcagacggcugcucggcaccuucaccuggacacuguccgacucugaaggcaaggauacgcccgggggauacugucugacccgcuggaugcucaucgaggccgagcugaaaugcuuuggcaacacagcuguggccaaguguaaugaaaaacaugacgaggaguucugcgauaugcuuagacuguuugacuucaacaagcaggcuauucagcggcucaaagccgaagcgcagaugagcauccaacugauuaauaaggccgugaacgcucuuaucaaugaucagcugaucaugaagaaccaccuccgcgacauuauggggaucccuuauugcaauuacuccaaauauugguaccugaaccacaccacaaccggaagaacgagccugcccaaguguuggcucgucucuaauggcuccuaccugaacgaaacacauuucagcgacgauauugagcagcaagccgacaauaugaucaccgagaugcuucagaaagaauauauggagcggcaggggaagaccccucugggacucguugaucuguuuguguucucuaccagcuuuuaccugauuuccaucuuccuucaccucgugaaaaucccgacacaucgccacauugucggcaagucuugccccaaaccucauagacugaaccacaugggcaucuguagcugcgggcuguauaagcagcccggagugccuguuaaguggaaacgguga

SEQ ID NO: 1526 - RNA, 1473 nt, Artificial Sequence
  derived and/or modified protein sequence (opt5) from LASV(LP;Clade I)__AAF86701__GPC
augggccagaucauuaccuucuuucaagaggugccccacgucaucgaagagguuaugaacauugugcugaucgcccucagccugcuugcuauucugaaggggcucuacaauaucgccacaugcggaaucauuggccugguggcguuccuuuuucugugugggaaauccugcucucucacgcugaagggaggcuaugaacugcagacccucgagcugaacauggaaacacuuaauaugaccaugccucugagcuguaccaaaaacuccucucaucacuacaucagagucgggaaugagacaggacucgagcugacacuuaccaacacgagcauuaucaaucauaaguucugcaaccuguccgacgcucacaaaaagaaucucuaugaucaugcccugaugucuauuaucagcaccuuucaccuguccauuccgaacuucaaucaguacgaagccaugagcugugacuuuaacggcggcaagaucucugugcaguauaaucucucccacagcuacgcuggggaugccgcugagcauugcggaacaguugccaacggcgugcugcaaaccuucaugcggauggcguggggagggcgcuauaucgcccuugacucuggcaaagggaauugggauuguauuaugacauccuaccaguaccugaucauucagaacaccacgugggaagaccacugccaguuuagcagacccucuccuaucggauaucucggccugcuuucccaacggacacgcgauauuuacaucagcagacggcugcucggcaccuucacauggacccuguccgacucugaggggaacgagacccccggaggcuauugucugacacgcuggaugcucaucgaagcugagcugaagugcuuugggaauacggccgucgcuaaauguaacgaaaagcaugaugaggaguucugcgacaugcuuagacuguuugauuucaauaaacaggccauucggcgccucaaggcggaagcccagaugagcauccagcugauuaacaaggcugugaaugcccuuaucaacgaccaacugauuaugaaaaaucaccucagagauaucaugggaaucccuuacugcaacuauuccaaguacugguaucugaaucacaccagcucuggccggacaucccugcccaaauguuggcucauuagcaacgggucuuaccugaaugagacccaguucagcgacgacaucgaacagcaagcugauaacaugauuacagagaugcuucagaaggaauacaucgagcgccagggaaaaaccccucugggccucguugacauuuuuaucuucuccacgucuuuuuaucugauuagcaucuuccugcaucuuaucaagauuccgacacacagacauaucgugggcaaacccugcccuaagccccaccggcucaaucauaugggggucuguuccugcggacuguacaagcacccuggcgugcccaccaaauggaagcgcuga

SEQ ID NO: 1527 - RNA, 1473 nt, Artificial Sequence
  derived and/or modified protein sequence (opt5) from LASV(803213;Clade II)__AAF86703__GPC
augggccagaucauuaccuucuuucaagaggugccccacgucaucgaagagguuaugaacauugugcugaucgcccucagccugcuugcuauucugaaggggaucuacaauguggccacaugcggacucuucggccugaucuccuuucuucugcucugugggagaucuugcagcgucacguauaaaggaguguacgaacugcagacccuggagcucaacauggcgaaucugaacaugacaaugccucuuuccuguaccaagaauaacucucaucacuauauuaugguuggcaaugaaacagggcuggagcucacccugacaaacaccagcaucauuaaucauaaauucugcaaccuuuccgacgcucacaagaaaaaucuguacgaucaugcccucaugucuaucauuagcacguuucaccuguccaucccgaacuucaaucaguaugaggccaugagcugugacuuuaacggaggcaagauuucugugcaguacaaucugucccacagcuucgcugucgaugccgcuaaccauugcggcaccaucgccaacggggugcuccaaacauuuaugcggauggcguggggaggcucuuauaucgcccuggacuccgggaagggaaauugggauuguauuaugaccagcuaccaguaccuuaucauucagaacacaaccugggaagaccacugccaguucucucgccccuccccuaucggcuaucuggggcuccugagccaaagaacgcgggauauuuacaucucccgcagacuucugggaacauuuaccuggacacucucugacagcgagggcaaugaagcucccggcggguauugucugacccgguggaugcugaucgaggccgagcucaaaugcuucggaaacaccgcuguugccaaguguaaugaaaaacaugaugaggaauuuugcgacaugcugcgccuuuucgauuucaacaagcaggcgauuaaaagacugaagacagaggcccagauguccauccagcucauuaauaaggcugugaacgcccugaucaaugaccaacuuauuaugaaaaaccaucugcgggauaucaugggcaucccuuacugcaauuauagccgcuacugguaucucaaccacacggucaccgggaagacaucucugcccagauguuggcugguguccaauggaagcuaccucaacgaaacccacuuuucugacgacauugagcagcaggcugauaauaugaucacagagaugcugcaaaaagaauacauggaccggcagggcaagaccccucuugggcugguggaucucuucgucuuuagcacguccuucuaucugauuucuaucuuucugcaccuuguuaaaauuccgacacaucgccacaucgugggaaagcccugcccuaaaccccauagacucaaccacaugggcauuuguagcugcggccuguacaagcacccuggggugcccgucaaguggaaacgguga

SEQ ID NO: 1528 - RNA, 1473 nt, Artificial Sequence
  derived and/or modified protein sequence (opt5) from LASV(GA391;Clade III)__CAA36645__GPC
augggccagaucgugaccuucuuucaagaggucccccacguuauugaagaggugaugaacaucgugcugauugcccucagcauccuggcuauucuuaaggggcuguacaaugucgccacaugcggacucaucggccuggugacguuccuucugcucuccgggagaucuuguagccugaucuauaaaggaaccuacgaacugcagacacucgagcugaacauggaaacccuuaauaugacaaugccucuguccugcaccaagaacaauucucaucacuauauucggguuggcaacgagacagggcucgagcugacccuuacgaauaccagcauccugaaccauaaauuuuguaaucucuccgacgcgcacaagcgcaaccuguacgaucauucucugaugagcauuaucuccacauuccaccucagcauuccgaauuuuaaccaguaugaagcuaugucuugcgacuucaauggaggcaaaaucaccgugcaguacaaccugucccacagcuuugccgucgaugccgcuggccauugugggacacuugccaauggagugcugcaaaccuucaugagaauggcuuggggcgggucuuauauugcccucgacuccggacggggcaacugggauugcaucaugacgagcuaccaguaccugaucauucagaacacaaccugggacgaucacugucaguuuucucgccccuccccuaucggguaucuuggacugcucagccaaagaacacgggacauuuacaucucccgcagacugcugggcaccuucaccuggacacucucugauagcgagggcaaugaaacgcccgggggauauugccugacccgguggaugcuuauugaggcggagcugaaguguuuuggcaacacagccguugcuaagugcaaugaaaaacaugacgaggaguucugugauaugcuccgccuguuugacuucaacaagcaggccaucagacggcuuaaaaccgaagcucagauguccauccagcugauuaauaaggccgugaacgcgcucaucaaugaucaacugauuaugaaaaaccaucugcgcgacaucauggggauuccuuacugcaauuauagcagauacugguaucucaaccacacaucuaccggaaagacgucccugccccggugcuggcuuaucagcaauggcucuuaccugaacgaaacaaaguucagcgacgauaucgagcagcaggccgacaauaugauuaccgagaugcuccaaaaagaauacaucgaucgccaggggaagaccccucugggacuggucgaccuuuuuguguucuccacaucuuuuuaucucauuagcaucuuccugcaccuggugaaaauuccgacccacagacauaucgucggcaagcccuguccuaaaccccaccggcucaaccauaugggcauuugcuccugugggcuguacaagcagccuggaguucccgugagauggaaacgcuga

SEQ ID NO: 1529 - RNA, 1476 nt, Artificial Sequence
  derived and/or modified protein sequence (opt5) from LASV(AV;Clade V)__CCA30314__GPC
augggccagaucgugaccuucuuucaagaggucccccacguuauugaagaggugaugaacaucgugcugauugcccucagcauccuggcuguccuuaaggggcuguacaauauugccacaugcggacucaucggccugaucacguuccuucugcucugugggagauccugcucuagcaaccuguauaaaggaguguacgaacugcagucccucgaccugaauauggagacccuuaacaugacaaugccucugucuuguaccaagaauaacagccaucacuauauucggguuggcaaugauacagggcucgaacugacccuuacaaacaccuccauccugaaucauaaauuuugcaaccucucugacgcgcacaagaaagaucuguacgaccaugcucugaugagcauuaucuccacguuccaccucagcauuccgaauuuuaaccaguaugaggccaugucuugugauuucaauggaggcaagaucuccgugcaguacaaccugagccacucuuaugccauugacgcugccaaucauugcggcaccgucgcuaacgggauccuucaaacauuuaugcgcauggccuggggaggcuccuacaucgcgcuggauagcgggagaggaaacugggacuguauuaugaccucuuaccaguaucucaucauucagaauacaaccugggagaaccacugccaguucucccggcccagcccuaucggcuaccuggggcuucugucccaacgcacgagagauauuuauaucucucggcgccuccugggaacauuuaccuggacacugagcgacuccgaaggcaaugccacccccggcggguacugucucaccagauggaugcugaucgaggcugaacuuaagugcuucggaaacacagccguggcuaaauguaaugagaagcaugaugaggaauuuugcgacaugcugcgccucuucgauuuuaacaaacaggccauuagccggcugaagucugaggcgcagauguccauccagcuuauuaauaaagccguuaacgcucugaucaaugaccaacucauuaugaagaaccaccugagagacaucaugggcaucccuuauugcaauuacagcaaguauugguaccugaaccacacgauuaccgggaaaacaucucuccccaaguguuggcuggugagcaauggauccuaccuuaacgaaacccauuucucugaugacaucgagcagcaggccgauaauaugauuacagaaaugcugcaaaaagaguauauggagcggcagggcaagaccccucucgggcuggucgaccuguucguguuuagcacguccuucuaccuuaucagcauuuuucuccgccuggugaaaaucccgacacacagacauauugucggaaagcccugcccuaaaccccaccggcugaaccauaugggcaucuguucuugcggccucuauaagcagccugggguucccgugcgcuggaagagauga

SEQ ID NO: 1530 - RNA, 1473 nt, Artificial Sequence
  derived and/or modified protein sequence (opt5) from LASV(Togo/2016/7082;Clade VI)__AMR44577__GPC
augggccagaucauuaccuucuuucaagaggugccccacgucaucgaagagguuaugaacauugugcugaucgcccucagccugcuugcuauucugaaggggguguacaaugucgccacaugcggaaucaucggccucgugacguuccuguuucuuugugggagauccugcucucugauuuauaaaggaagcuacgaacuccagacccuggagcugaacauggaaacacucaauaugaccaugccucuguccuguacaaagaacucuagccaucacuauauccggguuggcaaugagaccgggcuugagcugacacucaccaacacguccauuaucaaucauaaauucugcaaccugucugacgcgcacaagcgcaaucuuuacgaucaugcucugaugagcauucucuccaccuuucaccugagcaucccgaacuucaaucaguaugaagccaugucuugugacuuuaacggaggcaaaauuuccgugcaguacaaucugagccacgccuaugcugucgaugccgcugagcauugcggcacaguggccaacgggguucuccaaaccuucaugagaauggcguggggaggcucuuacaucgcccuggacuccgggcggggaaauugggauuguaucaugacaagcuaccaguaucuuauuauccagaacaccacgugggaagaccacugccaguuuucucgccccuccccuauuggcuaccuggggcuccugagccaaagaacacgggauaucuauauuucccgcagacuucugggaaccuucacauggacccucucugacagcgagggcaacgagacccccggcggguacugucugacacgguggaugcugaucgaagcugagcucaagugcuuuggaaauacggccguggcuaaguguaacgaaaaacaugaugaggaguucugcgacaugcugcgccuuuuugauuucaauaagcaggccauccagagacugaaauccgaagcgcagaugagcauucaacucaucaacaaggccgucaaugcucugauuaacgaccagcuuaucaugaaaaaucaucugcgggauaugaugggcauuccuuauugcaacuacucuaaguauugguaccucaaucacaccuccagcgggcgcacaucucugcccaaguguuggcuggugagcaacggauccuaccucaaugagacccacuucucugacgacaucgaacagcaagccgauaacaugaucacagagaugcugcagaaagaauauauugacagacagggcaagaccccucuugggcugguggaucucuuugucuucagcacguccuuuuaccugaucagcauuuuccugcaccuuaucaaaauuccgacacaucggcacaucguuggaaagcccugcccuaaaccccaucgccucaaucacaugggcauuuguucuugcggccuguauaagcagccuggggugcccaccagauggaaacgguga

SEQ ID NO: 1531 - RNA, 1473 nt, Artificial Sequence
  derived and/or modified protein sequence (opt5) from LASV(KAK-428;Clade n.d. (VII))__ANH09740__GPC
augggccagaucgugaccuucuuucaagaggucccccacguuauugaagaggugaugaacaucgugcugauugcccucagccugcuugcuauccugaaggggcucuacaauuucgccacaugcggagucauuggccugaucacguuucuucugcucugugggagauccugcucugcgaccuauaaaggacaguacgaacugcagacacuggagcucaacauggaaagccugaauaugaccaugccucuuuccuguacaaagaacaauucucaucacuauauccgggcuggcaacaauaccgggcuggagcucacacugaccaacacgagcauuaucucccauaaauucugcaaucuuucugacgcccacaagaaaaaccuguacgaucauacccucaugagcauuaucacaaccuuucaccuguccauuccgaauuucaaccaguaugaggccaugagcugugacuuuaauggaggcaagaucucuauucaauacaaccugucccacagcuaugcuggcgaugccgcucagcauugcgggacaguggccaauggaguucuccagaccuucaugcgcauggcguggggcgggucuuaccuggcccuugacuccggaagacggggcugggauuguaucaucagcucuuaccaguaucugauuauccaaaacacgacaugggacgaucacugccaguuuucccgccccagcccuauuggguaccucggauucgugucccagaagaccagagacaucuauauuucucggcgccugcuuggcacauuuaccuggacccugagcgauuccgaaggccaugacaugcccgggggauacugucucacaagauggaugcugaucgaggcugaucugaaaugcuucggcaacacggccgucgcuaaguguaaugaaaaacacgacgaggaguuuugcgauauguggcgccucuucgacuucaacaagcaggccauccaacggcugaaagcggaagcccagaugaauauucagcuuaucaacaaggcugugaaugcccugauuaacgaccaacucaugaugaagaaucaccugagagauaucauggggauuccuuauugcaacuacagcaaauuuugguaucuuaauaacaccacaaccggacggacaucucugccccgcuguuggcucaucuccaauggcagcuaccugaacgagacccauuucucugacgauaucgaacagcaggcugacaauaugauuacggagaugcugcagaaggaauacauggauagacaagggaaaacaccucucggacugguugaccuuuuuguguucagcaccuccuuuuaucugaucaccauuuuccuccaccuggucaagaucccgacacaucggcacauugugggcaaacccugcccuaagccccaucgccugaaccacaugggcaucuguucuugcgggcuuuacaaacagccuggagugcccgucagauggaagcgguga

SEQ ID NO: 1532 - RNA, 1473 nt, Artificial Sequence
  derived and/or modified protein sequence (opt5) from LASV(Acar 3080;Clade I)__AAT49014__GPC
augggccagaucauuaccuucuuucaagaggugccccacgucaucgaagagguuaugaacauugugcugaucgcccucagccugcuugcuauucugaaggggcucuacaauaucgccacaugcggaaucauuggccugguggcguuccuuuuucugugugggaaauccugcucucucacgcugaagggaggcuaugaacugcagacccucgagcugaacauggaaacacuuaauaugaccaugccucugagcuguaccaaaaacuccucucaucacuacaucagagucgggaaugagacaggacucgagcugacacuuaccaacacgagcauuaucaaucauaaguucugcaaccuguccgacgcucacaaaaagaaucucuaugaucaugcccugaugucuauuaucagcaccuuucaccuguccauuccgaacuucaaucaguacgaagccaugagcugugacuuuaacggcggcaagaucucugugcaguauaaucucucccacagcuacgcuggggaugccgcugagcauugcggaacaguugccaacggcgugcugcaaaccuucaugcggauggcguggggagggcgcuauaucgcccuugacucuggcaaagggaauugggauuguauuaugacauccuaccaguaccugaucauucagaacaccacgugggaagaccacugccaguuuagcagacccucuccuaucggauaucucggccugcuuucccaacggacacgcgauauuuacaucagcagacggcugcucggcaccuucacauggacccuguccgacucugaggggaacgagacccccggaggcuauugucugacacgcuggaugcucaucgaagcugagcugaagugcuuugggaauacggccgucgcuaaauguaacgaaaagcaugaugaggaguucugcgacaugcuuagacuguuugauuucaauaaacaggccauucggcgccucaaggcggaagcccagaugagcauccagcugauuaacaaggcugugaaugcccuuaucaacgaccaacugauuaugaaaaaucaccucagagauaucaugggaaucccuuacugcaacuauuccaaguacugguaucugaaucacaccagcucuggccggacaucccugcccaaauguuggcucauuagcaacgggucuuaccugaaugagacccaguucagcgacgacaucgaacagcaagcugaucauaugauuacagagaugcuucagaaggaauacaucgagcgccagggaaaaaccccucugggccucguugacauuuuuaucuucuccacgucuuuuuaucugauuagcaucuuccugcaccuuaucaagauuccgacacauagacacaucgugggcaaacccugcccuaagccccaucggcucaaccacaugggggucuguuccugcggacuguacaagcacccuggcgugcccaccaaauggaagcgcuga

SEQ ID NO: 1533 - RNA, 1473 nt, Artificial Sequence; identical to SEQ ID NO: 1526
  derived and/or modified protein sequence (opt5) from LASV(Pinneo-NIG-1969;Clade I)__AIT17836__GPC

SEQ ID NO: 1534 - RNA, 1473 nt, Artificial Sequence
  derived and/or modified protein sequence (opt5) from LASV(ISTH0009-NIG-2011;Clade II)__AIT17404__GPC
augggccagaucauuaccuucuuucaagaggugccccacgucaucgaagagguuaugaacauugugcugaucgcccucagccugcuugcuauucugaaggggaucuacaauguggccacaugcggacucuucggccuggucuccuuucuucugcucugugggagaucuugcagcacgaccuauaaaggaguguacgaacugcagacacuggagcucgacauggcgucccugaacaugaccaugccucuuucuuguacaaagaauaacagccaucacuauaucaugguuggcaaugaaaccgggcuggagcucacacugaccaacacguccauuaucaaucauaaauucugcaaccuuucugaugcucacaagaaaaaucuguacgaccaugcccucaugagcauuaucuccaccuuucaccugagcauuccgaacuucaaucaguaugaggccaugucuugugauuuuaacggaggcaagaucuccgugcaguacaaucugagccacgcuuaugccgucgacgcugccaaccauugcggcacaauugcgaauggggugcuccaaaccuucaugcggauggccuggggaggcucuuacaucgcucuggauuccgggaagggaagcugggacuguaucaugacaucuuaccaguaucuuauuauccagaacaccacgugggaagaucacugccaguuuucccgccccagcccuauuggcuaccuggggcuccugucccaaagaacacgggacaucuauauuucucgcagacuucugggaaccuucacauggacccucagcgauuccgagggcaacgaaacccccggcggguacugucugacacgguggaugcugaucgaggccgagcucaaaugcuuuggaaauacggcuguugccaaguguaacgaaaaacaugacgaggaguucugcgauaugcugcgccuuuuugacuucaauaagcaggcgaucagacggcugaaaaccgaagcccagaugagcauucagcucaucaacaaggcugugaaugcccugauuaacgaucaacuuaucaugaagaaucaucugcgcgacauuaugggcaucccuuauugcaacuacucuaaauauugguaccucaaucacacagucaccgggaagacaucccugcccagauguuggcuggugagcaacggaucuuaccucaaugaaacccacuucagcgacgauaucgagcagcaggcugacaacaugauuacggagcugcuucaaaaagaauauauggaucggcagggcaagacaccucuggggcucguggaccuguuugucuucuccaccucuuuuuaccugaucagcauuuuccuucaccucaucaaaauuccgacccaucgccacaucacaggaaagcccugcccuaaaccccauagacugaaucacaugggcauuuguuccugcggccuguauaagcacccugggguucccgugaaguggaaacgguga

SEQ ID NO: 1535 - RNA, 1473 nt, Artificial Sequence
  derived and/or modified protein sequence (opt5) from LASV(ISTH0012-NIG-2011;Clade II)__AIT17408__GPC
augggccagaucauuaccuucuuucaagaggugccccacgucaucgaagagguuaugaacauugugcugaucgcccucagccugcuugcuauucugaaggggaucuacaauguggccacaugcggacucuucggccuggucuccuuucuucugcucugugggagaucuugcagcacgaccuauaaaggaguguacgaacugcagacacuggagcucgacauggcgucccugaacaugaccaugccucuuucuuguacaaagaauaacagccaucacuauaucaugguuggcaaugaaaccgggcuggagcucacacugaccaacacguccauuaucaaucauaaauucugcaaccuuucugaugcucacaagaaaaaucuguacgaccaugcccucaugagcauuaucuccaccuuucaccugagcauuccgaacuucaaucaguaugaggccaugucuugugauuuuaacggaggcaagaucuccgugcaguacaaucugagccacacauaugcugucgacgccgcuaaccauugcggcaccguggccaaugggguucuccaaacauucaugcggauggcguggggaggcucuuacauugcccuggauuccgggaagggaagcugggacuguaucaugaccucuuaccaguaucuuaucauucagaacacgacaugggaagaucacugccaguuuucccgccccagcccuaucggcuaccuggggcuccugucccaaagaacccgggacauuuauaucucucgcagacuucugggaacauucaccuggacccucagcgauuccgagggcaacgaaacacccggcggguacugucugacgcgguggaugcugauugaggcugagcucaaaugcuuuggaaauaccgccguggcuaaguguaacgaaaaacaugacgaggaguucugcgauaugcugcgccuuuuugacuucaauaagcaggccaucagacggcugaaaacagaagcgcagaugagcauccagcucauuaacaaggccgucaaugcucugaucaacgaucaacuuauuaugaagaaucaucugcgcgacaucaugggcauuccuuauugcaacuacucuaaauauugguaccucaaucacaccgugacagggaagaccucccugcccagauguuggcuggugagcaacggaucuuaccucaaugaaacgcacuucagcgacgauaucgagcagcaggccgacaacaugaucacagagcugcuucaaaaagaauauauggaucggcagggcaagaccccucuggggcucgucgaccuguuuguuuucuccaccucuuuuuaccugauuagcaucuuccuucaccucgugaaaauuccgacacaucgccacgugaucggaaagcccugcccuaaaccccauagacugaaucacaugggcauuuguuccugcggccuguauaagcacccugggguccccgugaaguggaaacgguga

SEQ ID NO: 1536 - RNA, 1473 nt, Artificial Sequence
  derived and/or modified protein sequence (opt5) from LASV(ISTH0047-NIG-2011;Clade II)__AIT17412__GPC
augggccagaucauuaccuucuuucaagaggugccccacgucaucgaagagguuaugaacauugugcugaucgcccucagccugcuugcuauucugaaggggaucuacaauguggccacaugcggacucuucggccuggucuccuuucuucugcucugugggagaucuugcagcacgaccuauaaaggaguguacgaacugcagacacuggagcucgacauggcgucccugaacaugaccaugccucuuucuuguacaaagaauaacagccaucacuauaucaugguuggcaaugaaaccgggcuggagcucacacugaccaacacguccauuaucaaucauaaauucugcaaccuuucugaugcucacaagaaaaaucuguacgaccaugcccucaugagcauuaucuccaccuuucaccugagcauuccgaacuucaaucaguaugaggccaugucuugugauuuuaacggaggcaagaucuccgugcaguacaaucugagccacgcuuaugccgucgacgcugccaaccauugcggcacaauugcgaauggggugcuccaaaccuucaugcggauggccuggggaggcucuuacaucgcucuggauuccgggaagggaagcugggacuguaucaugacaucuuaccaguaucuuauuauccagaacaccuccugggaagaucacugccaguuuagccgccccuccccuauuggcuaccuggggcuccugucucaaagaacgcgggacaucuauauuagccgcagacuucugggaacauucaccuggacacucuccgauagcgagggcaacgaaacccccggcggguacugucugacccgguggaugcugaucgaggccgagcucaaaugcuuuggaaauacagcuguugccaaguguaacgaaaaacaugacgaggaguucugcgauaugcugcgccuuuuugacuucaauaagcaggcgaucagacggcugaaaacggaagcccagaugucuauucagcucaucaacaaggcugugaaugcccugauuaacgaucaacuuaucaugaagaaucaucugcgcgacauuaugggcaucccuuauugcaacuacuccaaauauugguaccucaaucacaccgucacagggaagaccagccugcccagauguuggcuggugucuaacggaagcuaccucaaugaaacacacuucuccgacgauaucgagcagcaggcugacaacaugauuaccgagcugcuucaaaaagaauauaucgaucggcagggcaagacgccucuggggcucguggaccuguuugucuucucuaccagcuuuuaccugauuuccaucuuccuucaccucguuaaaauuccgacacaucgccacgugaucggaaagcccugcccuaaaccccauagacugaaucacaugggcauuuguagcugcggccuguauaagcacccuggggugcccgucaaguggaaacgguga

SEQ ID NO: 1537 - RNA, 1473 nt, Artificial Sequence
  derived and/or modified protein sequence (opt5) from LASV(ISTH0073-NIG-2011;Clade II)__AIT17416__GPC
augggccagaucauuaccuucuuucaagaggugccccacgucaucgaagagguuaugaacauugugcugaucgcccucagccugcuugcuauucugaaggggaucuacaauguggccacaugcggacucuucggccuggucuccuuucuucugcucugugggagaucuugcagcacgaccuauaaaggaguguacgaacugcagacacuggagcucgacauggcgucccugaacaugaccaugccucuuucuuguacaaagaauaacagccaucacuauaucaugguuggcaaugaaaccgggcuggagcucacacugaccaacacguccauuaucaaucauaaauucugcaaccuuucugaugcucaccggaagaaucuguacgaccaugcccucaugagcauuaucuccaccuuucaccugagcauuccgaacuucaaucaguaugaggccaugucuugugauuuuaacggaggcaaaaucuccgugcaguacaaucugagccacgcuuaugccgucgacgcugccaaccauugcggcacaauugcgaauggggugcuccaaaccuucaugcgcauggccuggggaggcucuuacaucgcucuggauuccgggaagggaagcugggacuguaucaugacaucuuaccaguaucuuauuauccagaacaccuccugggaagaucacugccaguuuagcagacccuccccuauuggcuaccuggggcuccugucucaacggacgcgcgacaucuauauuagcagacggcuucugggaacauucaccuggacacucuccgauagcgagggcaacgaaacccccggcggguacugucugacccgcuggaugcugaucgaggccgagcucaagugcuuuggaaauacagcuguugccaaauguaacgaaaagcaugacgaggaguucugcgauaugcugagacuuuuugacuucaauaaacaggcgauccggcgccugaagacggaagcccagaugucuauucagcucaucaacaaagcugugaaugcccugauuaacgaucaacuuaucaugaagaaucaccugagagacauuaugggcaucccuuauugcaacuacuccaaguauugguaccucaaucacaccgucacagggaaaaccagccugccccgguguuggcuggugucuaacggaagcuaccucaaugaaacacauuucuccgacgauaucgagcagcaggcugacaacaugauuaccgagcugcuucaaaaggaauauaucgaucgccagggcaaaacgccucuggggcucguggaccuguuugucuucucuaccagcuuuuaccugauuuccaucuuccuucaccucguuaagauuccgacacauagacacgugaucggaaaacccugcccuaagccccaucggcugaaucacaugggcauuuguagcugcggccuguauaaacacccuggggugcccgucaaguggaagcgcuga

SEQ ID NO: 1538 - RNA, 1473 nt, Artificial Sequence
  derived and/or modified protein sequence (opt5) from LASV(ISTH0230-NIG-2011;Clade II)__AIT17420__GPC
augggccagaucauuaccuucuuucaagaggugccccacgucaucgaagagguuaugaacauugugcugaucgcccucagccugcuugcuauucugaaggggaucuacaauguggccacaugcggacucuucggccuggucuccuuucuucugcucugugggagaucuugcagcacgaccuauaaaggaguguacgaacugcagacacuggagcucgacauggcgucccugaacaugaccaugccucuuucuuguacaaagaauaacagccaucacuauaucaugguuggcaaugaaaccgggcuggagcucacacugaccaacacguccauuaucaaucauaaauucugcaaccuuucugaugcucacaagaaaaaucuguacgaccaugcccucaugagcauuaucuccaccuuucaccugagcauuccgaacuucaaucaguaugaggccaugucuugugauuuuaacggaggcaagaucuccgugcaguacaaucugagccacacauaugcugucgacgccgcuaaccauugcggcaccauugccaauggggugcuccaaacauucaugcggauggcguggggaggcucuuacaucgcccuggauuccgggaagggaagcugggacuguaucaugaccucuuaccaguaucuuauuauccagaacacgacaugggaagaucacugccaguuuucccgccccagcccuauuggcuaccuggggcuccugucccaaagaacccgggacaucuauauuucucgcagacuucugggaacauucaccuggacccucagcgauuccgagggcaacgaaacacccggcggguacugucugacgcgguggaugcugaucgaggcugagcucaaaugcuuuggaaauaccgccguugcuaaguguaacgaaaaacaugacgaggaguucugcgauaugcugcgccuuuuugacuucaauaagcaggccaucagacggcugaaaacagaagcgcagaugagcauucagcucaucaacaaggccgugaaugcucugauuaacgaucaacuuaucaugaagaaucaucugcgcgacauuaugggcaucccuuauugcaacuacucuaaauauugguaccucaaucacaccgucacagggaagaccucccugcccagauguuggcuggugagcaacggaucuuaccucaaugaaacgcacuucagcgacgauaucgagcagcaggccgacaacaugauuacagagcugcuucaaaaagaauauauggaucggcagggcaagaccccucuggggcucguggaccuguuugucuucuccaccucuuuuuaccugaucagcauuuuccuucaccucaucaaaauuccgacacaucgccacaucaccggaaagcccugcccuaaaccccauagacugaaucacaugggcauuuguuccugcggccuguauaagcacccugggguucccgugaaguggaaacgguga

SEQ ID NO: 1539 - RNA, 1473 nt, Artificial Sequence
  derived and/or modified protein sequence (opt5) from LASV(ISTH0531-NIG-2011;Clade II)__AIT17424__GPC
augggccagaucauuaccuucuuucaagaggugccccacgucaucgaagagguuaugaacauugugcugaucgcccucagccugcuugcuauucugaaggggaucuacaauguggccacaugcggacucuucggccuggucuccuuucuucugcucugugggagaucuugcagcacgaccuauaaaggaguguacgaacugcagacacuggagcucgacaugaccaaccugaauaugacaaugccucuuuccuguaccaagaacaauucucaucacuauaucaugguuggcaacgaaacagggcuggagcucacccugacgaauaccagcauuaucaaccauaaauucugcaaucuuuccgaugcgcacaagaaaaaccuguacaaucaugcucucaugucuauuaucagcacauuucaccuguccauuccgaacuucaaucaguaugaggccaugagcugugacuuuaacggaggcaagaucucugugcaguacaaucugucccacgccuaugcugucgaugccgcuaaccauugcggcaccauugccaacggggugcuccaaacauucaugcggauggcguggggaggcagcuacaucgcccuggacucugggaagggauccugggauuguaucaugaccagcuaccaguaucuuauuauccagaauacgacaugggaagaccacugccaguuuucucgccccuccccuauuggcuaccuggggcuccugagccaaagaacccgggauaucuauauuucccgcagacuucugggaacauucaccuggacccucucugacagcgagggcaacgaaacacccggcggguacugucugacgcgguggaugcugaucgaggcugagcucaaaugcuuuggaaauaccgccguugcuaaguguaacgaaaaacaugaugaggaguucugcgacaugcugcgccuuuuugauuucaauaagcaggccaucagacggcugaaaacagaagcgcagaccaacauucagcucaucaauaaggccgugaacgcucugauuaaugaccaacuuaucaugaagaaccaucugcgcgauauuaugggcaucccuuauugcaauuacuccaaauauugguaccucaaccacacagucaccgggaagacgagccugcccagauguuggcuggugucuaauggauccuaccucaacgaaacacacuucagcgacgacaucgagcagcaggccgauaauaugauuaccgagcugcuucaaaaagaauauauggaccggcagggcaagaccccucuggggcucguggaucuguuugucuucucuaccagcuuuuaccugaucuccauuuuccuucaccucguuaaaaucccgacacaucgccacauuaucggaaagcccugcccuaaaccccauagacugaaccacaugggcauuuguucuugcggccuguauaagcacccuggggugcccgugaaguggaaacgguga

SEQ ID NO: 1540 - RNA, 1473 nt, Artificial Sequence
  derived and/or modified protein sequence (opt5) from LASV(ISTH0595-NIG-2011;Clade II)__AIT17428__GPC
augggccagaucauuaccuucuuucaagaggugccccacgucaucgaagagguuaugaacauugugcugaucgcccucagccugcuugcuauucugaaggggaucuacaauguggccacaugcggacucuucggccuggucuccuuucuucugcucugugggagaucuugcagcacgaccuauaaaggaguguacgaacugcagacacuggagcucgacauggcgucccugaacaugaccaugccucuuucuuguacaaagaauaacagccaucacuauaucaugguuggcaaugaaaccgggcuggagcucacacugaccaacacguccauuaucaaucauaaauucugcaaccuuucugaugcucacaagaaaaaucuguacgaccaugcccucaugagcauuaucuccaccuuucaccugagcauuccgaacuucaaucaguaugaggccaugucuugugauuuuaacggaggcaagaucuccgugcaguacaaucugagccacacauaugcugucgacgccgcuaaccauugcggcaccauugccaauggggugcuccaaacauucaugcggauggcguggggaggcucuuacaucgcccuggauuccgggaagggaagcugggacuguaucaugaccucuuaccaguaucuuauuauccagaacacgacaugggaagaucacugccaguuuucccgccccagcccuauuggcuaccuggggcuccugucccaaagaacccgggacaucuauauuucucgcagacuucugggaacauucaccuggacccucagcgauuccgagggcaacgaaacacccggcggguacugucugacgcgguggaugcugaucgcugccgaccucaaaugcuuuggaaauaccgcuguugccaaguguaacgagaaacaugaugaggaguucugcgacaugcugcgccuuuuugauuucaauaagcaggcgaucgaaagacugaaaacagaagcccagaugagcauucagcucaucaacaaggcugugaaugcccugauuaacgaccaacuuaucaugaagaaucaucugcgggacauuaugggcaucccuuauugcaacuacucuaaauauugguaccucaaucacaccgucacagggcgcaccucccugcccagauguuggcuggugagcaacggaucuuaccucaaugagacgcacuucagcgaugacaucgaacagcaggcugauaacaugauuacagagcugcuucaaaaggaguauauggaccggcagggcaaaaccccucuggggcucguggaucuguuugucuucuccaccucuuuuuaccugaucagcauuuuccuucaccucguucgcaucccgacacauagacacgugauuggaaagcccugcccuaaaccccaucggcugaaucacaugggcaucuguuccugcggccuguauaagcacccuggggugcccgucaaauggaagcgcuga

SEQ ID NO: 1541 - RNA, 1473 nt, Artificial Sequence
  derived and/or modified protein sequence (opt5) from LASV(ISTH0964-NIG-2011;Clade II)__AIT17430__GPC
augggccagaucauuaccuucuuucaagaggugccccacgucaucgaagagguuaugaacauugugcugaucgcccucagccugcuugcuauucugaaggggaucuacaauguggccacaugcggacucuucggccuggucuccuuucuucugcucugugggagaucuugcagcacgaccuauaaaggaguguacgaacugcagacacuggagcucgacauggcgucccugaacaugaccaugccucuuucuuguacaaagaauaacagccaucacuauaucaugguuggcaaugaaaccgggcuggagcucacacugaccaacacguccauuaucaaucauaaauucugcaaccuuucugaugcucacaagaaaaaucuguacgaccaugcccucaugagcauuaucuccaccuuucaccugagcauuccgaacuucaaucaguaugaggccaugucuugugauuuuaacggaggccggaucuccgugcaguacaaucugagccacacauaugcugucgacgccgcuaagcauugcggcaccauugccaacggggugcuccaaacauucaugcgcauggcguggggaggcucuuacaucgcccuggauuccgggaagggaagcugggacuguaucaugaccucuuaccaguaucuuauuauccagaauacgacaugggaagaucacugccaguuuuccagacccagcccuauuggcuaccuggggcuccugucccaacggacccgcgacaucuauauuucuagacggcuucugggaacauucaccuggacccucagcgauuccgagggcaacgaaacacccggcggguacugucugacgcgcuggaugcugaucgaggcugagcucaaaugcuuuggaaacaccgccguugcuaaguguaaugaaaaacaugacgaggaguucugcgauaugcugagacuuuuugacuucaacaagcaggccauccggcgccugaaaacagaagcgcagaugagcauucagcucaucaauaaggccgugaacgcucugauuaaugaucaacuuaucaugaagaaccaccugagagacauuaugggcaucccuuauugcaauuacucuaaauauugguaccucaaccacaccgucacagggaagaccucccugccccgguguuggcuggugagcaauggaucuuaccucaacgaaacgcauuucagcgacgauaucgagcagcaggccgacaauaugauuacagagcugcuucaaaaagaauauaucgaucgccagggcaagaccccucuggggcucguggaccuguuugucuucuccaccucuuuuuaccugauuagcaucuuccuucaccucguuaaaauuccgacacauagacacgugaucggaaagcccugcccuaaaccccaucggcugaaccacaugggcauuuguuccugcggccuguauaagcacccuggggugcccgucaaguggaaacgcuga

SEQ ID NO: 1542 - RNA, 1473 nt, Artificial Sequence
  derived and/or modified protein sequence (opt5) from LASV(ISTH1038-NIG-2011;Clade II)__AIT17438__GPC
augggccagaucauuaccuucuuucaagaggugccccacgucaucgaagagguuaugaacauugugcugaucgcccucagccugcuugcuauucugaaggggaucuacaauguggccacaugcggacucuucggccuggucuccuuucuucugcucugugggagaucuugcagcacgaccuauaaaggaguguacgaacugcagacacuggagcucgacauggcgaaccugaauaugaccaugccucuuuccuguacaaagaacaauucucaucacuauauccggguuggcaacgaaaccgggcuggagcucacacugaccaauacgagcauuaucucccauaaauucugcaaccuuucugaugcucacaagaaaaaucuguacgaccaugcccucaugagcauuaucuccaccuuucaccugagcauuccgaacuucaaucaguaugaggccaugucuugugauuuuaacggaggcaagaucuccgugcaguacaaucugagccacacauaugcugucgacgccgcuaaccauugcggcaccauugccaauggggugcuccaaacauucaugcgcauggcguggggaggcucuuacaucgcccuggauuccgggaagggaagcugggacuguaucaugaccucuuaccaguaucuuauuauccagaacacgacaugggaagaucacugccaguuuuccagacccagcccuauuggcuaccuggggcuccugucccaacggacccgcgacaucuauauuucuagacggcuucugggaacauucaccuggacccucagcgauuccgagggcaaagaaacacccggcggguacugucugacgcgcuggaugcugaucgaggcugagcucaagugcuuuggaaacaccgccguugcuaaauguaaugaaaagcaugacgaggaguucugcgauaugcugagacuuuuugacuucaacaaacaggccauccggcgccugaagacagaagcgcagaugaauauucagcucaucaacaaggccgugaaugcucugauuaacgaucaacuuaucaugaaaaaucaccugagagacauuaugggcaucccuuauugcaacuacagcaaguauugguaccucaaucacaccgucacagggaaaaccucucugccccgguguuggcugguguccaacggaagcuaccucaaugaaacgcauuucucugacgauaucgagcagcaggccgacaacaugauuacagagcugcuucaaaaggaauauaucgaucgccagggcaaaaccccucuggggcucguggaccuguuugucuucagcaccuccuuuuaccugauuucuaucuuccuucaccucguuaagauuccgacacauagacacgugaucggaaaacccugcccuaagccccaucggcugaaucagaugggcauuuguagcugcggccuguauaagcagccuggggugcccgucaaauggaagcgcuga

SEQ ID NO: 1543 - RNA, 1473 nt, Artificial Sequence
  derived and/or modified protein sequence (opt5) from LASV(ISTH1048-NIG-2011;Clade II)__AIT17442__GPC
augggccagaucauuaccuucuuucaagaggugccccacgucaucgaagagguuaugaacauugugcugaucgcccucagccugcuugcuauucugaaggggaucuacaauguggccacaugcggacucuucggccuggucuccuuucuucugcucugugggagaucuugcagcacgaccuauaaaggaguguacgaacugcagacacuggagcucgacauggcgucccugaacaugaccaugccucuuucuuguacaaagaauaacagccaucacuauaucaugguuggcaaugaaaccgggcuggagcucacacugaccaacacguccauuaucaaucauaaauucugcaaccuuucugaugcucaccggaagaaucuguacgaccaugcccucaugagcauuaucuccaccuuucaccugagcauuccgaacuucaaucaguaugaggccaugucuugugauuuuaacggaggcaaaaucuccgugcaguacaaucugagccacgcuuaugccgucgacgcugccaaccauugcggcacaauugcgaauggggugcuccaaaccuucaugcgcauggccuggggaggcucuuacaucgcucuggauuccgggaagggaagcugggacuguaucaugacaucuuaccaguaucuuauuauccagaacaccuccugggaagaucacugccaguuuagcagacccuccccuauuggcuaccuggggcuccugucucaacggacgcgcgacaucuauauuagcagacggcuucugggaacauucaccuggacacucuccgauagcgagggcaacgaaacccccggcggguacugucugacccgcuggaugcugaucgaggccgagcucaagugcuuuggaaauacagcuguugccaaauguaacgaaaagcaugacgaggaguucugcgauaugcugagacuuuuugacuucaauaaacaggcgauccggcgccugaagacggaagcccagaugucuauucagcucaucaacaaagcugugaaugcccugauuaacgaucaacuuaucaugaagaaucaccugagagacauuaugggcaucccuuauugcaacuacuccaaguauugguaccucaaucacaccgucacagggaaaaccagccugccccgguguuggcuggugucuaacggaagcuaccucaaugaaacacauuucuccgacgauaucgagcagcaggcugacaacaugauuaccgagcugcuucaaaaggaauauaucgaucgccagggcaaaacgccucuggggcucguggaccuguuugucuucucuaccagcuuuuaccugauuuccaucuuccuucaccucguuaagauuccgacacauagacacgugaucggaaaacccugcccuaagccccaucggauuaaucacaugggcaucuguagcugcggccuguauaaacacccuggggugcccgucaaguggaagcgcuga

SEQ ID NO: 1544 - RNA, 1473 nt, Artificial Sequence
  derived and/or modified protein sequence (opt5) from LASV(ISTH1058-NIG-2011;Clade II)__AIT17446__GPC
augggccagaucauuaccuucuuucaagaggugccccacgucaucgaagagguuaugaacauugugcugaucgcccucagccugcuugcuauucugaaggggaucuacaauguggccacaugcggacucuucggccuggucuccuuucuucugcucugugggagaucuugcagcacgaccuauaaaggaguguacgaacugcagacacuggagcucgacauggcgucccugaacaugaccaugccucuuucuuguacaaagaauaacagccaucacuauaucaugguuggcaaugaaaccgggcuggagcucacacugaccaacacguccauuaucaaucauaaauucugcaaccuuucugaugcucacaagaaaaaucuguacgaccaugcccucaugagcauuaucuccaccuuucaccugagcauuccgaacuucaaucaguaugaggccaugucuugugauuuuaacggaggcaagaucuccgugcaguacaaucugagccacacauaugcugucgacgccgcuucucauugcggcaccguggccaacgggguucuccaaacauucaugcggauggcguggggaggcuccuacauugcccuggauagcgggaagggaucuugggacuguaucaugaccuccuaccaguaucuuaucauucagaauacgacaugggaagaucacugccaguuuagccgccccuccccuaucggcuaccuggggcuccugucucaaagaacccgggacauuuauaucagccgcagacuucugggaacauucaccuggacccucuccgauagcgagggcaacgaaacacccggcggguacugucugacgcgguggaugcugauugaggcugagcucaaaugcuuuggaaacaccgccguggcuaaguguaaugaaaaacaugacgaggaguucugcgauaugcugcgccuuuuugacuucaacaagcaggccaucagacggcugaaaacagaagcgcagaugucuauccagcucauuaauaaggccgucaacgcucugaucaaugaucaacuuauuaugaagaaccaucugcgcgacaucaugggcauuccuuauugcaauuacuccaaauauugguaccucaaccacaccgugacagggaagaccagccugcccagauguuggcuggugucuaauggaagcuaccucaacgaaacgcacuucuccgacgauaucgagcagcaggccgacaauaugaucacagagcugcuucaaaaagaauauauggaucggcagggcaagaccccucuggggcucgucgaccuguuuguuuucucuaccagcuuuuaccugauuuccaucuuccuucaccucgugaaaauuccgacacaucgccacgugaucggaaagcccugcccuaaaccccauagacugaaccacaugggcauuuguagcugcggccuguauaagcacccugggguccccgugaaguggaaacgguga

SEQ ID NO: 1545 - RNA, 1473 nt, Artificial Sequence
  derived and/or modified protein sequence (opt5) from LASV(ISTH1064-NIG-2011;Clade II)__AIT17450__GPC
augggccagaucauuaccuucuuucaagaggugccccacgucaucgaagagguuaugaacauugugcugaucgcccucagccugcuugcuauucugaaggggaucuacaauguggccacaugcggacucuucggccuggucuccuuucuucugcucugugggagaucuugcagcacgaccuauaaaggaguguacgaacugcagacacuggagcucgacauggcgucccugaacaugaccaugccucuuucuuguacaaagaauaacagccaucacuauaucaugguuggcaaugaaaccgggcuggagcucacacugaccaacacguccauuaucaaucauaaauucugcaaccuuucugaugcucacaagaaaaaucuguacgaccaugcccucaugagcauuaucuccaccuuucaccugagcauuccgaacuucaaucaguaugaggccaugucuugugauuuuaacggaggcaagaucuccgugcaguacaaucugagccacacauaugcugucgacgccgcuaaccauugcggcaccauugccaauggggugcuccaaacauucaugcggauggcguggggaggcucuuacaucgcccuggauuccgggaagggaagcugggacuguaucaugaccucuuaccaguaucuuauuauccagaacacgacaugggaagaucacugccaguuuucccgccccagcccuauuggcuaccuggggcuccugucccaaagaacccgggacaucuauauuucucgcagacuucugggaacauucaccuggacccucagcgauuccgagggcaacgaaacacccggcggguacugucugacgcgguggaugcugaucgaggcugagcucaaaugcuuuggaaauaccgccguugcuaaguguaacgaaaaacaugacgaggaguucugcgauaugcugcgccuuuuugacuucaauaagcaggccaucagacggcugaaaacagaagcgcagaugagcauucagcucaucaacaaggccgugaaugcucugauuaacgaucaacuuaucaugaagaaucaucugcgcgacauuaugggcaucccuuauugcaacuacucuaaauauugguaccucaaucacaccgucacagggaagaccucccugcccagauguuggcuggugagcaacggaucuuaccucaaugaaacgcacuucagcgacgauaucgagcagcaggccgacaacaugauuacagagcugcuucaaaaagaauauaucgaucggcagggcaagaccccucuggggcucguggaccuguuugucuucuccaccucuuuuuaccugauuagcaucuuccuucaccucguuaaaauuccgacacaucgccacaucauuggaaagcccugcccuaaaccccauagacugaaucacaugggcaucuguuccugcggccuguauaagcacccuggggugcccgugaaguggaaacgguga

SEQ ID NO: 1546 - RNA, 1473 nt, Artificial Sequence
  derived and/or modified protein sequence (opt5) from LASV(ISTH1069-NIG-2011;Clade II)__AIT17454__GPC
augggccagaucauuaccuucuuucaagaggugccccacgucaucgaagagguuaugaacauugugcugaucgccuucagccuccuggcuauucuuaaggggaucuacaauguggccacaugcggacuguuuggccucgucuccuuccugcuucugugugggagaucuugcagcacgaccuauaaaggaguguacgaacuccagacacuggagcuggacauggcgucccucaacaugaccaugccucugucuuguacaaagaauaacagccaucacuauaucaugguuggcaaugaaaccgggcuugagcugacacucaccaacacguccauuaucaaucauaaauuuugcaaccugucugaugcucacaagcggaaucuuuacgaccaugcccugaugagcauuaucuccaccuuccaccucagcauuccgaacuuuaaucaguaugaggccaugucuugugauuucaacggaggcaaaaucuccgugcaguacaaucugagccacacauaugcugucgacgccgcuggccauugcgggaccauugccaacggagugcugcaaacauuuaugcgcauggcguggggcgggucuuacaucgcccucgauuccggaaagggcagcugggacuguaucaugaccucuuaccaguaucugauuauccagaauacgacaugggaagaucacugccaguucuccagacccagcccuauuggguaccuuggacugcucucccaacggacccgcgacaucuauauuucuagacggcugcuuggcacauuuaccuggacccugagcgauuccgagggcaacgaaacacccgggggauacugucucacgcgcuggaugcugaucgaggcugagcugaagugcuucggcaacaccgccguugcuaaauguaaugaaaagcaugacgaggaauuuugcgauaugcucagacuguucgacuucaacaaacaggccauccggcgccuuaagacagaggcgcagaugagcauucagcugaucaauaaagccgugaacgcucucauuaaugaucaacugaucaugaagaaccaccuuagagacauuauggggaucccuuauugcaauuacucuaaguauugguaccugaaccacaccaucacaggaaaaaccucccucccccgguguuggcuggucagcaauggcucuuaccugaacgaaacgcauuuuagcgacgauauugagcagcaggccgacaauaugaucacagagcuccugcaaaaggaauauauggaucgccaggggaaaaccccucuuggacugguggaccucuucguguuuuccaccucuuucuaccugauuagcaucuuucugcaccuugucaagauuccgacacauagacacaucauuggcaaacccugcccuaagccccaucggcucaaccacaugggcaucuguuccugcgggcuguauaaacacccuggaguucccgugcgcuggaagagauga

SEQ ID NO: 1547 - RNA, 1473 nt, Artificial Sequence
  derived and/or modified protein sequence (opt5) from LASV(ISTH1096-NIG-2012;Clade II)__AIT17458__GPC
augggccagaucauuaccuucuuucaagaggugccccacgucaucgaagagguuaugaacauugugcugaucgcccucagccugcuugcuauucugaaggggaucuacaauguggccacaugcggacucuucggccuggucuccuuucuucugcucugugggagaucuugcagcacgaccuauaaaggaguguacgaacugcagacacuggagcucgacauggcgucccugaacaugaccaugccucuuucuuguacaaagaauaacagccaucacuauaucaugguuggcaaugaaaccgggcuggagcucacacugaccaacacguccauuaucaaucauaaauucugcaaccuuucugaugcucacaagaaaaaucuguacgaccaugcccucaugagcauuaucuccaccuuucaccugagcauuccgaacuucaaucaguaugaggccaugucuugugauuuuaacggaggcaagaucuccgugcaguacaaucugagccacacauaugcuauugacgccgcuaaccauugcggcaccaucgccaaugggguccuccaaacauucaugcggauggcguggggaggcucuuacaucgcccuggauuccgggaagggaagcugggacuguauuaugaccacguaccaguaucuuaucauucagaacacaaccugggaagaucacugccaguuuucucgccccuccccuaucggcuaccuggggcuccugagccaaagaacacgggacauuuauaucucccgcagacuucugggaaccuucaccuggacacucucugauagcgagggcaacgaaacgcccggcggguacugucugacccgguggaugcugaucgaggcugagcucaaaugcuuuggaaauacagccguggcuaaguguaacgaaaaacaugacgaggaguucugcgauaugcugcgccuuuuugacuucaauaagcaggccauuagacggcugaaaaccgaagcgcagauguccauccagcucauuaacaaggccguuaaugcucugaucaacgaucaacuuauuaugaagaaucaucugcgcgacaucaugggcaucccuuauugcaacuacagcaaauauugguaccucaaucacacagugaccgggaagacgucucugcccagauguuggcuggucuccaacggaagcuaccucaaugaaacacacuucucugacgauauugagcagcaggccgacaacaugaucaccgagcugcuucaaaaagaauauauggaucggcagggcaagaccccucuggggcucguggaccuguuuguguucagcacauccuuuuaccugauuucuaucuuccuucaccucgucaaaauuccgacccaucgccacguuaucggaaagcccugcccuaaaccccauagacugaaucacaugggcauuuguagcugcggccuguauaagcacccuggggugcccgugaaguggaaacgguga

SEQ ID NO: 1548 - RNA, 1473 nt, Artificial Sequence
  derived and/or modified protein sequence (opt5) from LASV(ISTH1107-NIG-2012;Clade II)__AIT17462__GPC
augggccagaucauuaccuucuuucaagaggugccccacgucaucgaagagguuaugaacauugugcugaucgcccucagccugcuugcuauucugaaggggaucuacaauguggccacaugcggacucuucggccuggucuccuuucuucugcucugugggagaucuugcagcacgaccuauaaaggaguguacgaacugcagacacuggagcucgacauggcgucccugaacaugaccaugccucuuucuuguacaaagaauaacagccaucacuauaucaugguuggcaaugaaaccgggcuggagcucacacugaccaacacguccauuaucaaucauaaauucugcaaccuuucugaugcucacaagaaaaaucuguacgaccaugcccucaugagcauuaucuccaccuuucaccugagcauuccgaacuucaaucaguaugaggccaugucuugugauuuuaacggaggcaagaucuccgugcaguacaaucugagccacgcuuaugccgucgacgcugccaaccauugcggcacaauugcgaauggggugcuccaaaccuucaugcggauggccuggggaggcucuuacaucgcucuggauuccgggaagggaagcugggacuguaucaugacaucuuaccaguaucuuauuauccagaacaccacgugggaagaucacugccaguuuucccgccccagcccuauuggcuaccuggggcuccugucccaaagaacacgggacaucuauauuucucgcagacuucugggaaccuucacauggacccucagcgauuccgagggcaacgaaacccccggcggguacugucugacacgguggaugcugaucgaggccgagcucaaaugcuuuggaaauacggcuguugccaaguguaacgaaaaacaugacgaggaguucugcgauaugcugcgccuuuuugacuucaauaagcaggcgaucagacggcugaaaaccgaagcccagaugagcauucagcucaucaacaaggcugugaaugcccugauuaacgaucaacuuaucaugaagaaucaucugcgcgacauuaugggcaucccuuauugcaacuacucuaaauauugguaccucaaucacacagucaccgggaagacaucccugcccaaauguuggcuggugagcaacggaucuuaccucaaugaaacccacuucagcgacgauaucgagcagcaggcugacaacaugauuacggagcugcuucaaaaggaauauaucgauagacagggcaaaacaccucuggggcucguggaccuguuugucuucuccaccucuuuuuaccugauuagcaucuuccuucaccucguuaagauuccgacccaucggcacgugaucggaaaacccugcccuaagccccaucgccugaaucacaugggcauuuguuccugcggccuguauaagcacccuggggugcccgucaaauggaagagauga

SEQ ID NO: 1549 - RNA, 1473 nt, Artificial Sequence
  derived and/or modified protein sequence (opt5) from LASV(ISTH1111-NIG-2011;Clade II)__AIT17466__GPC
augggccagaucauuaccuucuuucaagaggugccccaggucaucgaagagguuaugaacauugugcugaucgcccucagccugcuugcuauucugaaggggaucuacaauguggccacaugcggacucuucggccuggucuccuuucuucugcucugugggagaucuugcagcacgaccuauaaaggaguguacgaacugcagacacuggagcucgacauggcgucccugaacaugaccaugccucuuucuuguacaaagaauaacagccaccauuauaucaugguuggcaaugaaaccgggcuggagcucacacugaccaaccaguccauuaucaaucacaaauucugcaaccuuucugaugcucauaagaaaaaucuguacgaccacgcccucaugagcauuaucuccacguuucaucugagcauuccgaacuucaaucaauaugaggccaugucuugugauuuuaacggaggcaagaucuccgugcaguacaaucugagccacaccuucgcugucgacgccgcuaaccacugcggcacaauugccaauggggugcuccagaccuuuaugcggauggcguggggaggcucuuauaucgcccuggauuccgggcgcggaagcugggacuguaucaugacaucuuaccaguaccuuauuauccaaaacaccacgugggaagaucauugccaguucuccagacccagcccuauuggcuaucuggggcuccugucccagcggacacgcgacaucuacauuucuagacggcuucugggaaccuuuacauggacccucagcgauuccgagggcaacgaaacccccggcggguauugucugacacgcuggaugcugaucgaggcugagcucaagugcuucggaaauacggccguugcuaaauguaacgaaaagcacgacgaggaauuuugcgauaugcugagacuuuucgacuucaauaaacaggccauccggcgccugaagaccgaggcgcaaaugagcauucagcucaucaacaaagccgugaaugcucugauuaacgaucagcuuaucaugaagaaucaucugagagacauuaugggcaucccuuacugcaacuauucuaaguacugguaucucaaucacacaaucaccgggaaaacaucccugccccgguguuggcuggucagcaacggaucuuaccucaaugaaacccacuuuagcgacgauauugagcaacaggccgacaacaugaucacggagcugcuucagaaggaauacauggaucgccagggcaaaacaccucuggggcucguggaccuguucguguuuuccaccucuuucuaucugauuagcaucuuucuucaucucgucaagauuccgacccacagacauguuaucggaaaacccugcccuaagccccaccggcugaaucauaugggcauuuguuccugcggccuguacaaacacccuggggugcccgugaaguggaagcgcuga

SEQ ID NO: 1550 - RNA, 1473 nt, Artificial Sequence
  derived and/or modified protein sequence (opt5) from LASV(ISTH1121-NIG-2012;Clade II)__AIT17470__GPC
augggccagaucauuaccuucuuucaagaggugccccacgucaucgaagagguuaugaacauugugcugaucgcccucagccugcuugcuauucugaaggggaucuacaauguggccacaugcggacucuucggccuggucuccuuucuucugcucugugggagaucuugcagcacgaccuauaaaggaguguacgaacugcagacacuggagcucgacauggcgucccugaacaugaccaugccucuuucuuguacaaagaauaacagccaucacuauaucaugguuggcaaugaaaccgggcuggagcucacacugaccaacacguccauuaucaaucauaaauucugcaaccuuucugaugcucaccggaagaaucuguacgaccaugcccucaugagcauuaucuccaccuuucaccugagcauuccgaacuucaaucaguaugaggccaugucuugugauuuuaacggaggcaaaaucuccgugcaguacaaucugagccacacauaugcugucgacgccgcuaaccauugcggcaccauugccaauggggugcuccaaacauucaugcgcauggcguggggaggcucuuacaucgcccuggauuccgggaagggaagcugggacuguaucaugaccucuuaccaguaucuuauuauccagaacacgacaugggaagaucacugccaguuuuccagacccagcccuauuggcuaccuggggcuccugucccaacggacccgcgacaucuauauuucuagacggcuucugggaacauucaccuggacccucagcgauuccgagggcaacgaaacacccggcggguacugucugacgcgcuggaugcugaucgaggcugagcucaagugcuuuggaaauaccgccguugcuaaauguaacgaaaagcaugacgaggaguucugcgauaugcugagacuuuuugacuucaauaaacaggccauccggcgccugaagacagaagcgcagaugagcauucagcucaucaacaaagccgugaaugcucugauuaacgaucaacuuaucaugaagaaucaccugagagacauuaugggcaucccuuauugcaacuacucuaaguauugguaccucaaucacaccgucacagggaaaaccucccugccccgguguuggcuggugagcaacggaucuuaccucaaugaaacgcauuucagcgacgauaucgagcagcaggccgacaacaugauuacagagcugcuucaaaaggaauauaucgaucgccagggcaaaaccccucuggggcucguggaccuguuugucuucuccaccucuuuuuaccugauuagcaucuuccuucaccucguuaagauuccgacacauagacacgugaucggaaaacccugcccuaagccccaucggcugaaucacaugggcauuuguuccugcggccuguauaaacacccuggggugcccgucaaguggaagcgcuga

SEQ ID NO: 1551 - RNA, 1473 nt, Artificial Sequence
  derived and/or modified protein sequence (opt5) from LASV(ISTH1129-NIG-2012;Clade II)__AIT17474__GPC
augggccagaucauuaccuucuuucaagaggugccccacgucaucgaagagguuaugaacauugugcugaucgcccucagccugcuugcuauucugaaggggaucuacaauguggccacaugcggacucuucggccuggucuccuuucuucugcucugugggagaucuugcagcacgaccuauaaaggaguguacgaacugcagacacuggagcucgacauggcgucccugaacaugaccaugccucuuucuuguacaaagaauaacagccaucacuauaucaugguuggcaaugaaaccgggcuggagcucacacugaccaacacguccauuaucaaucauaaauucugcaaccuuucugaugcucacaagaaaaaucuguacgaccaugcccucaugagcauuaucuccaccuuucaccugagcauuccgaacuucaaucaguaugaggccaugucuugugauuuuaacggaggcaagaucuccauucaguacaaucugagccacacauaugcuguggacgccgcuaaccauugcggcaccaucgccaaugggguccuccaaacauucaugcggauggcguggggaggcucuuacaucgcccuggauuccgggaagggaagcugggacuguauuaugaccucuuaccaguaucuuaucauucagaacacgacaugggaagaucacugccaguuuucccgccccagcccuaucggcuaccuggggcuccugucccaaagaacccgggacauuuauaucucucgcagacuucugggaacauucaccuggacccucagcgauuccgagggcaacgaaacacccggcggguacugucugacgcgguggaugcugaucgaggcugagcucaaaugcuuuggaaauaccgccguggcuaaguguaacgaaaaacaugacgaggaguucugcgauaugcugcgccuuuuugacuucaauaagcaggccauuagacggcugaaaacagaagcgcagaugagcauccagcucauuaacaaggccguuaaugcucugaucaacgaucaacuuauuaugaagaaucaucugcgcgacaucaugggcaucccuuauugcaacuacucuaaauauugguaccucaaucacaccauuacagggaagaccucccugcccagauguuggcuggugagcaacggaucuuaccucaaugaaacgcacuucagcgacgauaucgagcagcaggccgacaacaugauuacagagcugcuucaaaaagaauauaucgaucggcagggcaagaccccucuggggcucgucgaccuguuuguguucuccaccucuuuuuaccugauuagcaucuuccuucaccucgugaaaauuccgacacaucgccacaucaccggaaagcccugcccuaaaccccauagacugaaucacaugggcaucuguuccugcggccuguauaagcacccugggguccccguucgguggaagcgcuga

SEQ ID NO: 1552 - RNA, 1473 nt, Artificial Sequence
  derived and/or modified protein sequence (opt5) from LASV(ISTH1137-NIG-2011;Clade II)__AIT17478__GPC
augggccagaucauuaccuucuuucaagaggugccccacgucaucgaagagguuaugaacauugugcugaucgcccucagccugcuugcuauucugaaggggaucuacaauguggccacaugcggacucuucggccuggucuccuuucuucugcucugugggagaucuugcagcacgaccuauaaaggaguguacgaacugcagacacuggagcucgacauggcgucccugaacaugaccaugccucuuucuuguacaaagaauaacagccaucacuauaucaugguuggcaaugaaaccgggcuggagcucacacugaccaacacguccauuaucaaucauaaauucugcaaccuuucugaugcucacaagaaaaaucuguacgaccaugcccucaugagcauuaucuccaccuuucaccugagcauuccgaacuucaaucaguaugaggccaugucuugugauuuuaacggaggcaagaucuccgugcaguacaaucugagccacacauaugcugucgacgccgcugaucauugcggcaccauugccaacggggugcuccaaacauucaugcggauggcguggggaggcucuuacaucgcccuggacuccgggaagggaagcugggauuguaucaugaccucuuaccaguaucuuauuauccagaauacgacaugggaagaccacugccaguuuucccgccccagcccuauuggcuaccuggggcuccugucccaaagaacccgggauaucuauauuucucgcagacuucugggaacauucaccuggacccucagcgacuccgagggcaacgaaacacccggcggguacugucugacgcgguggaugcugaucgaggcugagcucaaaugcuuuggaaacaccgccguugcuaaguguaaugaaaaacaugaugaggaguucugcgacaugcugcgccuuuuugauuucaacaagcaggccaucagcagacugaaaacagaagcgcagaugucuauucagcucaucaauaaggccgugaacgcucugauuaaugaccaacuuaucaugaagaaccaucugcgggacauuaugggcaucccuuauugcaauuacuccaaauauugguaccucaaccacaccgucacagggaagaccagccugccccgcuguuggcuggugucuaauggaagcuaccucaacgaaacgcacuucuccgaugacaucgagcagcaggccgauaauaugauuacagagaugcugcaaaaagaauauaucgacagacagggcaagaccccucuugggcugguggaucucuuugucuucucuaccagcuuuuaccugauuuccaucuuccugcaccuuguuaaaauuccgacacaucggcacgugaucggaaagcccugcccuaaaccccaucgccucaaccacaugggcauuuguagcugcggccuguauaagcacccuggggugcccgucaaguggaaaagauga

SEQ ID NO: 1553 - RNA, 1473 nt, Artificial Sequence
  derived and/or modified protein sequence (opt5) from LASV(ISTH2010-NIG-2012;Clade II)__AIT17482__GPC
augggccagaucauuaccuucuuucaagaggugccccacgucaucgaagagguuaugaacauugugcugaucgcccucagccugcuugcuauucugaaggggaucuacaauguggccacaugcggacucuucggccuggucuccuuucuucugcucugugggagaucuugcagcacgaccuauaaaggaguguacgaacugcagacacuggagcucgacauggcgucccugaacaugaccaugccucuuucuuguacaaagaauaacagccaucacuauaucaugguuggcaaugaaaccgggcuggagcucacacugaccaacacguccauuaucaaucauaaauucugcaaccuuucugaugcucacaagaaaaaucuguacgaccaugcccucaugagcauuaucuccaccuuucaccugagcauuccgaacuucaaucaguaugaggccaugucuugugauuuuaacggaggcaagaucuccgugcaguacaaucugagccacgcuuaugccgucgacgcugccaaccauugcggcacaauugcgaauggggugcuccaaaccuucaugcggauggccuggggaggcucuuacaucgcucuggauuccgggaagggaagcugggacuguaucaugacaucuuaccaguaucuuauuauccagaacauuaccugggaagaucacugccaguuuucccgccccagcccuaucggcuaccuggggcuccugucccaaagaacgcgggacauuuauaucucucgcagacuucugggaacauucaccuggacacucagcgauuccgagggcaacgaaacccccggcggguacugucugacccgguggaugcugaucgaggccgagcucaaaugcuuuggaaauacagcuguugccaaguguaacgaaaaacaugacgaggaguucugcgauaugcugcgccuuuuugacuucaauaagcaggcgauuagacggcugaaaacggaagcccagaugagcauccagcucauuaacaaggcugugaaugcccugaucaacgaucaacuuauuaugaagaaucaucugcgcgacaucaugggcaucccuuauugcaacuacucuaaauauugguaccucaaucacaccgucacagggaagaccucccugcccagauguuggcuggugagcaacggaucuuaccucaaugaaacacacuucagcgacgauauugagcagcaggcugacaacaugaucaccgagcugcuucaaaaagaauauauugaucggcagggcaagacgccucuggggcucguggaccuguuugucuucuccacaucuuuuuaccugaucagcauuuuccuucaccucguuaaaaucccgacccaucgccacguggugggaaagcccugcccuaaaccccauagacugaaucacaugggcauuuguuccugcggccuguauaagcacccugggguccccgugaaguggaaacgguga

SEQ ID NO: 1554 - RNA, 1473 nt, Artificial Sequence
  derived and/or modified protein sequence (opt5) from LASV(ISTH2016-NIG-2012;Clade II)__AIT17486__GPC
augggccagaucauuaccuucuuucaagaggugccccacgucaucgaagagguuaugaacauugugcugaucgcccucagccugcuugcuauucugaaggggaucuacaauguggccacaugcggacucuucggccuggucuccuuucuucugcucugugggagaucuugcagcacgaccuauaaaggaguguacgaacugcagacacuggagcucgacauggcgucccugaacaugaccaugccucuuucuuguacaaagaauaacagccaucacuauaucaugguuggcaaugaaaccgggcuggagcucacacugaccaacacguccauuaucaaucauaaauucugcaaccuuucugaugcucacaagaaaaaucuguacgaccaugcccucaugagcauuaucuccaccuuucaccugagcauuccgaacuucaaucaguaugaggccaugucuugugauuuuaacggaggcaagaucuccgugcaguacaaucugagccacacauaugcugucgacgccgcuaaccauugcggcaccauugccaauggggugcuccaaacauucaugcggauggcguggggaggcucuuacaucgcccuggauuccgggaagggaagcugggacuguaucaugaccucuuaccaguaucuuauuauccagaacacgacaugggaagaucacugccaguuuucccgccccagcccuguuggcuaccuggggcuccugucccaaagaacccgggacauuuauaucucucgcagacuucugggaacauucaccuggacccucagcgauuccgagggcaacgaaacacccggcggguacugucugacgcgguggaugcugauugaggcugagcucaaaugcuuuggaaauaccgccguggcuaaguguaacgaaaaacaugacgaggaguucugcgauaugcugcgccuuuuugacuucaauaagcaggccaucagacggcugaaaacagaagcgcagaugagcauccagcucauuaacaaggccgucaaugcucugaucaacgaucaacuuauuaugaagaaucaucugcgcgacaucaugggcauuccuuauugcaacuacucuaaauauugguaccucaaucacaccgugacagggaagaccucccugcccagauguuggcuggugagcaacggaucuuaccucaaugaaacgcacuucagcgacgauaucgagcagcaggccgacaacaugaucacagagcugcuucaaaaagaauauauugaucggcagggcaagaccccucuggggcucgucgaccuguuuguuuucuccaccucuuuuuaccugaucagcauuuuccuucaccucgugaaaaucccgacacaucgccacgugauuggaaagcccugcccuaaaccccauagacugaaucacaugggcaucuguuccugcggccuguauaagcacccugggguccccgugaaguggaaacgguga

SEQ ID NO: 1555 - RNA, 1473 nt, Artificial Sequence
  derived and/or modified protein sequence (opt5) from LASV(ISTH2020-NIG-2012;Clade II)__AIT17490__GPC
augggccagaucauuaccuucuuucaagaggugccccacgucaucgaagagguuaugaacauugugcugaucacacucagccugcuugccauucugaaggggaucuacaauguggcuacgugcggacucuucggccuggucuccuuucuucugcucugugggagaucuugcagcaccacauauaaaggaguguacgaacugcagacccuggagcucgacauggccaaccugaauaugacaaugccucuuuccuguaccaagaacaauucucaucacuauaucaugguuggcaacgaaacagggcuggagcucacccugacgaauaccagcauuaucaaccauaaauucugcaaucuuuccgaugcgcacaagaaaaaccuguacgaccaugcucucaugucuauuaucagcacauuucaccuguccauuccgaauuucaaccaguaugaggccaugagcugugauuuuaauggaggcaagaucucugugcaguacaaccugucccacaccuucgccgucgacgcugccaaucauugcggcacaauugcuaacggggugcuccaaaccuuuaugcggauggccuggggaggcagcuauaucgcgcuggauucugggaagggauccugggacuguaucaugacgagcuaccaguaccuuauuauccagaacacaaccugggaagaucacugccaguucucucgccccuccccuauuggcuaucuggggcuccugagccaaagaacacgggacaucuacauuucccgcagacuucugggaaccuuuaccuggacacucucugauagcgagggcaaugaaacgcccggcggguauugucugacccgguggaugcugaucgaggccgagcucaaaugcuucggaaacacagcuguugccaaguguaaugaaaaacaugacgaggaauuuugcgauaugcugcgccuuuucgacuucaacaagcaggcuaucagacggcugaaaaccgaggcccagauguccauucagcucaucaauaaggcggugaacgcccugauuaaugaucaacuuaucaugaagaaccaucugcgcgacauuaugggcaucccuuacugcaauuauagcaaauacugguaucucaaccacacagucaccgggaagacgucucugcccagauguuggcugguguccaauggaagcuaccucaacgaaacacacuuuucugacgauaucgagcagcaggcugacaauaugauuaccgagcugcuucaaaaagaauacauggaucggcagggcaagaccccucuggggcucguggaccuguucgucuuuagcacauccuucuaucugaucucuauuuuucuucaccucguuaaaaucccgacccaucgccacauuaucggaaagcccugcccuaaaccccauagacugaaccacaugggcauuuguagcugcggccuguacaagcacccuggggugcccgugaaguggaaacgguga

SEQ ID NO: 1556 - RNA, 1473 nt, Artificial Sequence
  derived and/or modified protein sequence (opt5) from LASV(ISTH2025-NIG-2012;Clade II)__AIT17494__GPC
augggccagaucauuaccuucuuucaagaggugccccacgucaucgaagagguuaugaacauugugcugaucgcccucagccugcuugcuauucugaaggggguguacaaugucgccacaugcggacucuucggccugguguccuuucuucugcucugugggagaucuugcagcacgaucuauaaaggaguuuacgaacugcagacccuggagcucgacauggcgucccugaacaugacaaugccucuuucuuguaccaagaauaacagccaucacuauaucauggugggcaaugaaacagggcuggagcucacccugacaaacaccuccauuaucaaucauaaauucugcaaccuuucugaugcucacaagaaaaaucuguacgaccaugcccucaugagcauuaucuccacguuucaccugagcauuccgaacuucaaucaguaugaggccaugucuugugauuuuaacggaggcaagaucuccguccaguacaaucugagccacaccuaugcuguggacgccgcuaaccauugcggcacaauugccaaugggguucuccaaaccuucaugcggauggcguggggaggcucuuacaucgcccuggauuccgggaagggaagcugggacuguaucaugacaucuuaccaguaucuuauuauccagaacaccuccugggaagaucacugccaguuuagccgccccuccccuauuggcuaccuggggcuccugucucaaagaacgcgggacaucuauauuagccgcagacuucugggaacauucaccuggacacucuccgauagcgagggcaacgaaacccccggcggguacugucugacccgguggaugcugaucgaggcugagcucaaaugcuuuggaaauacagccguggcuaaguguaacgaaaaacaugacgaggaguucugcgauaugcugcgccuuuuugacuucaauaagcaggccaucagacggcugaaaacggaagcgcagaugucuauucagcucaucaacaaggccgucaaugcucugauuaacgaucaacuuaucaugaagaaucaucugcgcgacauuaugggcaucccuuauugcaacuacuccaaauauugguaccucaaucacaccgugacagggaagaccagccugcccagauguuggcuggugucuaacggaagcuaccucaaugaaacacacuucuccgacgauaucgagcagcaggccgacaacaugauuaccgagcugcuucaaaaagaauauaucgaucggcagggcaagacgccucuggggcucgucgaccuguuuguuuucucuaccagcuuuuaccugauuuccaucuuccuucaccucgugaaaauuccgacacaucgccacgugaucggaaagcccugcccuaaaccccauagacugaaucacaugggcauuuguagcugcggccuguauaagcacccugggguccccgugaaguggaaacgguga

SEQ ID NO: 1557 - RNA, 1473 nt, Artificial Sequence
  derived and/or modified protein sequence (opt5) from LASV(ISTH2031-NIG-2012;Clade II)__AIT17498__GPC
augggccagaucauuaccuucuuucaagaggugccccacgucaucgaagagguuaugaacauugugcugaucgcccucagccugcuugcuauucugaaggggaucuacaauguggccacaugcggacucuucggccuggucuccuuucuucugcucugugggagaucuugcagcacgaccuauaaaggaguguacgaacugcagacacuggagcucgacauggcgucccugaacaugaccaugccucuuucuuguacaaagaauaacagccaucacuauaucaugguuggcaaugaaaccgggcuggagcucacacugaccaacacguccauuaucaaucauaaauucugcaaccuuucugaugcucacaagaaaaaucuguacgaccaugcccucaugagcauuaucuccaccuuucaccugagcauuccgaacuucaaucaguaugaggccaugucuugugauuuuaacggaggcaagaucuccgugcaguacaaucugagccacacauaugcugucgacgccgcuaaccauugcggcaccauugccaauggggugcuccaaacauucaugcggauggcguggggaggcucuuacaucgcccuggauuccgggaagggaaacugggacuguaucaugaccagcuaccaguaucuuauuauccagaacacgacaugggaagaucacugccaguuuucucgccccuccccuauuggcuaccuggggcuccugagccaaagaacccgggacaucuauauuucccgcagacuucugggaacauucaccuggacccucucugauagcgagggcaaugaaacacccggcggguacugucugacgcgguggaugcugaucgagaccgagcucaaaugcuuuggaaacacagcuguugccaaguguaaugaaaaacaugacgaggaguucugcgauaugcugcgccuuuuugacuucaacaagcaggcuaucuccagacugcggagcgaagcccagaugucuauucagcucaucaauaaagcggugaacgcccugauuaaugaucaacuuaucaugaagaaccaucugcgcgacauuaugggcaucccuuauugcaauuacuccaaguauugguaccucaaccacaccgucacagggaaaaccagccugcccaaguguuggcuggugucuaauggaagcuaccucaacgaaacgcacuucuccgacgauaucgagcagcaggcugacaauaugauuacagagaugcugcaaaaagaauauaucgauagacagggcaagaccccucuugggcugguggaccucuuugucuucucuaccagcuuuuaccugauuuccaucuuccugcaccuuguuaaaauuccgacacaucggcacaucaccggaaagcccugcccuaaaccccaucgccucaaccacaugggcauuuguagcugcggccuguauaagcacccuggggugcccgugaaguggaaaagauga

SEQ ID NO: 1558 - RNA, 1473 nt, Artificial Sequence
  derived and/or modified protein sequence (opt5) from LASV(ISTH2037-NIG-2012;Clade II)__AIT17502__GPC
augggccagaucauuaccuucuuucaagagaucccccacgugauugaagaggucaugaacaucguucugauuacacucagccugcuugccauccugaaggggaucuacaauguggcuacgugcggacucuucggccugguguccuuucuucugcucugugggaaaucuugcagcaccacauauaagggagucuacgaacugcagacccuggagcucgacauggccucccugaacaugacaaugccucuuucuuguaccaaaaauaacagccaucacuauauuauggugggcaaugaaacagggcuggagcucacccugacgaacaccuccaucauuaaucauaaguucugcaaccuuucugaugcgcaccggaaaaaucuguacgaccauacacucaugagcaucauuuccaccuuucaccugagcaucccgaacuucaaucaguaugaggcuaugucuugugauuuuaacggaggcaagauuuccguucaguacaaucugagccacgccuaugccaucgacgcugccacacauugcggcaccaucgcuaacggggugcuccaaacguucaugagaauggccuggggaggcucuuacauugcgcuggauuccgggaagggaggcugggacuguaucaugacaagcuaccaguaucuuauuauccagaauaccacaugggaagaucacugccaguuuucucgccccuccccuauuggguaccugggacuccugagccaaagaacccgggacaucuauaucucccgcagacuucugggcaccuucacauggacgcucucugauagcgagggcaacgaaacccccgggggauacugucugacacgguggaugcugauugaggccgagcucaaaugcuuuggcaacaccgcugucgccaaguguaaugaaaaacaugacgaggaguucugcgauaugcugcgccuuuuugacuucaacaagcaggcuaucagacggcugaaaacagaagcccagauguccauucagcucaucaauaaggcggugaacgcccugauuaaugaucaacuuaucaugcgcaaccaccugagagacaucauggggauuccuuauugcaauuacagcaaguauugguaccucaaccacaccguuacgggaaaaacaucucugcccaaguguuggcugguguccaauggcagcuaccucaacgaaacccauuucucugacgauaucgagcagcaggcugacaauaugauuaccgagcugcuucaaaaagaauauauggaucggcaggggaagacaccucugggacucgucgaccuguuuguguucagcaccuccuuuuaccugaucucuauuuuccuucaccucgugaaaaucccgacacaucgccacgucauuggcaagcccugcccuaaaccccauagacugaaccacaugggcguuuguagcugcgggcuguauaagcacccuggagugcccgugaaguggaaacgguga

SEQ ID NO: 1559 - RNA, 1473 nt, Artificial Sequence
  derived and/or modified protein sequence (opt5) from LASV(ISTH2042-NIG-2012;Clade II)__AIT17506__GPC
augggccagaucauuaccuucuuucaagaggugccccacgucaucgaagagguuaugaacauugugcugaucgcccucagccugcuugcuauucugaaggggaucuacaauguggccacaugcggacucuucggccuggucuccuuucuucugcucugugggagaucuugcagcacgaccuauaaaggaguguacgaacugcagacacuggagcucgacauggcgucccugaacaugaccaugccucuuucuuguacaaagaauaacagccaucacuauaucaugguuggcaaugaaaccgggcuggagcucacacugaccaacacguccauuaucaaucauaaauucugcaaccuuucugaugcucacaagaaaaaucuguacgaccaugcccucaugagcauuaucuccaccuuucaccugagcauuccgaacuucaaucaguaugaggccaugucuugugauuuuaacggaggcaagaucuccgugcaguacaaucugagccacgcuuaugccgucgacgcugccgaacauugcggcacaauugcgaacggggugcuccaaaccuucaugcggauggccuggggaggcucuuacaucgcucuggauuccgggaagggaagcugggacuguguuaugacaucuuaccaguaucuuaucauucagaauaccacgugggaggaucacugccaguuuucccgccccagcccuaucggcuaccuggggcuccugucccaaagaacacgggacauuuauaucucucgcagacuucugggaaccuucacauggacccucagcgauuccgaaggcaacgagacccccggcggguacugucugacacgguggaugcugauugaggccgaacucaaaugcuuuggaaacacggcuguggccaaguguaaugagaaacaugacgaagaguucugcgauaugcugcgccuuuuugacuucaacaagcaggcgaucgaaagacugaaaaccgaggcccagaugagcauccagcucauuaauaaggcugucaacgcccugaucaaugaucaacuuauuaugaagaaccaucugcgggacaucaugggcauuccuuauugcaauuacucuaaauauugguaccucaaccacacagugaccgggaagacaucccugccccgcuguuggcuggugagcaauggaucuuaccucaacgagacccacuucagcgacgauaucgaacagcaggcugacaauaugaucacggagaugcugcaaaaagaauauauugauagacagggcaagacaccucuugggcuggucgaccucuuuguuuucuccaccucuuuuuaccugaucagcauuuuccugcaccuugugaaaaucccgacccaucggcacgugauuggaaagcccugcccuaaaccccaucgccucaaccacaugggcaucuguuccugcggccuguauaagcacccugggguccccgugaaguggaaaagauga

SEQ ID NO: 1560 - RNA, 1473 nt, Artificial Sequence
  derived and/or modified protein sequence (opt5) from LASV(ISTH2046-NIG-2012;Clade II)__AIT17510__GPC
augggccagaucauuaccuucuuucaagaggugccccacgucaucgaagagguuaugaacauugugcugaucgcccucagccugcuugcuauucugaaggggaucuacaauguggccacaugcggacucuucggccuggucuccuuucuucugcucugugggagaucuugcagcacgaccuauaaaggaguguacgaacugcagacacuggagcucgacauggcgucccugaacaugaccaugccucuuucuuguacaaagaauaacagccaucacuauaucaugguuggcaaugaaaccgggcuggagcucacacugaccaacacguccauuaucaaucauaaauucugcaaccuuucugaugcucacaagaaaaaucuguacgaccaugcccucaugagcauuaucuccaccuuucaccugagcauuccgaacuucaaucaguaugaggccaugucuugugauuuuaacggaggcaagaucuccgugcaguacaaucugagccacacauaugcugucgacgccgcuaaccauugcggcaccauugccaauggggugcuccaaacauucaugcggauggcguggggaggcucuuacaucgcccuggauuccgggaagggaagcugggacuguaucaugaccucuuaccaguaucuuauuauccagaacacgacaugggaagaucacugccaguuuucccgccccagcccuauuggcuaccuggggcuccugucccaaagaaccaaagacaucuauauuucucggcgccuucugggaacauucaccuggacccucagcgauuccgagggcaacgaaacacccggcggguacugucugacgagauggaugcugaucgaggcugagcucaagugcuuuggaaauaccgccguugcuaaauguaacgaaaagcaugacgaggaguucugcgauaugcugcggcuuuuugacuucaauaaacaggccauccgcagacugaagacagaagcgcagaugagcauucagcucaucaacaaggccgugaaugcucugauuaacgaucaacuuaucaugaaaaaucaucugcgggacauuaugggcaucccuuauugcaacuacucuaaguauugguaccucaaucacaccgucacagggaaaaccucccugccccgcuguuggcuggugagcaacggaucuuaccucaaugaaacgcacuucagcgacgauaucgagcagcaggccgacaacaugauuacagagcugcuucaaaaggaauauaucgauagacagggcaaaaccccucuggggcucguggaccuguuugucuucuccaccucuuuuuaccugauuagcaucuuccuucaccucguuaagauuccgacacaucggcacgugaucggaaaacccugcccuaagccccaucgccugaaucacaugggcauuuguuccugcggccuguauaagcacccuggggugcccgucaaauggaagagauga

SEQ ID NO: 1561 - RNA, 1473 nt, Artificial Sequence
  derived and/or modified protein sequence (opt5) from LASV(ISTH2050-NIG-2012;Clade II)__AIT17514__GPC
augggccagaucauuaccuucuuucaagaggugccccacgucaucgaagagguuaugaacauugugcugaucgcccucagccugcuugcugugcugaaggggauuuacaaugucgccacaugcggacucuucggccugguguccuuucuucugcucugugggagaucuugcagcacgaccuauaaaggaguuuacgaacugcagacacuggagcucgacauggcgucccugaacaugaccaugccucuuucuuguacaaagaauaacagccaucacuauaucauggugggcaaugaaaccgggcuggagcucacacugaccaacacguccaucauuaaucauaaauucugcaaccuuucugaugcucacaagaaaaaucuguacgaccaugcccucaugagcaucauuuccaccuuucaccugagcaucccgaacuucaaucaguaugaggccaugucuugugauuuuaacggaggcaagauuuccguccaguacaaucugagccacacauaugcuguggacgccgcuaaccauugcggcaccaucgccaaugggguucuccaaacauucaugcggauggcguggggaggcucuuacauugcccuggauuccgggaagggaagcugggacuguaucaugaccucuuaccaguaucuuaucauucagaacacgacaugggaagaucacugccaguuuucccgccccagcccuaucggcuaccuggggcuccugucccaaagaacccgggacauuuauaucucucgcagacuucugggaacauucaccuggacccucagcgauuccgagggcaacgaaacacccggcggguacugucugacgcgguggaugcugauugaggcugagcucaaaugcuuuggaaauaccgccguggcuaaguguaacgaaaaacaugacgaggaguucugcgauaugcugcgccuuuuugacuucaauaagcaggccaucagacggcugaaaacagaagcgcagaugagcauccagcucauuaacaaggccgucaaugcucugaucaacgaucaacuuauuaugaagaaucaucugcgcgacaucaugggcauuccuuauugcaacuacucuaaauauugguaccucaaucacaccgugacagggaagaccucccugcccagauguuggcuggugagcaacggaucuuaccucaaugaaacgcacuucagcgacgauaucgagcagcaggccgacaacaugaucacagagcugcuucaaaaagaauauauugaucggcagggcaagaccccucuggggcucgucgaccuguuuguuuucuccaccucuuuuuaccugaucagcauuuuccuucaccucgugaaaaucccgacacaucgccacgugauuggaaagcccugcccuaaaccccauagacugaaucacaugggcaucuguuccugcggccuguaucggcacccugggguccccgugaaguggaagcgcuga

SEQ ID NO: 1562 - RNA, 1473 nt, Artificial Sequence
  derived and/or modified protein sequence (opt5) from LASV(ISTH2057-NIG-2012;Clade II)__AIT17518__GPC
augggccagaucauuaccuucuuucaagaggugccccacgucaucgaagagguuaugaacauugugcugaucgcccucagccugcuugcuauucugaaggggaucuacaauguggccacaugcggacucuucggccuggucuccuuucuucugcucugugggagaucuugcagcacgaccuauaaaggaguguacgaacugcagacacuggagcucgacauggcgucccugaacaugaccaugccucuuucuuguacaaagaauaacagccaucacuauaucaugguuggcaaugaaaccgggcuggagcucacacugaccaacacguccauuaucaaucauaaauucugcaaccuuucugaugcucacaagaaaaaucuguacgaccaugcccucaugagcauuaucuccaccuuucaccugagcauuccgaacuucaaucaguaugaggccaugucuugugauuuuaacggaggcaagaucuccgugcaguacaaucugagccacgcuuaugccgucgacgcugccaaccauugcggcacaauugcgaauggggugcuccaaaccuucaugcggauggccuggggaggcucuuacaucgcucuggauuccgggaagggaagcugggacuguaucaugacaucuuaccaguaucuuauuauccagaacaccacgugggaagaucacugccaguuuucccgccccagcccuauuggcuaccuggggcuccugucccaaagaacacgggacaucuauauuucucgcagacuucugggaaccuucacauggacccucagcgauuccgagggcaacgaaacccccggcggguacugucugacacgguggaugcugaucgaggccgagcucaaaugcuuuggaaauacggcuguugccaaguguaacgaaaaacaugacgaggaguucugcgauaugcugcgccuuuuugacuucaauaagcaggcgaucagacggcugaaaaccgaagcccagaugagcauucagcucaucaacaaggcugugaaugcccugauuaacgaucaacuuaucaugaagaaucaucugcgcgacauuaugggcaucccuuauugcaacuacucuaaauauugguaccucaaucacacagucaccgggaagacaucccugcccagauguuggcuggugagcaacggaucuuaccucaaugaaacccacuucagcgacgauaucgagcagcaggcugacaacaugauuacggagcugcuucaaaaagaauauauggaucggcagggcaagacaccucuggggcucguggaccuguuugucuucuccaccucuuuuuaccugaucagcauuuuccuucaccucguuaaaaucccgacccaucgccacgugauuggaaagcccugcccuaaaccccauagacugaaucacaugggcaucuguuccugcggccuguauaagcacccuggggugcccgucaaguggaaacgguga

SEQ ID NO: 1563 - RNA, 1473 nt, Artificial Sequence
  derived and/or modified protein sequence (opt5) from LASV(ISTH2064-NIG-2012;Clade II)__AIT17524__GPC
augggccagaucauuaccuucuuucaagaggugccccacgucaucgaagagguuaugaacauugugcugaucgcccucagccugcuugcuauucugaaggggaucuacaauguggccacaugcggacucuucggccuggucuccuuucuucugcucugugggagaucuugcagcacgaccuauaaaggaguguacgaacugcagacacuggagcucgacauggcgucccugaacaugaccaugccucuuucuuguacaaagaauaacagccaucacuauaucaugguuggcaaugaaaccgggcuggagcucacacugaccaacacguccauuaucaaucauaaauucugcaaccuuucugaugcucacaagaaaaaucuguacgaccaugcccucaugagcauuaucuccaccuuucaccugagcauuccgaacuucaaucaguaugaggccaugucuugugauuuuaacggaggcaagaucuccgugcaguacaaucugagccacacauaugcuauugacgccgcuaaccauugcggcaccaucgccaaugggguccuccaaacauucaugcggauggcguggggaggcucuuacaucgcccuggauuccgggaagggaagcugggacuguauuaugaccucuuaccaguaucuuaucauucagaacacgacaugggaagaucacugccaguuuucccgccccagcccuaucggcuaccuggggcuccugucccaaagaacccgggacauuuauaucucucgcagacuucugggaacauucaccuggacccucagcgauuccgagggcaacgaaacacccggcggguacugucugacgcgguggaugcugaucgaggcugagcucaaaugcuuuggaaauaccgccguggcuaaguguaacgaaaaacaugacgaggaguucugcgauaugcugcgccuuuuugacuucaauaagcaggccauuagacggcugaaaacagaagcgcagaugagcauccagcucauuaacaaggccguuaaugcucugaucaacgaucaacuuauuaugaagaaucaucugcgcgacaucaugggcaucccuuauugcaacuacucuaaauauugguaccucaaucacaccgugacagggaagaccucccugcccagauguuggcuggucagcaacggaucuuaccucaaugaaacgcacuucagcgacgauauugagcagcaggccgacaacaugaucacagagaugcugcaaaaagaauauauggaucggcagggcaagaccccucuugggcugguggaccucuuuguguucuccaccucuuuuuaccugauuagcaucuuccugcaccuugucaaaauuccgacacaucgccacguuaucggaaagcccugcccuaaaccccauagacucaaucacaugggcauuuguuccugcggccuguauaagcacccuggggugcccgugaaguggaaacgguga

SEQ ID NO: 1564 - RNA, 1473 nt, Artificial Sequence
  derived and/or modified protein sequence (opt5) from LASV(ISTH2065-NIG-2012;Clade II)__AIT17528__GPC
augggacagaucauuaccuucuuucaagaggugccccacgucaucgaagagguuaugaacauugugcugaucgcccucagccugcuugcuaugcugaaggggauuuacaauaucgccacaugcggacucuucggccugaucuccuuucuucugcucugugggagaucuugcagcacgaccuauaaaggaguguacgaacugcaggcgcuggagcucgacauggcuaaccugaauaugacaaugccucuuuccuguaccaagaacaauucucaucacuauauuauggucggcaacgaaacagggcuggagcucacccugacaaauaccagcaucauuaaccauaaauucugcaaucuuuccgaugcccacaagaaaaaccuguacgaccaugcccucaugucuaucauuagcacguuucaccuguccaucccgaauuucaaccaguaugaggcuaugagcugugauuuuaauggaggcaagauuucugugcaguacaaccugucccacaccuaugccggcgacgcugccaagcauugcgggacaaucgcgaauggaguucuccaaaccuucaugcggauggccuggggcgggagcuacaucgcucuggauucuggaaaaggcaacugggacuguauuaugacauccuaccaguaucuuaucauucagaacaccacgugggaagaucacugccaguuuagccgccccucuccuaucggguaccugggacuccugucccaaagaacacgggacauuuauaucagccgcagacuucugggcaccuucacauggacccucuccgauucugagggcaaugaaacccccgggggauacugucugacacgguggaugcugaucgaggccgagcucaagugcuuuggcaacacggcuguggccaaauguaaugaaaagcaugacgaggaguucugcgauaugcugcgccuuuuugacuucaacaaacaggcgauuagacggcugaagaccgaagcccagaugagcauccagcucauuaauaaggcugucaacgcccugaucaaugaucaacuuauuaugaaaaaccaucugcgcgacaucauggggaucccuuauugcaauuacuccaaguauugguaccucaaccacagcgugacaggaagaaccucucugccccgguguuggcugguuuccaauggcagcuaccucaacgaaacacaguucucugacgauauugagcagcaagcugacaauaugaucaccgagaugcugcagaaagaauauauugaucgccaggggaagacgccucuuggacugguggaccucuuugucuucagcacauccuuuuaccugaucucuauuuuccugcaccuuaucaaaauuccgacccacagacauaucgugggcaagcccugcccuaaaccccaccggcucaaccauaugggcaucuguagcugcgggcuguauaagcacccuggcauucccgugaaguggaaacgcuga

SEQ ID NO: 1565 - RNA, 1473 nt, Artificial Sequence
  derived and/or modified protein sequence (opt5) from LASV(ISTH2094-NIG-2012;Clade II)__AIT17538__GPC
augggccagaucauuaccuucuuucaagaggugccccacgucaucgaagagguuaugaacauugugcugaucgcccucagccugcuugcuauucugaaggggaucuacaauaucgccacaugcggacucuucggccugauuuccuuucuucugcucugugggagaucuugcagcacgaccuauaaaggaguguacgaacugcagacacuggagcucgacauggcgaaccugaauaugaccaugccucuuuccuguacaaagaacaauucucaucacuauaucauggucggcaacgaaaccgggcuggagcucacacugaccaauacgagcauuaucaaccauaaauucugcaaucuuuccgaugcucacaagaaaaaccuguacgaccaugcccucaugucuauuaucagcaccuuucaccuguccauuccgaauuucaaccaguaugaggccaugagcugugauuuuaaugaaggaaagaucucugugcaguacaaccugucccacagcuaugcuaucgacgccgcuggccauugcggcacaauugccaaugggguucuccaaaccuucaugcggauggcguggggaggcucuuacaucgcccuggauuccgggaagggaaacugggacuguauuaugacaagcuaccaguaucuuaucauucagaacaccacgugggaggaucacugccaguuuucucgccccuccccuaucggcuaccuggggcuccugagccaaagaacacgggacaucuauauuucccgcagacuucugggaaccuucacauggacccucucugauagcgaaggcaaugaggcucccggcggguacugucugacccgguggaugcugaucgaggccgaacucaaaugcuuuggaaacacagcuauugccaaguguaaugagaaacaugacgaagaguucugcgauaugcugcgccuuuuugacuucaacaagcaggcgaucaaaagacugaaggccgaagcucagauguccauucaccucaucaauaaggccgugaacgcucugaucaaugaucagcuuauuaugaaaaaccaucugcgggacaucaugggcauuccuuauugcaauuacagcaaguauugguaccucaaccacacggucaccgggaaaacaucucugcccaaguguuggcugguguccaauggaagcuaccucaacgagacccacuucucugacgauaucgagcaacaggccgacaauaugauuacagaacugcuucagaaagaguauauggaucgccaaggcaagaccccucuggggcucguugaccuguuuguguucagcacguccuuuuaccugaucucuauuuuccuucaucucgucaaaaucccgacacacagacauaucgugggacggcccugcccuaagccccaccgccugaaccacaugggcauuuguagcugcggccuguauaagcauccuggggugcccgucaaauggaagagauga

SEQ ID NO: 1566 - RNA, 1473 nt, Artificial Sequence
  derived and/or modified protein sequence (opt5) from LASV(ISTH2129-NIG-2012;Clade II)__AIT17544__GPC
augggccagaucauuaccuucuuucaagaggugccccacgucaucgaagagguuaugaacauugugcugaucgcccucagccugcuugcuauucugaaggggaucuacaauguggccacaugcggacucuucggccuggucuccuuucuucugcucugugggagaucuugcagcacgaccuauaaaggaguguacgaacugcagacacuggagcucgacaugggcucccugaacaugaccaugccucuuucuuguacaaagaauaacagccaucacuauaucaugguugggaaugaaaccggacuggagcucacacugaccaacacguccauuaucaaucauaaauucugcaaccuuucugaugcgcacaagaaaaaucuguacgaccaugcucucaugagcauuaucuccaccuuucaccugagcauuccgaacuucaaucaguaugaggccaugucuugugauuuuaacggcggcaagaucuccgugcaguacaaucugagccacucuuaugccgucgacgcugccaaccauugcgggacaauugcuaauggagugcuccaaaccuucaugcggauggccuggggcggguccuacaucgcgcuggauagcggaaagggcucuugggacuguaucaugacauccuaccaguaucuuauuauccagaacaccacgugggaagaucacugccaguuuagccgccccuccccuauuggguaccugggacuccugucucaaagaacacgggacaucuauauuagccgcagacuucugggcaccuucacauggacccucuccgauagcgagggcaacgaaacccccgggggauacugucugacacgguggaugcugaucgaggccgagcucaaaugcuuuggcaauacggcuguugccaaguguaacgaaaaacaugacgaggaguucugcgauaugcugcgccuuuuugacuucaauaagcaggcuaucagacggcugaaaaccgaagcccagaugucuauucagcucaucaacaaggcggugaaugcccugauuaacgaucaacuuaucaugaagaaucaucugcgcgacauuauggggaucccuuauugcaacuacuccaaauauugguaccucaaucacacagucaccggaaagacaagccugcccagauguuggcuggugucuaacggcagcuaccucaaugaaacccacuucuccgacgauaucgagcagcaggcugacaacaugauuacggagcugcuucaaaaagaauauauggaucggcaggggaagacaccucugggacucguggaccuguuugucuucucuaccagcuuuuaccugaucuccauuuuccuucaccucguuaaaaucccgacccaucgccacauuaucggcaagcccugcccuaaaccccauagacugaaucacaugggcauuuguagcugcgggcuguauaagcacccuggagugcccgugaaguggaaacgguga

SEQ ID NO: 1567 - RNA, 1473 nt, Artificial Sequence
  derived and/or modified protein sequence (opt5) from LASV(ISTH2217-NIG-2012;Clade II)__AIT17548__GPC
augggccagaucauuaccuucuuucaagaggugccccacgucaucgaagagguuaugaacauugugcugaucgcccucagccugcuugcuauucugaaggggaucuacaauguggccacaugcggacucuucggccuggucuccuuucuuuuccugugugggagaucuugcagcacgaccuauaaaggaguguacgaacuccagacacuggagcuggacauggcgucccucaacaugaccaugccucugucuuguacaaagaauaacagccaucacuauaucaugguuggcaaugaaaccgggcuugagcugacacucaccaacacguccauuaucaaucauaaauuuugcaaccugucugaugcucacaagcggaaucuuuacgaccaugcccugaugagcauuaucuccaccuuccaccucagcauuccgaacuuuaaucaguaugaggccaugucuugugauuucaacggaggcaaaaucuccgugcaguacaaucugagccacgcuuaugccggcgacgcugccaagcauugcgggacaauugcgaacggaguccugcaaaccuuuaugcgcauggccuggggcgggucuuacaucgcucucgauuccggaaagggcagcugggacuguaucaugacaucuuaccaguaucugauuauccagaauaccacgugggaagaucacugccaguucuccagacccagcccuauuggguaccuuggacugcucucccaacggacacgcgacaucuauauuucuagacggcugcuuggcaccuuuacauggacccugagcgauuccgagggcaacgaaacccccgggggauacugucucacacgcuggaugcugaucgaggccgagcugaaaugcuucggcaacacggcuguggccaaguguaaugaaaaacaugacgaggaauuuugcgauaugcucagacuguucgacuucaacaagcaggcgauccggcgccuuagaaccgaggcccagaugagcauucagcugaucaauaaagcuguuaacgcccucauuaaugaucaacugaucaugaagaaccaccuucgggacauuauggggaucccuuauugcaauuacucuaaguauugguaccugaaccacacagugaccggaaaaacaucccuccccaaguguuggcuggucagcaauggcucuuaccugaacgaaacccauuuuagcgacgauaucgagcagcaggcugacaauaugauuacggagaugcuccaaaaagaauauaucgaucgccaggggaagacaccucugggacuuguggaccuguucguguuuuccaccucuuucuaccucauuagcaucuuucugcaccuggucaaaauuccgacccauagacacguuaucggcaagcccugcccuaaaccccaucggcuuaaccacaugggcauuuguuccugcgggcucuauaagcacccuggagugcccgugaaguggaaacgcuga

SEQ ID NO: 1568 - RNA, 1473 nt, Artificial Sequence
  derived and/or modified protein sequence (opt5) from LASV(ISTH2271-NIG-2012;Clade II)__AIT17552__GPC
augggccagaucauuaccuucuuucaagaggugccccacgucaucgaagagguuaugaacauugugcugaucgcccucagccugcuugcuauucugaaggggaucuacaauguggccacaugcggacucuucggccuggucuccuuucuucugcucugugggagaucuugcagcacgaccuauaaaggaguguacgaacugcagacacuggagcucgacauggcgucccugaacaugaccaugccucuuucuuguacaaagaauaacagccaucacuauaucaugguuggcaaugaaaccgggcuggagcucacacugaccaacacguccauuaucaaucauaaauucugcaaccuuucugaugcucacaagaaaaaucuguacgaccaugcccucaugagcauuaucuccaccuuucaccugagcauuccgaacuucaaucaguaugaggccaugucuugugauuuuaacggaggcaagaucuccgugcaguacaaucugagccacgcuuaugccgucaacgcugccaaucauugcggcacaauugcgaacggggugcuccaaaccuucaugcggauggccuggggaggcucuuacaucgcucuggacuccgggaagggaagcugggauuguaucaugacaucuuaccaguaucuuauuauccagaacaccacgugggaagaccacugccaguuuucccgccccagcccuauuggcuaccuggggcuccugucccaaagaacacgggauaucuauauuucucgcagacuucugggaaccuucacauggacccucagcgacuccgagggcaaugaaacccccggcggguacugucugacacgguggaugcugaucgaggccgagcucaaaugcuuuggaaacacggcuguugccaaguguaaugaaaaacaugaugaggaguucugcgacaugcugcgccuuuuugauuucaacaagcaggcgaucagacggcugaaaaccgaagcccagaugagcauucagcucaucaauaaggcugugaacgcccugauuaaugaccaacuuaucaugaagaaccaucugcgcgauauuaugggcaucccuuauugcaauuacucuaaauauugguaccucaaccacacagucaccgggaagacaucccugcccagauguuggcuggugagcaauggaucuuaccucaacgaaacccacuucagcgacgacaucgagcagcaggcugauaauaugauuacggagcugcuucaaaaagaauauauggaccggcagggcaagacaccucuggggcucguggaucuguuugucuucuccaccucuuuuuaccugaucagcauuuuccuucaccucguuaaaaucccgacccaucgccacgugauuggaaagcccugcccuaaaccccauagacugaaccacaugggcaucuguuccugcggccuguauaagcacccuggggugcccgucaaguggaaaaaguga

SEQ ID NO: 1569 - RNA, 1473 nt, Artificial Sequence
  derived and/or modified protein sequence (opt5) from LASV(ISTH2304-NIG-2012;Clade II)__AIT17556__GPC
augggccagaucauuaccuucuuucaagaggugccccacgucaucgaagagguuaugaacauugugcugaucgcccucagccugcuugcuauucugaaggggaucuacaauguggccacaugcggacucuucggccuggucuccuuucuucugcucugugggagaucuugcagcacgaccuauaaaggaguguacgaacugcagacacuggagcucgacauggcgucccugaacaugaccaugccucuuucuuguacaaagaauaacagccaucacuauaucaugguuggcaaugaaaccgggcuggagcucacacugaccaacacguccauuaucaaucauaaauucugcaaccuuucugaugcucacaagaaaaaucuguacgaccaugcccucaugagcauuaucuccaccuuucaccugagcauuccgaacuucaaucaguaugaggccaugucuugugauuuuaacggaggcaagaucuccgugcaguacaaucugagccacacauaugcugucgacgccgcuaaccauugcggcaccauugccaauggggugcuccaaacauucaugcggauggcguggggaggcucuuacaucgcccuggauuccgggcgcggaagcugggacuguaucaugaccucuuaccaguaucuuauuauccagaacacgacaugggaagaucacugccaguuuuccagacccagcccuauuggcuaccuggggcuccugucccaacggacccgcgacaucuauauuucuagacggcuucugggaacauucaccuggacccucagcgauuccgagggcaacgaaacacccggcggguacugucugacgcgcuggaugcugaucgaggcugagcucaagugcuuuggaaauaccgccguugcuaaauguaacgaaaagcaugacgaggaguucugcgauaugcugagacuuuuugacuucaauaaacaggccauccggcgccugaagacagaagcgcagaugagcauucagcucaucaacaaagccgugaaugcucugauuaacgaucaacuuaucaugaagaaucaccugagagacauuaugggcaucccuuauugcaacuacucuaaguauugguaccucaaucacaccaucacagggaaaaccucccugccccgguguuggcuggucagcaacggaucuuaccucaaugaaacgcauuucagcgacgauauugagcagcaggccgacaacaugaucacagagcugcuucaaaaggaauauauugaucgccagggcaaaaccccucuggggcucguggaccuguuuguguucuccaccucuuuuuaccugaucagcauuuuccuucaccucgucaagaucccgacacauagacacauuaccggaaaacccugcccuaagccccaucggcugaaucacaugggcaucuguuccugcggccuguauaaacacccugggguucccgugcgcuggaagagauga

SEQ ID NO: 1570 - RNA, 1473 nt, Artificial Sequence
  derived and/or modified protein sequence (opt5) from LASV(ISTH2312-NIG-2012;Clade II)__AIT17560__GPC
augggccagaucauuaccuucuuucaagaggugccccacgucaucgaagagguuaugaacauugugcugaucgcccucagccugcuugcugugcugaaggggauuuacaaugucgccacaugcggacucuucggccugguguccuuucuucugcucugugggagaucuugcagcacgaccuauaaaggaguuuacgaacugcagacacuggagcucgacauggcgucccugaacaugaccaugccucuuucuuguacaaccaauaacagccaucacuauaucauggugggcaaugaaacagggcuggagcucacccugacgaacaccuccaucauuaaucauaaguucugcaaccuuucugaugcucacaaaaagaaucuguacgaccaugcccucaugagcaucauuuccacauuucaccugagcaucccgaacuucaaucaguaugaggccaugucuugugauuuuaacggaggcaaaauuuccguccaguacaaucugagccacgcuuaugccggcgaagcugccaaccauugcgggaccaucgcgaauggagugcuccaaacauucaugcggauggccuggggcgggucuuacauugcucuggacuccggaaagggcagcugggauuguaucaugaccucuuacaaguaucuuaucauucagaacacgacauggggagaccacugccaguuuucccgccccagcccuaucggauaccugggccuccugucccagagaacccgggauauuuauaucucucgcagacuucugggcacauucaccuggacccucagcgacuccgaggggaacgaaacacccggaggcuacugucugacgcgguggaugcugauugaggccgagcucaaaugcuuugggaauaccgcuguugccaaguguaacgaaaaacaugaugaggaguucugcgacaugcugcgccuuuuugauuucaauaagcaagcgaucagaaaacugaagacagaagcccagaugagcauccagcucauuaacaaggcugugaaugcccugaucaacgaccagcuuauuaugaaaaaucaucugcgggauaucauggggauuccuuauugcaacuacucucgcuauugguaccucaaucacaccgucacaggcagaaccucccugccccgguguuggcuggugagcaacgggucuuaccucaaugaaacgcacuucagcgacgacaucgagcaacaggcugauaacaugaucacagagcugcuucagaaggaauauauugaccgccaaggaaaaaccccucugggccucguggaucuguuugucuucuccaccucuuuuuaccugaucagcauuuuccuucaccucguuaagaucccgacacauagacacauuaucggcaaacccugcccuaagccccaucggcugaaucacauggggauuuguuccugcggacuguauaaacacccuggcgugcccgugaaguggaagcgcuga

SEQ ID NO: 1571 - RNA, 1473 nt, Artificial Sequence
  derived and/or modified protein sequence (opt5) from LASV(ISTH2316-NIG-2012;Clade II)__AIT17564__GPC
augggccagaucauuaccuucuuucaagaggugccccacgucaucgaagagguuaugaacauugugcugaucgcccucagccugcuugcuauucugaaggggaucuacaauguggccacaugcggacucuucggccugcuuuccuuucugcuccugugugggagaucuugcagcacgaccuauaaaggagucuacgaacugcagacacucgagcuggacauggcgucccuuaacaugaccaugccucugucuuguacaaagaauaacagccaucacuauaucauggugggcaaugaaaccgggcucgagcugacacuuaccaacacguccauuaucaaucauaaauucugcaaccugucugaugcucacaagaaagaccucuacgaucaugcccugaugagcauuaucuccaccuuucaccugagcauuccgaauuucaaccaguaugaggccaugucuugugacuuuaauggaggcaagaucuccguucaguacaaccucagccacgcuuaugccguggaugcugccaagcauugcggcacaauugcgaaugggguccugcaaaccuucaugcggauggccuggggaggcucuuacaucgcucuugacuccgggaaaggaagcugggauuguaucaugacaucuuaccaguaucugauuauccagaacaccuccugggaagaccacugccaguuuagccgccccuccccuauuggcuaccucgggcugcuuucucaaagaacgcgggauaucuauauuagccgcagacugcucggaacauucaccuggacacuguccgacagcgagggcaaugaaacccccggcggguacugucugacccgguggaugcucaucgaggccgagcugaagugcuuuggaaacacagcuguggccaaauguaacgaaaagcaugaugaggaguucugcgacaugcuucgccuguuugauuucaauaaacaggcgaucaagagacucaagacggaagcccagaugucuauucagcugaucaacaaagcuguuaaugcccuuauuaacgaccaacugaucaugaagaaucaccuccgggacauuaugggcaucccuuauugcaacuacuccaaauauugguaccugaaucacaccgugacagggaagaccagccugccccgcuguuggcucgucucuaacggaagcuaccugaaugaaacacauuucuccgaugacaucgagcagcaggcugauaacaugauuaccgagcuucugcaaaaagaauauaucgacagacagggcaagacgccucucgggcugguggaucuguuuguguucucuaccagcuuuuaccuuauuuccaucuuccuccaccuggucaaaauuccgacacaucggcacguuaucggaaagcccugcccuaagccccaucgccugaaucacaugggcauuuguagcugcggccucuauaaacacccuggggugcccgugaaguggaaaagauga

SEQ ID NO: 1572 - RNA, 1473 nt, Artificial Sequence
  derived and/or modified protein sequence (opt5) from LASV(ISTH2358-NIG-2012;Clade II)__AIT17572__GPC
augggccagaucauuaccuucuuucaagaggugccccacgucaucgaagagguuaugaacauugugcugaucgcccucagccugcuugcuauucugaaggggaucuacaauguggccacaugcggacucuucggccuggucuccuuucuucugcucugugggagaucuugcagcacgaccuauaaaggaguguacgaacugcagacacuggagcucgacauggcgaaccugaauaugaccaugccucuuuccuguacaaagaacaauucucaucacuauaucaugguuggcaacgaaaccgggcuggagcucacacugaccaauacgagcauuaucaaccauaaauucugcaaucuuuccgaugcucacaagaaaaaccuguacgaccaugcccucaugucuauuaucagcaccuuucaccuguccauuccgaauuucaaccaguaugaggccaugagcugugauuuuaauggaggcaagaucucugugcaguacaaccugucccacaauuaugcugucgacgccgcuaaccauugcggcacaauugccaacggggugcuccaaaccuucaugcggauggcguggggaggcagcuacaucgcccuggauucugggaagggaaauugggacuguaucaugacauccuaccaguaucuuauuauccagaacaccacgugggaagaucacugccaguuuagccgccccucuccuauuggcuaccuggggcuccugucccaaagaacacgggacaucuauauuagccgcagacuucugggaaccuucacauggacccucuccgauucugagggcaaugacaugcccggcggguacugucugacccgguggaugcugaucgaagcugagcucaaaugcuuuggaaacacagccguugcuaaguguaaugagaaacaugaugaagaguucugcgacaugcugcgccuuuuugauuucaacaagcaggccaucagacggcugaaaacggaagcgcagaugaauauucagcucaucaacaaggccgugaaugcucugauuaacgaccaacuuaucaugaagaaucaucugcgcgacauuaugggcaucccuuauugcaacuacagcaaauauugguaccucaaucacaccgucacagggaagaccucccugcccagauguuggcuggugagcaacggaucuuaccucaaugagacacacuucuccgaugacaucgaacagcaggccgauaacaugauuaccgagcugcuucaaaaagaguauauggaccggcagggcaagacgccucuggggcucguggaucuguuugucuucagcacaucuuuuuaccugaucagcauuuuccuucaccucguuaaaaucccgacccaucgccacauuaucggaaagcccugcccuaaaccccauagacugaaccacaugggcauuuguuccugcggccuguauaagcacccuggggugcccgugaaguggaaacgguga

SEQ ID NO: 1573 - RNA, 1473 nt, Artificial Sequence
  derived and/or modified protein sequence (opt5) from LASV(ISTH2376-NIG-2012;Clade II)__AIT17576__GPC
augggccagaucauuaccuucuuucaagaggugccccacgucaucgaagagguuaugaacauugugcugaucgcccucagccugcuugcuauucugaaggggaucuacaauguggccacaugcggacucuucggccuggucuccuuucuucugcucugugggagaucuugcagcacgaccuauaaaggaguguacgaacugcagacacuggagcucgacauggcgucccugaacaugaccaugccucuuucuuguacaaagaauaacagccaucacuauaucaugguuggcaaugaaaccgggcuggagcucacacugaccaacacguccauuaucaaucauaaauucugcaaccuuucugaugcucacaagaaaaaucuguacgaccaugcccucaugagcauuaucuccaccuuucaccugagcauuccgaacuucaaucaguaugaggccaugucuugugauuuuaacggaggcaagaucuccgugcaguacaaucugagccacacauaugcugucgacgccgcuaaccauugcggcaccauugccaauggggugcuccaaacauucaugcggauggcguggggaggcucuuacaucgcccuggauuccgggaagggaaacugggacuguaucaugaccagcuaccaguaucuuauuauccagaacacgacaugggaagaucacugccaguuuucucgccccuccccuauuggcuaccuggggcuccugagccaaagaacccgggacaucuauauuucccgcagacuucugggaacauucaccuggacccucucugauagcgagggcaaugaaacacccggcggguacugucugacgcgguggaugcugaucgaggcugagcucaaaugcuuuggaaacaccgccguugcuaaguguaaugaaaaacaugacgaggaguucugcgauaugcugcgccuuuuugacuucaacaagcaggccaucuccagacugaaaacagaagcgcagaugagcauucagcucaucaauaaggccgugaacgcucugauuaaugaucaacuuaucaugaagaaccaucugcgggacauuaugggcaucccuuauugcaauuacucuaaauauugguaccucaaccacaccgucacagggaagaccucccugccccgcuguuggcuggugagcaauggaucuuaccucaacgaaacgcacuucagcgacgauaucgagcagcaggccgacaauaugauuacagagaugcugcaaaaagaauauaucgauagacagggcaagaccccucuugggcugguggaccucuuugucuucuccaccucuuuuuaccugauuagcaucuuccugcaccuuguuaaaauuccgacacaucggcacaucaccggaaagcccugcccuaaaccccaucgccucaaccacaugggcauuuguuccugcggccuguauaagcacccuggggugcccgugaaguggaaaagauga

SEQ ID NO: 1574 - RNA, 1473 nt, Artificial Sequence
  derived and/or modified protein sequence (opt5) from LASV(Lassa virus/H.sapiens-wt/NGA/2015/ISTH_0543;Clade II)__AVO03639__GPC
augggccagaucauuaccuucuuucaagaggugccccacgucaucgaagagguuaugaacauugugcugaucgcccucagccugcuugcuauucugaaggggaucuacaauguggccacaugcggacucuucggccuggucuccuuucuucugcucugugggagaucuugcagcacgaccuauaaaggaguguacgaacugcagacacuggagcucgacauggcgaaccugaauaugaccaugccucuuuccuguacaaagaacaauucucaucacuauaucaugguuggcaacgaaaccgggcuggagcucacacugaccaauacgagcauuaucaaccauaaauucugcaaucuuuccgaugcucacaagaaaaaccuguacgaccaugcccucaugucuauuaucagcaccuuucaccuguccauuccgaauuucaaccaguaugaggccaugagcugugauuuuaauggaggcaagaucucugugcaguacaaccugucccacacauaugcugucgacgccgcuaaucauugcggcaccauugccaacggggugcuccaaacauucaugcggauggcguggggaggcagcuacaucgcccuggauucugggaagggauccugggacuguaucaugaccagcuaccaguaucuuguuauucagaacacgacaugggaagaucacugccaguuuucucgccccuccccuaucggcuaccuggggcuccugagccaaagaacccgggacauuuauaucucccgcagacuucugggaacauucaccuggacccucucugauagcgagggcaaugaaacacccggcggguacugucugacgcgguggaugcugauugaggcugagcucaaaugcuuuggaaacaccgccguggcuaaguguaaugaaaaacaugacgaggaguucugcgauaugcugcgccuuuuugacuucaacaagcaggccaucagacggcugaaaacagaagcgcagauguccauccagcucauuaauaaggccgucaacgcucugaucaaugaucaacuuauuaugaagaaccaucugcgcgacaucaugggcauuccuuauugcaauuacagcaaauauugguaccucaaccacaccgugacagggaagaccucucugcccagauguuggcugguguccaauggaagcuaccucaacgaaacgcacuucucugacgauaucgagcagcaggccgacaauaugaucacagagcugcuucaaaaagaauauauugaucggcagggcaagaccccucuggggcucgucgaccuguuuguuuucagcaccuccuuuuaccugaucucuauuuuccuucaccucgugaaaaucccgacacaucgccacauuaccggaaagcccugcccuaaaccccauagacugaaccacaugggcaucuguagcugcggccuguauaagcacccuggggugcccgucaaguggaaacgguga

SEQ ID NO: 1575 - RNA, 1473 nt, Artificial Sequence
  derived and/or modified protein sequence (opt5) from LASV(Lassa virus/H.sapiens-wt/NGA/2015/ISTH_0547;Clade II)__AVO03583__GPC
augggccagaucauuaccuucuuucaagaggugccccacgucaucgaagagguuaugaacauugugcugaucgcccucagccugcuugcuauucugaaggggaucuacaauguggccacaugcggacucuucggccuggucuccuuucuucugcucugugggagaucuugcagcacgaccuauaaaggaguguacgaacugcagacacuggagcucgacauggcgucccugaacaugaccaugccucuuucuuguacaaagaauaacagccaucacuauaucaugguuggcaaugaaaccgggcuggagcucacacugaccaacacguccauuaucaaucauaaauucugcaaccuuucugaugcucacaagaaaaaucuguacgaccaugcccucaugagcauuaucuccaccuuucaccugagcauuccgaacuucaaucaguaugaggccaugucuugugauuuuaacggaggcaagaucuccgugcaguacaaucugagccacacauaugcugucgacgccgcuaaccauugcggcaccauugccaauggggugcuccaaacauucaugcggauggcguggggaggcucuuacaucgcccuggauuccgggaagggaagcugggacuguaucaugaccucuuaccaguaucuuauuauccagaacacgacaugggaagaucacugccaguuuucccgccccagcccuauuggcuaccuggggcuccugucccaaagaacccgggacaucuauauuucucgcagacuucugggaacauucaccuggacccucagcgauuccgagggcaacgaaacacccggcggguacugucugacgcgguggaugcugaucgaggcugagcucaaaugcuuuggaaauaccgccguugcuaaguguaacgaaaaacaugacgaggaguucugcgauaugcugcgccuuuuugacuucaauaagcaggccaucagacggcugaaaacagaagcgcagaugagcauucagcucaucaacaaggccgugaaugcucugauuaacgaucaacuuaucaugaagaaucaucugcgcgacauuaugggcaucccuuauugcaacuacucuaaauauugguaccucaaucacaccgucacagggaagaccucccugcccagauguuggcuggugagcaacggaucuuaccucaaugaaacgcacuucagcgacgauaucgagcagcaggccgacaacaugauuacagagcugcuucaaaaagaauauaucgagcggcagggcaagaccccucuggggcucguggaucuguuugucuucuccaccucuuuuuaccugauuagcaucuuccuucaccucguuaaaauuccgacacaucgccacaucaccggaaagcccugcccuaaaccccauagacugaaucacaugggcauuuguuccugcggccuguauaagcacccuggggugcccgugaaguggaaacgguga

SEQ ID NO: 1576 - RNA, 1473 nt, Artificial Sequence
  derived and/or modified protein sequence (opt5) from LASV(Lassa virus/H.sapiens-wt/NGA/2015/ISTH_0574;Clade II)__AVO03657__GPC
augggccagaucauuaccuucuuucaagaggugccccacgucaucgaagagguuaugaacauugugcugaucgcccucagccugcuugcuauucugaaggggaucuacaauguggccacaugcggacucuucggccuggucgcguuucuucugcucugugggagauccugcucuacgaccuauaaaggaguguacgaacugcagacacuggagcucgacauggcuagccugaacaugaccaugccucuuuccuguacaaagaauaacucucaucacuauaucaugguuggcaaugaaaccgggcuggagcucacacugaccaacacgagcauuaucaaucauaaauucugcaaccuuuccgaugcccacaagaaaaaucuguacgaccaugcccucaugucuauuaucagcaccuuucaccuguccauuccgaacuucaaucaguaugaggcuaugagcugugauuuuaacggaggcaagaucucugugcaguacaaucugucccacacauaugccgucgacgcugccaaccauugcggcaccauuacaaauggggugcuccaaaccuucaugcggauggcguggggaggcagcuacaucgcccuggauucugggaagggauccugggacuguaucaugacgagcuaccaguaucuuauuauccagaacacaaccugggaagaucacugccaguuuucucgccccuccccuauuggcuaccuggggcuccugagccaaagaacacgggacaucuauauuucccgcagacuucugggaaccuucaccuggacacucucugauagcgagggcaacgaaacgcccggcggguacugucugacccgguggaugcugaucgaggcugagcucaaaugcuuuggaaauacagccguugcuaaguguaacgaaaaacaugacgaggaguucugcgauaugcugcgccuuuuugacuucaauaagcaggccaucagacggcugaaaaccgaagcgcagauguccauucagcucaucaacaaggccgugaaugcucugauuaacgaucaacuuaucaugaagaaucaucugcgcgacauuaugggcaucccuuauugcaacuacagcaaauauugguaccucaaucacacagucaccgggagaacgucucugccccgguguuggcugguguccaacggaagcuaccucaaugaaacacacuucucugacgauaucgagcagcaggccgacaacaugauuaccgagcugcuucaaaaggaauauauggaucgccagggcaaaaccccucuggggcucguggaccuguuugucuucagcacauccuuuuaccugaucucuauuuuccuucaccucaucaagauuccgacccauagacacguuaucggaaaacccugcccuaagccccaucggcugaaucacaugggcauuuguagcugcggccuguauaaacacccuggggugcccgugaaguggaagcgcuga

SEQ ID NO: 1577 - RNA, 1473 nt, Artificial Sequence
  derived and/or modified protein sequence (opt5) from LASV(Lassa virus/H.sapiens-wt/NGA/2015/ISTH_0681;Clade II)__AVO03617__GPC
augggccagaucauuaccuucuuucaagaggugccccacgucaucgaagagguuaugaacauugugcugaucgcccucagccugcuugcuauucugaaggggaucuacaauguggccacaugcggacucuucggccuggucuccuuucuucugcucugugggagaucuugcagcacgaccuauaaaggaguguacgaacugcagacacuggagcucgacauggcgucccugaacaugaccaugccucuuucuuguacaaagaauaacagccaucacuauaucaugguuggcaaugaaaccgggcuggagcucacacugaccaacacguccauuaucaaucauaaauucugcaaccuuucugaugcucacaagaaaaaucuguacgaccaugcccucaugagcauuaucuccaccuuucaccugagcauuccgaacuucaaucaguaugaggccaugucuugugauuuuaacggaggcaagaucuccgugcaguacaaucugagccacacauaugcugaaggcgccgcuaaccauugcgggaccauugccaauggaguccuccaaacauucaugcggauggcguggggcgggucuuacaucgcccuggacuccggaaagggcagcugggauuguaucaugaccucuuaccaguaucuuauuauccagaacacgacaugggaggaccacugccaguuuucccgccccagcccuauuggguaccugggacuccugucccaaagaacccgggauaucuauauuucucgcagacuucugggcacauucaccuggacccucagcgacuccgaaggcaacgagacacccgggggauacugucugacgcgguggaugcugaucgaggcugaacucaaaugcuuuggcaauaccgccguggcuaaguguaacgagaaacaugaugaagaguucugcgacaugcugcgccuuuuugauuucaauaagcaggccaucaugagacugaaaacagaagcgcagaugagcauucagcucaucaacaaggccguuaaugcucugauuaacgaccaacuuaucaugaagaaucaucugcgggauauuauggggaucccuuauugcaacuacucuaaauauugguaccucaaucacaccgugacaggaaagaccucccugccccgcuguuggcuggucagcaacggcucuuaccucaaugagacgcacuucagcgacgacaucgagcagcaggccgauaacaugauuacagaaaugcugcaaaaagaguauauggacagacaggggaagaccccucuuggacugguggaucucuuuguguucuccaccucuuuuuaccugaucagcauuuuccugcaccuugucaaaaucccgacacaucggcacguuauuggcaagcccugcccuaaaccccaucgccucaaucacaugggcaucuguuccugcgggcuguauaagcacccuggagugcccgugaaguggaaaagauga

SEQ ID NO: 1578 - RNA, 1473 nt, Artificial Sequence
  derived and/or modified protein sequence (opt5) from LASV(Lassa virus/H.sapiens-wt/NGA/2015/ISTH_0682;Clade II)__AVO03625__GPC
augggccagaucauuaccuucuuucaagaggugccccacgucaucgaagagguuaugaacauugugcugaucgcccucagccugcuugcuauucugaaggggaucuacaauguggccacaugcggacucuucggccuggucuccuuucuucugcucugugggagaucuugcagcacgaccuauaaaggaguguacgaacugcagacacuggagcucgacauggcgucccugaacaugaccaugccucuuucuuguacaaagaauaacagccaucacuauaucaugguuggcaaugaaaccgggcuggagcucacacugaccaacacguccauuaucaaucauaaauucugcaaccuuucugaugcucacaagaaaaaucuguacgaccaugcccucaugagcauuaucuccaccuuucaccugagcauuccgaacuucaaucaguaugaggccaugucuugugauuuuaacggaggcaagaucuccgugcaguacaaucugagccacgcuuaugccgucgacgcugccaaccauugcggcacaauugcgaauggggugcuccaaaccuucaugcggauggccuggggaggcucuuacaucgcucuggauuccgggaagggaagcugggacuguaucaugacaucuuaccacuaucuuauuauccagaacaccacgugggaagaucauugccaguuuucccgccccagcccuauuggcuaccuggggcuccugucccagagaacacgggacaucuauauuucucgcagacuucugggaaccuucacauggacccucagcgauuccgagggcaacgaaacccccggcggguacugucugacacgguggaugcugaucgaggccgagcucaaaugcuuuggaaauacggcuguugccaaguguaacgaaaaacacgacgaggaguucugcgauaugcugcgccuuuuugacuucaauaagcaagcgaucagacggcugaaaaccgaagcccagaugagcauucagcucaucaacaaggcugugaaugcccugauuaacgaucagcuuaucaugaagaaucaucugcgcgacauuaugggcaucccuuauugcaacuacucuaaauauugguaccucaaucacacagucaccgggaagacaucccugcccagauguuggcuggugagcaacggaucuuaccucaaugaaacccacuucagcgacgauaucgagcaacaggcugacaacaugauuacggagcugcuucagaaagaauauaucgaucggcaaggcaagacaccucuggggcucguggaccuguuugucuucuccaccucuuuuuaccugauuagcaucuuccuucaucucguuaaaauuccgacccaccgccaugugaucggaaagcccugcccuaaaccccacagacugaaucacaugggcauuuguuccugcggccuguauaagcauccuggggugcccgucaaguggaaacgguga

SEQ ID NO: 1579 - RNA, 1473 nt, Artificial Sequence
  derived and/or modified protein sequence (opt5) from LASV(Lassa virus/H.sapiens-wt/NGA/2015/ISTH_0687;Clade II)__AVO03581__GPC
augggccagaucauuaccuucuuucaagaggugccccacgucaucgaagagguuaugaacauugugcugaucgcccucagccugcuugcuauucugaaggggaucuacaauguggccacaugcggacucuucggccuggucuccuuucuucugcucugugggagaucuugcagcacgaccuauaaaggaguguacgaacugcagacacuggagcucgacaugaccaaccugaauaugacaaugccucuuuccuguaccaagaacaauucucaucacuauaucaugguuggcaacgaaacagggcuggagcucacccugacgaauaccagcauuaucaaccauaaauucugcaaucuuuccgaugcgcacaagaaaaaccuguacaaucaugcucucaugucuauuaucagcacauuucaccuguccauuccgaacuucaaucaguaugaggccaugagcugugacuuuaacggaggcaagaucucugugcaguacaaucugucccacaccuaugccgucgaugcugccaaccauugcggcacaguggcuaacgggguucuccaaaccuucaugcggauggccuggggaggcagcuacauugcgcuggacucugggaagggaggcugggauuguaucaugacguccuaccaguaucuuaucauucagaauacaaccugggaagaccacugccaguuuagccgccccucuccuaucggguaccugggacuccugucccaaagaacacgggauauuuauaucagccgcagacuucugggcaccuucaccuggacacucuccgacucugagggcaacgaaacgcccgggggauacugucugacccgguggaugcugauugaggccgagcucaaaugcuuuggcaauacagcuguggccaaguguaacgaaaaacaugaugaggaguucugcgacaugcugcgccuuuuugauuucaauaagcaggcuaucagaaaacugaaggccgaagcgcagaugagcauccagcucauuaacaaggccgucaaugcucugaucaacgaccaacuuauuaugaaaaaucaucugcgggauaucauggggauuccuuauugcaacuacuccaaguauugguaccucaaucacaccgugacaggaaaaaccagccugcccaaguguuggcuggugucuaacggcuccuaccucaaugaaacgcacuucagcgacgacaucgagcagcaggccgauaacaugaucacagagcugcuucaaaaagaauauauggaccgccaggggaagaccccucugggacucgucgaucuguuuguuuucucuaccagcuuuuaccugauuuccaucuuccuucaccucgugaaaauuccgacacauagacacaucauuggcaagcccugcccuaagccccaucggcugaaucacaugggcaucuguucuugcgggcuguauaaacacccuggagugcccgucaaguggaaacgcuga

SEQ ID NO: 1580 - RNA, 1473 nt, Artificial Sequence
  derived and/or modified protein sequence (opt5) from LASV(Lassa virus/H.sapiens-wt/NGA/2015/ISTH_0736;Clade II)__AVO03573__GPC
augggccagaucauuaccuucuuucaagaggugccccacgucaucgaagagguuaugaacauugugcugaucgcccucagccugcuugcugugcugaaggggauuuacaaugucgccacaugcggacucuucggccugguguccuuucuucugcucugugggagaucuugcagcacgaccuauaaaggaguuuacgaacugcagacacuggagcucgacauggcgucccugaacaugaccaugccucuuucuuguacaaagaauaacagccaucacuauaucauggugggcaaugaaaccgggcuggagcucacacugaccaacacguccaucauuaaucauaaauucugcaaccuuucugaugcucacaagaaaaaucuguacgaccaugcccucaugagcaucauuuccaccuuucaccugagcaucccgaacuucaaucaguaugaggccaugucuugugauuuuaacggaggcaagauuuccguccaguacaaucugagccacacacaugcuguggacgccgcuaaccacugcggcaccaucgccaaugggguucuccaaacauucaugcggauggcguggggaggcucuuauauugcccuggauuccgggaagggaagcugggacuguaucaugaccucuuaccaguaccuuaucauucagaacacgacaugggaagaucauugccaguuuucccgccccagcccuaucggcuaucuggggcuccugucccaaagaacccgggacauuuacaucucucgcagacuucugggaacauucaccuggacccucagcgauuccgagggcaacgaaacacccggcggguauugucugacgcgguggaugcugauugaggcugagcucaaaugcuuuggaaauaccgccguggcuaaguguaacgaaaaacacgacgaggaguucugcgauaugcugcgccuuuuugacuucaauaagcaggccaucagacggcugaaaacagaagcgcagaugagcauccagcucauuaacaaggccgucaaugcucugaucaacgaucaacuuauuaugaagaaucaucugcgcgacaucaugggcauuccuuacugcaacuauucuagauacugguaucucaaucacaccgugacagggaaaaccucccugccccgguguuggcuggugagcaacggaucuuaccucaaugaaacgcacuucagcgacgauaucgagcagcaggccgacaacaugaucacagagcugcuucaaaaggaauacauugaucgccagggcagaaccccucuggggcucgucgaccuguuuguuuucuccaccucuuuuuaucugaucagcauuuuccuucaucucgugaaaaucccgacacaccggcaugugauuggaaagcccugcccuaaaccccaccgccugaaucacaugggcaucuguuccugcggccuguacaagcauccugggguccccgugaaauggaagagauga

SEQ ID NO: 1581 - RNA, 1473 nt, Artificial Sequence
  derived and/or modified protein sequence (opt5) from LASV(Lassa virus/H.sapiens-wt/NGA/2015/ISTH_0789;Clade II)__AVO03551__GPC
augggccagaucgugaccuucuuucaagaggucccccacguuauugaagagaucaugaacauugugcugaucacacucagccugcuugccauucugaaggggguguacaaucucgcuacgugcggacugaucggccuuaucaccuuccuguuucucugugggagauccugcucuacaauuuauaaaggaagcuaccaguuccagacccuggaacugaacauggagacacucaauaugaccaugccucuguccuguacaaagaacucuagccaucacuauauccgggucuccaaugaaaccggccuugagcugacgcucaccaacacaucuauuaucaaucauaaauuuugcaaccugagcgacgcccacaagaaaaaucuuuacgaucauacccugauguccauuaucagcacauuccaccucucuauuccgaacuuuaaucaguaugaggcgauguccugugacuucaacgggggaaagaucagcgugcaauacaaucugucucacuccuaugcuguugaugccgccaaccauugcggcaccguggcuaauggcguccugcagacguuuaugcgcauggccuggggagggagcuacaucgcucucgacucuggcagagggaacugggauuguauuaugacauccuaccaguaucugaucauucagaacaccacaugggaagaccacugccaauucagccggcccuccccuaucggauaccuuggccugcucucucagcgcaccagagauauuuauaucagccggcgccugcuugggaccuuuacauggacgcuguccgacagcgagggaaaggaaacccccggcggcuacugucucacaagauggaugcugaucgaggccgagcugaaaugcuucgggaauaccgcgguggccaaguguaacgaaaaacaugaugaggaauuuugcgacaugcuccggcuguucgauuucaauaagcaggcuauucagcgccuuaaagccgaggcucaaaugucuauccagcugauuaacaaggccguuaaugcgcucaucaacgaccagcugauuaugaagaaucaccuuagagauaucaugggaaucccuuauugcaacuacuccaaauauugguaccugaaucacacaagcaccggccggacgucucuccccaaguguuggcuggugagcaacggguccuaccugaaugaaacacauuuuucugacgacauugagcaacaggccgauaacaugaucaccgagaugcuccagaaagaauauauugaccgccagggaaagaccccucugggccuugucgaucuguucguguuuagcacauccuucuaccucaucagcauuuuucugcaccuggugaaaaucccgacccauagacacauugucgggaagucuugccccaaaccucaucggcuuaaucacaugggaaucuguuccugcggccucuauaagcgccccggcguuccugugaaguggaaaagauga

SEQ ID NO: 1582 - RNA, 1473 nt, Artificial Sequence
  derived and/or modified protein sequence (opt5) from LASV(Lassa virus/H.sapiens-wt/NGA/2015/ISTH_0821;Clade II)__AVO03641__GPC
augggccagaucauuaccuucuuucaagaggugccccacgucaucgaagagguuaugaacauugugcugaucgcccucagccugcuugcuauucugaaggggaucuacaauguggccacaugcggacucuucggccuggucuccuuucuucugcucugugggagaucuugcagcacgaccuauaaaggaguguacgaacugcagacacuggagcucgacauggcgucccugaacaugaccaugccucuuucuuguacaaagaauaacagccaucacuauaucaugguuggcaaugaaaccgggcuggagcucacacugaccaacacguccauuaucaaucauaaauucugcaaccuuucugaugcucacaagaaaaaucuguacgaccauacccucaugagcauuaucuccacauuucaccugagcauuccgaacuucaaucaguaugaggccaugucuugugauuuuaacggaggcaagaucuccgugcaguacaaucugagccacaccuaugccgucgacgcugccaaccauugcggcacaauugcuaauggggugcuccaaaccuucaugcggauggccuggggaggcucuuacaucgcgcuggauuccgggaagggaaacugggacuguaucaugacgagcuaccaguaucuuauuauccagaacacaaccugggaagaucacugccaguuuucucgccccuccccuauuggcuaccuggggcuccugagccaaagaacacgggacaucuauauuucccgcagacuucugggaaccuucaccuggacacucucugauagcgagggcaaugaaacgcccggcggguacugucugacccgguggaugcugaucgaggccgagcucaaaugcuuuggaaacacagcuguugccaaguguaaugaaaaacaugacgaggaguucugcgauaugcugcgccuuuuugacuucaacaagcaggcuaucuccagacugaaaaccgaagcccagaugagcauucagcucaucaauaaggcggugaacgcccugauuaaugaucaacuuaucaugaagaaccaucugcgggacauuaugggcaucccuuauugcaauuacucuaaauauugguaccucaaccacacagucaccgggaagacgucccugccccgcuguuggcuggugagcaauggaucuuaccucaacgaaacacacuucagcgacgauaucgagcagcaggcugacaauaugauuaccgagaugcugcaaaaagaauauaucgauagacagggcaagaccccucuugggcugguggaccucuuugucuucuccacaucuuuuuaccugauuagcaucuuccugcaccuuguuaaaauuccgacccaucggcacgugaucggaaagcccugcccuaaaccccaucgccucaaccacaugggcauuuguuccugcggccuguauaagcacccuggggugcccgucaaguggaaaagauga

SEQ ID NO: 1583 - RNA, 1473 nt, Artificial Sequence
  derived and/or modified protein sequence (opt5) from LASV(Lassa virus/H.sapiens-wt/NGA/2015/ISTH_0831;Clade II)__AVO03545__GPC
augggccagaucgugaccuucuuucaagaggucccccacguuauugaagagaucaugaacauugugcugaucacacucagccugcuugccauucugaaggggguguacaaucucgcuacgugcggacugaucggccuuaucaccuuccuguuucucugugggagauccugcucuaugacauauaaaggaagcuaccagcuggaaacccuggagcucaacauggaaacacugaauaugaccaugccucuuuccuguacaaagaacaccucucaucacuauauucgggucggcaaugagacggggcuggagcucacccugacaaacaccagcaucauuaaucauaaauucugcaaccuuuccgacgcccacaagaaaaaucuguacgaucauucucucaugagcaucguguccacauuucaccugagcauuccgaacuucaaucaguaugaagcgaugucuugugacuuuaacggaggcaagaucuccauucaguacaaucugagccacgcuuaugccggcgaugccgcuaagcauugcgggacccucgccaacggaguucugcaaacguucaugcgcauggcuuggggcgggucuuacaucgcccuugacuccggaagaggcaauugggauuguaucaugacaagcuaccaguaucugauuauccagaacaccacaugggacgaucacugccaguuuucucggcccuccccuauuggguaccucggacugcuuagccaacgcaccagagagaucuauauuucccggcgccugcucggcaccuucacauggacgcugucugacagcgaaggcaacgaggcgcccgggggauacugucugaccagauggaugcucaucgaggccgaacugaaaugcuuuggcaauacagcuguggccaaguguaacgagaaacaugaugaagaguucugcgacaugcuucggcuguuugauuucaauaagcaggcuauccagcgccucaaaaccgaagcccagauguccauucaacugaucaacaaggcggucaaugcccuuauuaacgaccagcugaucaugaagaaucaccucagagauauuauggggaucccuuauugcaacuacagcaaauauugguaccugaaucacacaaccacgggacggacaucucugccccgcuguuggcucguguccaacggcagcuaccugaaugagacccauuucucugacgacaucgagcagcaagcugauaacaugauuaccgaaaugcuucagaaggaguauaucgacagacaggggaaaacaccucugggacucguugaucuguuuguguucagcaccuccuuuuaccugauuucuaucuuccuucaccucgucaagauuccgacacaucggcacaucgugggcaaaagcugccccaagccucaucgccugaaucacaugggcauuuguuccugcgggcuguauaaacagcccggagugccugucagauggaagcgguga

SEQ ID NO: 1584 - RNA, 1473 nt, Artificial Sequence
  derived and/or modified protein sequence (opt5) from LASV(Lassa virus/H.sapiens-wt/NGA/2016/ISTH_0009;Clade II)__AVO03571__GPC
augggccagaucauuaccuucuuucaagaggugccccacgucaucgaagagguuaugaacauugugcugaucgcccucagccugcuugcuauucugaaggggaucuacaauguggccacaugcggacuccugggccuugucuccuuccugcuccugugugggagaucuugcagcacgaccuauaaaggaguguacgaacugcagacacucgagcuggacauggcgucccuuaacaugaccaugccucugucuuguacaaagaauaacagccaucacuauaucaugguuggcaaugaaaccgggcucgagcugacacuuaccaacacguccauuaucaaucauaaauuuugcaaccugucugaugcucacaagaaaaaucucuacgaccaugcccugaugagcauuaucuccaccuuccaccugagcauuccgaacuuuaaucaguaugaggccaugucuugugauuucaacggaggccggaucuccgugcaguacaaucucagccacucuuaugcugucgacgccgcuaaccauugcggcacaauugccaauggggugcugcaaaccuuuaugcgcauggcguggggaggcuccuacaucgcccuugauagcgggaagggaucuugggacuguaucaugacauccuaccaguaucugauuauccagaacaccacgugggaagaucacugccaguucagcagacccuccccuauuggcuaccucgggcugcuuucucaacggacacgcgacaucuauauuagcagacggcugcucggaaccuuuacauggacccuguccgauagcgagggcaacgaaacccccggcggguacugucugacacgcuggaugcucaucgaggcugagcugaagugcuucggaaauacggccguugcuaaauguaacgaaaagcaugacgaggaauuuugcgauaugcuuagacuguucgacuuuaauaaacaggccauccggcgccucaagaccgaggcgcagaugucuauucagcugaucaacaaagccgugaaugcucuuauuaacgaucaacugaucaugaagaaucaccucagagacauuaugggcaucccuuauugcaacuacuccaaguauugguaccugaaucacacagucaccgggaaaacaagccugccccgguguuggcucgugucuaacggaagcuaccugaaugaaacccauuucuccgacgauaucgagcagcaggccgacaacaugauuacggagcuucugcaaaaggaauauaucgaucgccagggcaaaacaccucucgggcugguggaccuguucgucuuuucuaccagcuucuaccuuauuuccaucuuucuccaccugguuaagauuccgacccauagacacaucacaggaaaacccugcccuaagccccaucggcugaaucacaugggcauuuguagcugcggccucuauaaccacccuggggugcccgugaaauggaagcgcuga

SEQ ID NO: 1585 - RNA, 1473 nt, Artificial Sequence
  derived and/or modified protein sequence (opt5) from LASV(Lassa virus/H.sapiens-wt/NGA/2016/ISTH_0017;Clade II)__AVO03567__GPC
augggccagaucauuaccuucuuucaagaggugccccacgucaucgaagagguuaugaacauugugcugaucgcccucagccugcuugcuauucugaaggggaucuacaauguggccacaugcggacucuucggccuggucuccuuucuucugcucugugggagaucuugcagcacgaccuauaaaggaguguacgaacugcagacacuggagcucgacauggcgucccugaacaugaccaugccucuuucuuguacaaagaauaacagccaucacuauaucaugguuggcaaugaaaccgggcuggagcucacacugaccaacacguccauuaucaaucauaaauucugcaaccuuucugaugcucacaagaaaaaucuguacgaccaugcccucaugagcauuaucuccaccuuucaccugagcauuccgaacuucaaucaguaugaggccaugucuugugauuuuaacggaggcaagaucuccgugcaguacaaucugagccacacauaugcuauugacgccgcuaaccauugcggcaccaucgccaaugggguccuccaaacauucaugcggauggcguggggaggcucuuacaucgcccuggauuccgggaagggaagcugggacuguauuaugaccucuuaccaguaucuuaucauucagaacacgacaugggaagaucacugccaguuuucccgccccagcccuaucggcuaccuggggcuccugucccaaagaacccgggacauuuauaucucucgcagacuucugggaacauucaccuggacccucagcgauuccgagggcaacgaaacacccggcggguacugucugacgcgguggaugcugaucgaggcugagcucaaaugcuuuggaaauaccgccguggcuaaguguaacgaaaaacaugacgaggaguucugcgauaugcugcgccuuuuugacuucaauaagcaggccauuagacggcugaaaacagaagcgcagaugagcauccagcucauuaacaaggccguuaaugcucugaucaacgaucaacuuauuaugaagaaucaucugcgcgacaucaugggcaucccuuauugcaacuacucuaaauauugguaccucaaucacaccgugacagggaagaccucccugcccagauguuggcuggucagcaacggaucuuaccucaaugaaacgcacuucagcgacgauauugagcagcaggccgacaacaugaucacagagcugcuucaaaaagaauauauggaucggcagggcaagaccccucuggggcucguggaccuguuuguguucuccaccucuuuuuaccugauuagcaucuuccuucaccucguccgcauuccgacacauagacacguuaucggaaaacccugcccuaagccccaucggcugaaucacaugggcauuuguuccugcggccuguauaaacacccuggggugcccgugaaguggaagcgcuga

SEQ ID NO: 1586 - RNA, 1473 nt, Artificial Sequence
  derived and/or modified protein sequence (opt5) from LASV(Lassa virus/H.sapiens-wt/NGA/2016/ISTH_0035;Clade II)__AVO03619__GPC
augggccagaucauuaccuucuuucaagaggugccccacgucaucgaagagguuaugaacauugugcugaucgcccucagccugcuugcuauucugaaggggaucuacaauguggccacaugcggacucuucggccuggucuccuuucuucugcucugugggagaucuugcagcaugacguauaaaggaguguacgaacugcagacccuggagcucgacauggcgucccugaacaugacaaugccucuuucuuguaccaagaauaacagccaucacuauaucaugguuggcaaugaaacagggcuggagcucacccugacaaacaccuccauuaucaaucauaaauucugcaaccuuucugaugcucacaagaaaaaucuguacgaccaugcccucaugagcauuaucuccacguuucaccugagcauuccgaacuucaaucaguaugaggccaugucuugugauuuuaacggaggcaagaucuccgugcaguacaaucugagccacaccuaugcugucgacgccgcuaaccauugcggcacaauugccaauggggugcuccaaaccuucaugcggauggcguggggaggcucuuacaucgcccuggauuccgggaagggaagcugggacuguaucaugacaucuuaccaguaucuuauuauccagaacaccacgugggaagaucacugccaguuuucccgccccagcccuauuggcuaccuggggcuccugucccaaagaacacgggacaucuauauuucucgcagacuucugggaaccuucacauggacccucagcgauuccgagggcaacgaaacccccggcggguacugucugacacgguggaugcugaucgaggcugagcucaaaugcuuuggaaauacggccguugcuaaguguaacgaaaaacaugacgaggaguucugcgauaugcugcgccuuuuugacuucaauaagcaggccaucagacggcugaaaaccgaagcgcagaugagcauucagcucaucaacaaggccgugaaugcucugauuaacgaucaacuuaucaugaagaaucaucugcgcgacauuaugggcaucccuuauugcaacuacucuaaauauugguaccucaaucacacaaucaccgggaagacaucccugcccagauguuggcuggucagcaacggaucuuaccucaaugaaacccacuucagcgacgauauugagcagcaggccgacaacaugaucacggagcugcuucaaaaagaauauauggaucggcagggcaagacaccucuggggcucguggaccuguuuguguucuccaccucuuuuuaccugauuagcaucuuccuucaccucgucaaaauuccgacccaucgccacguuaucggaaagcccugcccuaaaccccauagacugaaucacaugggcauuuguuccugcggccuguauaagcacccuggggugcccgugaaguggaaacgguga

SEQ ID NO: 1587 - RNA, 1473 nt, Artificial Sequence
  derived and/or modified protein sequence (opt5) from LASV(Lassa virus/H.sapiens-wt/NGA/2016/ISTH_0104;Clade II)__AVO03631__GPC
augggccaggugaucaccuucuuucaagaggucccccacguuauugaagaggugaugaacaucgugcugauugcccucagccugcuugcuauccugaaggggauuuacaaugucgccacaugcggacucuucggccugaucuccuuucuucugcucugugggagaucuugcagcacgaccuauaaaggaguguacgaacugcagacacuggagcucaacaugcagaaucugaacaugaccaugccucuuuccuguacaaagaacucuagccaucacuauaucaugguuggcaaugaaaccgggcuggagcucacacugaccaauacguccauuaucaaccauaaauucugcaaucuuucugacgcgcacaagaaaaaccuguacgaucaugcucucaugagcauuaucuccaccuuucaccugagcauuccgaauuucaaccaguaugaggccaugucuugugacuuuaauggaggcaagaucuccgugcaauacaaccugagccacacauaugccauugaugcugccaaucauugcggcaccgucgcuaacggggugcuccagacauucaugcggauggccuggggaggcucuuacaucgcgcuggacuccgggcgcggaaacugggauuguaucaugaccagcuaccaguaucuuauuauccagaauacgacaugggaagaccacugccaauuuucuagacccuccccuauuggcuaccuggggcuccugagccagcggacccgcgauaucuauauuuccagacggcuucugggaacauucaccuggacccucucugacagcgagggcaacgaagcccccggcggguacugucugacacgcuggaugcugaucgaggcugagcucaagugcuuuggaaauacggccguugcuaaauguaacgaaaagcaugaugaggaguucugcgacaugcugagacuuuuugauuucaauaaacaggccaucaagcggcugaaaaccgaagcgcagauguccauucaacucaucaacaaggccgugaaugcucugauuaacgaccagcuuaucaugaagaaucaucugcgcgauauuaugggcaucccuuauugcaacuacagcaaauauugguaccucaaucacacagucaccgggagaacaucucugccccgguguuggcugguguccaacggaagcuaccucaaugacacccaguucucugacgauaucgaacaacaggccgacaacaugauuacggagaugcugcagaaggaguauauggaucgccagggcaaaacaccucuugggcugguggaccucuuugucuucagcaccuccuuuuaccugaucucuauuuuccugcaccuuguuaagaucccgacccacagacauauugugggacggcccugcccuaaaccccaccgccucaaucauaugggcaucuguagcugcggccuguauaagcacccuggggugcccgucaaauggaagagauga

SEQ ID NO: 1588 - RNA, 1476 nt, Artificial Sequence
  derived and/or modified protein sequence (opt5) from LASV(Lassa virus/H.sapiens-wt/NGA/2016/ISTH_0133;Clade II)__AVO03635__GPC
augggccagaucauuaccuucuuucaagaggugccccacgucaucgaagagguuaugaacauugugcugaucgcccucagccugcuugcugugcugaaggccauuuacaaugucgcgacaugcgggguguucggacucaucuccuuucugcuucuguguggcagaucuugcagcacgaccuauaaagggguuuacgaacuccagacacuggagcuggacauggcuaaccucaauaugaccaugccucuguccuguacaaagaacaauucucaucacuauaucauggugggaaacgaaaccggccuugagcugacacucaccaauacgagcauuaucaaccauaaauucugcaaucuguccgaugcccacaagaaaaaccuuuacgaccauucucugaugagcauuaucuccaccuuucaccucagcauuccgaauuucaaccaguaugaggccaugucuugugauuuuaaugggggaaagaucuccguccaguacaaccugagccacucuuaugcuguggacgccgcuaagcauugcggcacaauugccaauggcguucugcaaaccuucaugcggauggcguggggaggguccuacaucgcccucgauagcggcaaagggggaugggacuguaucaugacaucuuaccaguaucugauuauccagaacaccacgugggaagaucacugccaguuuucccgccccagcccuauuggcuaccuugggcugcucucccaaagaacacgggacaucuauauuucucgcagacugcuuggaaccuucacauggacccugagcgauuccgagggcaacgacgcucccggcggguacugucucacccgguggaugcugaucgaagccgagcugaagugcuuuggaaauacagcuaucgccaaauguaacgagaagcaugaugaagaguucugcgacaugcuccgccuguuugauuucaauagacaggcgauuaaacggcuuaagacggaagcccagaugagcauccagcugauuaacaaggcugugaaugcccucaucaacgaccaacugauuaugaaaaaucaccuucgcgacaucaugggcaucccuuauugcaacuacucuaaguauugguaccugaaucacaccauuacagggaaaaccucccuccccagauguuggcuggucagcaacggaucuuaccugaaugagacacauuucagcgaugacaucgaacagcaggcugauaacaugauuaccgagcuccugcaaaaggaguauauggaccggcagggcaaaacgccucuugggcugguggaucucuuuguguucuccacaucuuuuuaccugaucagcauuuuccugcaccuugucaagaucccgacccaucgccacauuguuggaaaacccugcccuaagccccauagacucaaucacaugggcaucuguuccugcggccuguauaagcacccuggggugcccgugaaauggaagcggcaguga

SEQ ID NO: 1589 - RNA, 1473 nt, Artificial Sequence
  derived and/or modified protein sequence (opt5) from LASV(Lassa virus/H.sapiens-wt/NGA/2016/ISTH_0141;Clade II)__AVO03649__GPC
augggccagaucauuaccuucuuucaagaggugccccacgucaucgaagagguuaugaacauugugcugaucacacucagccugcuugccauucugaaggggaucuacaauguggcuacgugcggacucuucggccuggucuccuuucuucugcucugugggagaucuugcagcaccaucuauaaaggaguguacgaacugcagacacuggagcucgacauggccucccugaacaugaccaugccucuuucuuguacaaagaauaacagccaucacuauauuaugguuggcaaugaaaccgggcuggagcucacacugaccaacacguccaucauuaaucauaaauucugcaaccuuucugaugcgcacaagaaaaaucuguacgaccaugcucucaugagcaucauuuccaccuuucaccugagcaucccgaacuucaaucaguaugaggccaugucuugugauuuuaacggaggcaagauuuccgugcaguacaaucugagccacacauaugccgucgacgcugccgaacauugcggcaccaucgcuaacggggugcuccaaacauucaugcggauggccuggggaggcucuuacaucgcgcuggauuccgggaagggaagcugggacuguauuaugaccucuuaccaguaucuuaucauucagaauacgacaugggaggaucacugccaguuuucccgccccagcccuaucggcuaccuggggcuccugucccaaagaacccgggacauuuauaucucucgcagacuucugggaacauucaccuggacccucagcgauuccgaaggcaacgagacacccggcggguacugucugacgcgguggaugcugaucgaggccgaacucaaaugcuuuggaaacaccgcuguugccaaguguaaugagaaacaugacgaagaguucugcgauaugcugcgccuuuuugacuucaacaagcaggcuauuagacggcugaaaacagaagcccagaugagcauccagcucauuaauaaggcggugaacgcccugaucaaugaucaacuuauuaugaagaaccaucugcgcgacaucaugggcaucccuuauugcaauuacucuaaauauugguaccucaaccacaccgucacagggaagaccucccugcccagauguuggcuggugagcaauggaucuuaccucaacgagacgcgguucagcgacgauauugagcagcaggcugacaauaugaucacagaacugcuucaaaaagaguauauugaucgccagggcaagaccccucuggggcucguggaccuguuugucuucuccaccucuuuuuaccugaucagcauuuuccuucaccucguuaaaaucccgacacacagacauauuaucggaaagcccugcccuaaaccccaccggcugaaccauaugggcaucuguuccugcggccuguauaagcacccugggauucccgugaaguggaaacgcuga

SEQ ID NO: 1590 - RNA, 1473 nt, Artificial Sequence
  derived and/or modified protein sequence (opt5) from LASV(Lassa virus/H.sapiens-wt/NGA/2016/ISTH_0146;Clade II)__AVO03633__GPC
augggccagaucauuaccuucuuucaagaggugccccacgucaucgaagagguuaugaacauugugcugaucgcccucagccugcuugcuauucugaaggggaucuacaauguggccacaugcggacucuucggccuggucuccuuucuucugcucugugggagaucuugcagcacgaccuauaaaggaguguacgaacugcagacacuggagcucgacauggcgucccugaacaugaccaugccucuuucuuguacaaagaauaacagccaucacuauaucaugguuggcaaugaaaccgggcuggagcucacacugaccaacacguccauuaucaaucauaaauucugcaaccuuucugaugcucacaagaaaaaucuguacgaccaugcccucaugagcauuaucuccaccuuucaccugagcauuccgaacuucaaucaguaugaggccaugucuugugauuuuaacggaggcaagaucuccgugcaguacaaucugagccacacauaugcugucgacgccgcuaaccauugcggcaccauugccaauggggugcuccaaacauucaugcggauggcguggggaggcucuuacaucgcccuggauuccgggaagggaagcugggacuguaucaugaccucuuaccaguaucuuauuauccagaacacgacaugggaagaucacugccaguuuucccgccccagcccuauuggcuaccuggggcuccugucccaaagaacccgggacaucuauauuucucgcagacuucugggaacauucaccuggacccucagcgauuccgagggcaacgaaacacccggcggguacugucugacgcgguggaugcugaucgaggcugagcucaaaugcuuuggaaauaccgccguugcuaaguguaacgaaaaacaugacgaggaguucugcgauaugcugcgccuuuuugacuucaauaagcaggccaucagacggcugaaaacagaagcgcagaugagcauucagcucaucaacaaggccgugaaugcucugauuaacgaucaacuuaucaugaagaaucaucugcgcgacauuaugggcaucccuuauugcaacuacucuaaauauugguaccucaaucacaccgucacagggaagaccucccugcccagauguuggcuggugagcaacggaucuuaccucaaugaaacgcacuucagcgacgauaucgagcagcaggccgacaacaugauuacagagcugcuucaaaaagaauauauggaucggcagggcaagaccccucuggggcucguggaccuguuugucuucuccaccucuuuuuaccugaucagcauuuuccuucaccucguuaaaaucccgacacaucgccacgugauuggaaagcccugcccuaaaccccauagacugaaucacaugggcaucuguuccugcggccuguauaagcacccuggggugcccgucaaguggaaacgguga

SEQ ID NO: 1591 - RNA, 1473 nt, Artificial Sequence
  derived and/or modified protein sequence (opt5) from LASV(Lassa virus/H.sapiens-wt/NGA/2016/ISTH_0187;Clade II)__AVO03549__GPC
augggccagaucgugaccuucuuucaagaggucccccacguuauugaagaggugaugaacaucgugcugauugcccucagcguccuggcuauccuuaaggggcuguacaauuucgccacaugcggacucauuggccuggugacguuucuucugcucuccgggagaucuuguagcaugguuuauaaaggaguguacgaacugcagacccuggagcucaacauggaaacacugaauaugaccaugccucuuuccugcacaaagaacaauucucaucacuauauccgggucggcaacgacaccgggcuggagcucacacugaccaauaacacgcuucugaaucauaaauucuguaaccucagcgaugcgcacaagaaaaaucuguacgaccaugcucugauguccaucauuucuaccuuucaccucagcaucccgaacuucaaucaguaugaggccauguccugcgauuuuaacggaggccgcauuacagugcaguacaaucugagccacucuuaugccguugacgcugccaaccauuguggcaccguggcuaacgggguccuucaaacauucaugagaauggccuggggaggcuccuacaucgcgcuggauagccggcacgggaauugggacugcauuaugaccucuuaccaguaucucaucauucagaacacgacaugggaagaucauugucaguuuucccgccccagcccuaucggauaccugggccuucugucucaaagaacccgggacaucuauauuucccgcagacuccuggggacauucaccuggacccugagcgauuccgagggaaaugaaacacccggcggcuacugccucacgcgguggaugcugaucgaggccgagcuuaaguguuuugggaacaccgcuguggccaagugcaaugaaaaacacgacgaggaguucugugauaugcugcgccucuuugacuucaacaagcaggcuauuagacggcugaaagccgaagcgcagaugucuauccagcuuauuaauaaggccgugaacgcucugaucaaugaucaacucaucaugaaaaaccaucugcgcgacauuaugggaaucccuuauugcaauuacagcaaguauugguaccugaaccacacauccaccggcaagacaagccuccccagaugcuggcuggucucuaauggguccuaccuuaacgaaacccacuucagcgacgauauugagcagcaggccgacaauaugaucacggagaugcugcaaaaagaauaucucgaucggcagggaaagacaccucugggccugguugacauuuuuguguucucuaccagcuuuuaccuuaucuccaucuuccuccaucugauuaaaaucccgacccaccgccauauuguggggaagcccuguccuaaaccccacagacugaaccacaugggaaucugcucuuguggccucuauaagcagccuggcguccccgugcgguggaaaagauga

SEQ ID NO: 1592 - RNA, 1473 nt, Artificial Sequence
  derived and/or modified protein sequence (opt5) from LASV(Lassa virus/H.sapiens-wt/NGA/2016/ISTH_0199;Clade II)__AVO03653__GPC
augggccagaucauuaccuucuuucaagaggugccccacgucaucgaagagguuaugaacauugugcugaucgcccucagccugcuugcuauucugaaggggaucuacaauguggccacaugcggacucuucggccuggucuccuuucuucugcucugugggagaucuugcagcacgaccuauaaaggaguguacgaacugcagacacuggagcucgacauggcgucccugaacaugaccaugccucuuucuuguacaaagaauaacagccaucacuauaucaugguuggcaaugaaaccgggcuggagcucacacugaccaacacguccauuaucaaucauaaauucugcaaccuuucugaugcucacaagaaaaaucuguacgaccaugcccucaugagcauuaucuccaccuuucaccugagcauuccgaacuucaaucaguaugaggccaugucuugugauuuuaacggaggcaagaucuccgugcaguacaaucugagccacacauaugcugucgacgccgcuaaccauugcggcaccauugccaauggggugcuccaaacauucaugcggauggcguggggaggcucuuacaucgcccuggauuccgggaagggaaacugggacuguaucaugaccagcuaccaguaucuuauuauccagaacacgacaugggaagaucacugccaguuuucucgccccuccccuauuggcuaccuggggcuccugagccaaagaacccgggacaucuauauuucccgcagacuucugggaacauucaccuggacccucucugauagcgagggcaaugaaacacccggcggguacugucugacgcgguggaugcugaucgaggcugagcucaaaugcuuuggaaacaccgccguugcuaaguguaaugaaaaacaugacgaggaguucugcgauaugcugcgccuuuuugacuucaacaagcaggccaucuccagacugaaaacagaagcgcagaugagcauucagcucaucaauaaggccgugaacgcucugauuaaugaucaacuuaucaugaagaaccaucugcgggacauuaugggcaucccuuauugcaauuacucuaaauauugguaccucaaccacaccgucacagggaagaccucccugccccgcuguuggcuggugagcaauggaucuuaccucaacgaaacgcacuucagcgacgauaucgagcagcaggccgacaauaugauuacagagaugcugcaaaaagaauauaucgauagacagggcaagaccccucuugggcugguggaccucuuugucuucuccaccucuuuuuaccugauuagcaucuuccugcaccuuguuaaaauuccgacacaucggcacgugaucggaaagcccugcccuaaaccccaucgccucaaccacaugggcauuuguuccugcggccuguauaagcacccuggggugcccgucaaguggaaaagauga

SEQ ID NO: 1593 - RNA, 1473 nt, Artificial Sequence
  derived and/or modified protein sequence (opt5) from LASV(Lassa virus/H.sapiens-wt/NGA/2016/ISTH_0419;Clade II)__AVO03539__GPC
augggccagaucgugaccuucuuucaagaggucccccacguuauugaagaggugaugaacaucgugcugauugcccucagccugcuugcuauccugaaggggauuuacaauuucgccacaugcggacucaucggccugaucacguuucuuuuccugugugggagauccugcucugcgauuuauaaaggaagcuaccagcuccagaccaucgaacugaacauggagacacugaauaugaccaugccucucuccuguacaaagaacucuagccaucacuauauucgggucggcaaugaaaccgggcuggagcuuacacugaccaacaucuccauuaucgaccauaaauuuugcaaucucucugaugcucacaagaaaaaccuguacgaccaugcccuuaugagcauuaucuccacguuccaccugagcaucccgaauuuuaaccaguaugaggccaugucuugugauuucaauggaggcaagauuuccgugcaauacaaccucagccacaccuaugcuguugacgccgcuaaucauugcggcacaguggccaacgggguccugcagaccuuuaugcgcauggcguggggaggcucuuacaucgcccuggauuccgggagaggaaauugggacuguauuaugacaagcuaccaguaucucaucauucagaacaccacgugggaagaucacugccaauucucucggcccuccccuaucggcuaccuggggcuucugagccagcgcacaagagacaucuauauuucccggcgccuccugggaaccuuuacauggacccuuucugauagcgagggcaaggaaacccccggcggguacugucugacaagauggaugcucaucgaggcugagcugaaaugcuucggaaacacggccguggcuaaguguaaugaaaaacaugacgaggaauuuugcgauaugcugcgccucuucgacuucaacaagcaggccauucagcggcugaaagcggaggcccaaauguccauccagcuuauuaauaaggcuguuaacgcccugaucaaugaucagcucaucaugaagaaccaccugagagacauuaugggcaucccuuauugcaauuacagcaaauauugguaccuuaaccacaccucuacagggcggaccucccugccccgcuguuggcucgugagcaauggaucuuaccugaacgaaacacauuuuagcgacgauauugagcaacaggcugacaauaugaucaccgagaugcugcagaaggaauauauugauagacagggcaaaacgccucucgggcuggucgaccuuuucguguuuuccacaucuuucuaccugaucagcauuuuucuccaccugaucaagaucccgacccaucggcacauugugggaaaauccugccccaagccucaucgccugaaccacaugggcaucuguagcugcggccuuuauaaacaacccggggucccuguuaaguggaagagauga

SEQ ID NO: 1594 - RNA, 1473 nt, Artificial Sequence
  derived and/or modified protein sequence (opt5) from LASV(Lassa virus/H.sapiens-wt/NGA/2016/ISTH_0447;Clade II)__AVO03559__GPC
augggccagaucauuaccuucuuucaagaggugccccacgucaucgaagagguuaugaacauugugcugaucgcccucagccugcuugcuauucugaaggggaucuacaauaucgccacaugcggacucuucggccugguguccuuucuucugcucugugggagaucuugcagcacgaccuauaaaggagucuacgaacugcagacacuggagcucgacauggcgucccugaacaugaccaugccucuuucuuguacaaagaauaacagccaucacuauauuauggugggcaaugaaaccgggcuggagcucacacugaccaacacguccaucauuaaucauaaauucugcaaccuuucugaugcucacaagaaaaaucuguacgaccauacccucaugagcaucauuuccacauuucaccugagcaucccgaacuucaaucaguaugaggccaugucuugugauuuuaacggaggcaagauuuccguucaguacaaucugagccacgccuaugcuguggacgccgcuaaccauugcggcaccaucgccaaugggguccuccaaacauucaugcggauggcguggggaggcucuuacaucgcccuggauuccgggaagggaaacugggacuguauuaugaccagcuaccaguaucuuaucauucagaacacgacaugggaagaucacugccaguuuucucgccccuccccuaucggcuaccuggggcuccugagccaaagaacccgggacauuuauaucucccgcagacuucugggaacauucaccuggacccucucugauagcgagggcaaugaaacacccggcggguacugucugacgcgguggaugcugaucgaggcugagcucaaaugcuuuggaaacaccgccguggcuaaguguaaugaaaaacaugacgaggaguucugcgauaugcugcgccuuuuugacuucaacaagcaggccauuagacggcugaaaacagaagcgcagauguccauccagcucauuaauaaggccguuaacgcucugaucaaugaucaacuuauuaugaagaaccaucugcgcgacaucaugggcaucccuuauugcaauuacagcaaauauugguaccucaaccacaccgugacagggaagaccucucugcccagauguuggcuggucuccaauggaagcuaccucaacgaaacgcacuucucugacgauauugagcagcaggccgacaauaugaucacagagcugcuucaaaaagaauauauugaucggcagggcaagaccccucuggggcucguggaccuguuuguguucagcaccuccuuuuaccugaucucuauuuuccuucaccucgucaaaaucccgacacaucgccacguugugggaaagcccugcccuaaaccccauagacugaaccacaugggcauuuguagcugcggccuguauaagcacccuggggugcccgucaaguggaaacgguga

SEQ ID NO: 1595 - RNA, 1473 nt, Artificial Sequence
  derived and/or modified protein sequence (opt5) from LASV(Lassa virus/H.sapiens-wt/NGA/2016/ISTH_0543;Clade II)__AVO03595__GPC
augggccagaucauuaccuucuuucaagaggugccccacgucaucgaagagguuaugaacauugugcugaucgcccucagccugcuugcuauucugaaggggaucuacaauaucgccacaugcggacucuucggccugauuuccuuucuucugcucugugggagaucuugcagcacgaccuauaaaggaguguacgaacugcagacacuggagcucgacauggcgaaccugaauaugaccaugccucuuuccuguacaaagaacaauucucaucacuauaucauggucggcaacgaaaccgggcuggagcucacacugaccaauacgagcauuaucaaccauaaauucugcaaucuuuccgaugcucacaagaaaaaccuguacgaccaugcccucaugucuauuaucagcaccuuucaccuguccauuccgaauuucaaccaguaugaggccaugagcugugauuuuaauggaggcaagaucucugugcaguacaaccugucccacagcuaugcuguugacgccgcuggccauugcgggacaaucgccaauggagugcuccaaaccuucaugcggauggcguggggcgggucuuacauugcccuggauuccggaaagggcaacugggacuguaucaugacaagcuaccaguaucuugucauucagaacaccacgugggaagaucacugccaguuuucucgccccuccccuaucggguaccugggacuccugagccaaagaacacgggacauuuauaucucccgcagacuucugggcaccuucacauggacccucucugauagcgagggcaaugaagcucccgggggauacugucugacccgguggaugcugaucgaggccgagcucaaaugcuuuggcaacacagcuauugccaaguguaaugaaaaacaugacgaggaguucugcgauaugcugcgccuuuuugacuucaacaagcaggcgaucagacggcugaaagccgaagcucagauguccauucagcucaucaauaaggccgugaacgcucugauuaaugaucaacuuaucaugaagaaccaucugcgcgacaucauggggauuccuuauugcaauuacagcaaauauugguaccucaaccacacgguuaccggaaagacaucucugcccaaauguuggcugguguccaauggcagcuaccucaacgaaacccacuucucugacgauaucgagcagcaggccgacaauaugauuacagagcugcuucaaaaggaauauauggauagacaggggaaaaccccucugggacucgucgaccuguuuguguucagcacguccuuuuaccugaucucuauuuuccuucaccucgugaagaucccgacacaucggcacauugucggccgccccugcccuaaaccccauagacugaaccacaugggcaucuguagcugcgggcuguauaagcacccuggaguucccgugaaguggaaacgguga

SEQ ID NO: 1596 - RNA, 1473 nt, Artificial Sequence
  derived and/or modified protein sequence (opt5) from LASV(Lassa virus/H.sapiens-wt/NGA/2016/ISTH_0565;Clade II)__AVO03637__GPC
augggccagaucgugaccuucuuucaagaggucccccacguuauugaagaggugaugaacaucgugcugauugcccucagccugcuugcuauccugaaggggauuuacaaugucgccacaugcggacucuucggccugaucuccuuucuucugcucugugggagaucuugcagcacgaccuauaaaggaguguacgaacugcagacacuggagcucgacauggcgaaccugaauaugaccaugccucuuuccuguacaaagaacucuagccaucacuauaucaugguuggcaaugaaaccgggcuggagcucacacugaccaacacguccauuaucaaucauaaauucugcaaccuuucugaugcucacaagaaaaaucuguacgaccaugcccucaugagcauuaucuccaccuuucaccugagcauuccgaacuucaaucaguaugaggccaugucuugugauuuuaacggaggcaagaucuccgugcaguacaaucugagccacacauaugcugucgacgccgcuaaccauugcggcaccauugccaauggggugcuccaaacauucaugcggauggcguggggaggcucuuacaucgcccuggauuccgggaagggaaacugggacuguaucaugaccagcuaccaguaucuuauuauccagaacacgacaugggaagaucacugccaguuuucucgccccuccccuauuggcuaccuggggcuccugagccaaagaacccgggacaucuauauuucccgcagacuucugggaacauucaccuggacccucucugauagcgagggcaaugaagcucccggcggguacugucugacacgguggaugcugaucgaggccgagcucaaaugcuuuggaaacacggcuaucgccaaguguaaugaaaaacaugacgaggaguucugcgauaugcugcgccuuuuugacuucaacaagcaggcgauuaaaagacugaaguccgaagcccagaugagcauccagcucauuaauaaggcuguuaacgcccugaucaaugaucaacuuauuaugaaaaaccaucugcgggacaucaugggcaucccuuauugcaauuacucucgcuauugguaccucaaccacaccgugacagggaagaccucccugcccagauguuggcugauuagcaauggaucuuaccucaacgaaacacacuucagcgacgauaucgagcagcaggcugacaauaugauuaccgagcugcuucaaaaagaauauauggaucggcagggcaagacgccucuggggcucgucgaccuguuuguguucuccacaucuuuuuaccugaucagcauuuuccuucaccucgugaaaaucccgacccaucgccacauugucggaagacccugcccuaagccccaucggcugaaccacaugggcaucuguuccugcggccuguauaaacacccugggguucccgugaaguggaagcgcuga

SEQ ID NO: 1597 - RNA, 1473 nt, Artificial Sequence
  derived and/or modified protein sequence (opt5) from LASV(Lassa virus/H.sapiens-wt/NGA/2016/ISTH_0572;Clade II)__AVO03611__GPC
augggccagaucauuaccuucuuucaagaggugccccacgucaucgaagagguuaugaacauugugcugaucgcccucagccugcuugcuauucugaaggggaucuacaauguggccacaugcggacucuucggccuggucgcguuucuucugcucugugggagauccugcucuacgaccuauaaaggaguguacgaacugcagacacuggagcucgacauggcuagccugaacaugaccaugccucuuuccuguacaaagaauaacucucaucacuauaucaugguuggcaaugaaaccgggcuggagcucacacugaccaacacgagcauuaucaaucauaaauucugcaaccuuuccgaugcccacaagaaaaaucuguacgaccaugcccucaugucuauuaucagcaccuuucaccuguccauuccgaacuucaaucagcacgaggcuaugagcugugauuuuaacggaggcaagaucucugugcaguauaaucugucccauacauacgccgucgacgcugccaaccacugcggcaccauugcgaauggggugcuccaaacauucaugcggauggccuggggaggcagcuauaucgcucuggauucugggaagggauccugggacuguaucaugaccagcuaccaguaccuuauuauccagaacacgacaugggaagaucauugccaguuuucucgccccuccccuauuggcuaucuggggcuccugagccaaagaacccgggacaucuacauuucccgcagacuucugggaacauucaccuggacccucucugauagcgagggcaacgaaacacccggcggguauugucugacgcgguggaugcugaucgaggccgagcucaaaugcuuuggaaauaccgcuguugccaaguguaacgaaaaacacgacgaggaguucugcgauaugcugcgccuuuuugacuucaauaagcaggcgaucagacggcugaaaacagaagcccagauguccauucagcucaucaacaaggcugugaaugcccugauuaacgaucaacuuaucaugaagaaucaucugcgcgacauuaugggcaucccuuacugcaacuauagcaaauacugguaucucaaucacaccgucacagggagaaccucucugccccgguguuggcugguguccaacggaagcuaccucaaugaaacgcacuucucugacgauaucgagcagcaggcugacaacaugauuacagagcugcuucaaaaggaauacauggaucgccagggcaaaaccccucuggggcucguggaccuguuugucuucagcaccuccuuuuaucugaucucuauuuuccuucaucucaucaagauuccgacacacagacauguuaucggaaaacccugcccuaagccccaccggcugaaucacaugggcauuuguagcugcggccuguacaaacauccuggggugcccgugaaguggaagcgcuga

SEQ ID NO: 1598 - RNA, 1473 nt, Artificial Sequence
  derived and/or modified protein sequence (opt5) from LASV(Lassa virus/H.sapiens-wt/NGA/2016/ISTH_0610;Clade II)__AVO03585__GPC
augggccagaucauuaccuucuuucaagaggugccccacgucaucgaagagguuaugaacauugugcugaucgcccucagccugcuugcuauucugaaggggguguacaaugucgccacaugcggacucuucggccugguguccuuucuucugcucugugggagaucuugcagcacgaccuauaaaggaguuuacgaacugcagacacuggagcucgacauggcgucccugaacaugaccaugccucuuucuuguacaaagaauaacagccaucacuauaucauggugggcaaugaaaccgggcuggagcucacacugaccaacacguccaucauuaaucauaaauucugcaaccuuucugaugcucacaagaaaaaucuguacgaccaugcccucaugagcaucauuuccaccuuucaccugagcaucccgaacuucaaucaguaugaggccaugucuugugauuuuaacggaggcaagauuuccguccaguacaaucugagccacacauaugcuguggacgccgcuaaccauugcggcaccaucgccaaugggguucuccaaacauucaugcggauggcguggggaggcucuuacauugcccuggauuccgggcgcggaagcugggacuguaucaugaccucuuaccaguaucuuaucauucagaacacgacaugggaagaucacugccaguuuuccagacccagcccuaucggcuaccuggggcuccugucccaacggacccgcgacauuuauaucucuagacggcuucugggaacauucaccuggacccucagcgauuccgagggcaacgaaacacccggcggguacugucugacgcgcuggaugcugauugaggcugagcucaagugcuuuggaaauaccgccguggcuaaauguaacgaaaagcaugacgaggaguucugcgauaugcugagacuuuuugacuucaauaaacaggccauccggcgccugaaggcggaagcccagaugagcauccagcucauuaacaaagcugucaaugcccugaucaacgaucaacuuauuaugaagaaucaccugagagacaucaugggcauuccuuauugcaacuacucuaaguauugguaccucaaucacacagugaccgggcggacaucccugccccgcuguuggcuggugagcaacggaucuuaccucaaugaaacccauuucagcgacgauaucgagcagcaggcugacaacaugaucacggagcugcuucaaaaagaauauauugauagacagggcaagacaccucuggggcucgucgaccuguuuguuuucuccaccucuuuuuaccugaucagcauuuuccuucaccucgugaaaaucccgacccaucggcacauuaucggaaagcccugcccuaaaccccaucgccugaaucacaugggcauuuguuccugcggccuguauaagcacccuggggugcccgucaaauggaagagauga

SEQ ID NO: 1599 - RNA, 1473 nt, Artificial Sequence
  derived and/or modified protein sequence (opt5) from LASV(Lassa virus/H.sapiens-wt/NGA/2016/ISTH_0621;Clade II)__AVO03543__GPC
augggccagaucgugaccuucuuucaagagauuccccacgucguugaagagaucaugaacauugugcugaucacacucagccugcuugccauucugaaggggcucuacaauuucgcuacgugcggacugaucggccuuaucaccuuucuguuccucugugggagauccugcucuacaauuuauaaaggaagcuaccagcugcaggcccuggaacucaacauggagacccugaauaugacaaugccucuuuccuguaccaagaacaauucucaucacuauauccgggugggcaacgaaacagggcuggagcucacccugacgaauaccagcauuaucgaccauaaauuuugcaaccuuuccgaugcgcacaagcgcaaucuguacgaccauacacucaugucuauuaucagcaccuuccaccuguccauuccgaacuuuaaucaguaugaggcuaugagcugugauuucaacggaggcaaaaucucuguccaauacaaucugucccacagcuaugccggcgacgccgcuagacauugcgggacaguggccaacggaguucuccagaccuuuaugcggauggcuuggggcgggucuuacaucgcccuggauuccggaaagggcaauugggacuguauuaugacgagcuaccaguaucuuaucauucagaacacaaccugggaaaaccacugccaauucucucgccccuccccuaucggguaccugggacuccugagccagagaacacgggauauuuauaucucccgcagacuucugggcaccuuuaccuggacacucucugacagcgagggcaaggaaacgcccgggggauacugucugacccgguggaugcugaucgaggcggagcucaaaugcuucggcaauacagccguggcuaaguguaacgaaaaacaugaugaggaauuuugcgacaugcugcgccuuuucgauuucaauaagcaggccauucagagacugaaaaccgaggcucaaauguccauccagcucauuaacaaggccgucaaugcgcugaucaacgaccagcuuauuaugaagaaucaucugcgggauaucauggggaucccuuauugcaacuacagcaaauauugguaccucaaucacacaaccacgggaaagacaucucugcccaaauguuggcugguguccaacggcagcuaccucaaugaaacccacuuuucugacgacauugagcaacaggccgauaacaugaucaccgagaugcugcagaaggaauauauugaccgccaggggaaaacaccucuuggacugguugaucucuucguguuuagcaccuccuucuaccugaucucuauuuuucugcaccuuaucaagauuccgacacauagacacaucgucggcaaaagcugccccaagccucaucggcucaaucacaugggcaucuguuccugcgggcuguauaagcaacccggagugcuggugaaauggaagcgcuga

SEQ ID NO: 1600 - RNA, 1473 nt, Artificial Sequence
  derived and/or modified protein sequence (opt5) from LASV(Lassa virus/H.sapiens-wt/NGA/2016/ISTH_0701;Clade II)__AVO03629__GPC
augggccagaucauuaccuucuuucaagaggugccccacgucaucgaagagguuaugaacauugugcugaucgcccucagccugcuugcuauucugaaggggaucuacaauguggccacaugcggacucuucggccuggucuccuuucuucugcucugugggagaucuugcagcacgaccuauaaaggaguguacgaacugcagacacuggagcucgacauggcgucccugaacaugaccaugccucuuucuuguacaaagaauaacagccaucacuauaucaugguuggcaaugaaaccgggcuggagcucacacugaccaacacguccauuaucggacauaaauucugcaaucuuucugaugcucacaagaaaaaccuguacgaccaugcccucaugagcauuaucuccaccuuucaccugagcauuccgaauuucaaccaguaugaggccaugucuugugauuuuaauggcggcaagaucuccgugcaguacaaccugagccacgcuuaugccgucgacgcugccaaucauugcgggacaauugcgaacggagugcuccaaaccuucaugcggauggccuggggcgggucuuacaucgcucuggauuccggaaagggcagcugggacuguaucaugacaucuuaccaguaucuuauuauccagaauaccacgugggaagaucacugccaguuuucccgccccagcccuauuggguaccugggacuccugucccaaagaacacgggacaucuauauuucucgcagacuucugggcaccuucacauggacccucagcgauuccgagggcaacgaaacccccgggggauacugucugacacgguggaugcugaucgaggccgagcucaaaugcuuuggcaacacggcuguugccaaguguaaugaaaaacaugacgaggaguucugcgauaugcugcgccuuuuugacuucaacaagcaggcgaucagacggcugaaaaccgaagcccagaugagcauucagcucaucaauaaggcugugaacgcccugauuaaugaucaacuuaucaugaagaaccaucugcgcgacauuauggggaucccuuauugcaauuacucuaaauauugguaccucaaccacacagucaccggaaagacaucccugcccagauguuggcuggugagcaauggcucuuaccucaacgaaacccacuucagcgacgauaucgagcagcaggcugacaauaugauuacggagcugcuucaaaaagaauauaucgaucggcaggggaagacaccucugggacucguggaccuguuugucuucuccaccucuuuuuaccugauuagcaucuuccuucaccucguuaaaauuccgacccaucgccacgugaucggcaagcccugcccuaaaccccauagacugaaccacaugggcauuuguuccugcgggcuguauaagcacccuggagugcccgucaaguggaaacgguga

SEQ ID NO: 1601 - RNA, 1473 nt, Artificial Sequence
  derived and/or modified protein sequence (opt5) from LASV(Lassa virus/H.sapiens-wt/NGA/2016/ISTH_0702;Clade II)__AVO03557__GPC
augggccagaucauuaccuucuuucaagaggugccccacgucaucgaagagguuaugaacauugugcugaucgcccucagccugcuugcugugcugaaggggauuuacaaugucgccacaugcggacucuucggccugguggcguuucuucugcucugugggagauccugcucuacgaccuauaaaggaguuuacgaacugcagacacuggagcucgacauggcuaaccugaauaugaccaugccucuuagcuguacaaagaacaauucccaucacuauaucauggugggcaacgaaaccgggcuggagcucacacugaccaauacgucuaucauuaaccauaaauucugcaaucuuagcgaugcccacaagaaaaaccuguacgaccaugcccucauguccaucauuucuaccuuucaccugagcaucccgaauuucaaccaguaugaggcuauguccugugauuuuaauggaggcaagauuagcguccaguacaaccugucucacacauaugccguggacgcugccaaucauugcggcaccaucgcgaacgggguucuccaaacauucaugcggauggccuggggaggcuccuacauugcucuggauagcgggaagggaucuugggacuguaucaugaccuccuaccaguaucuuaucauucagaacacgacaugggaagaucacugccaguuuagccgccccucuccuaucggcuaccuggggcuccugucccaaagaacccgggacauuuauaucagccgcagacuucugggaacauucaccuggacccucuccgauucugagggcaaugaaacacccggcggguacugucugacgcgguggaugcugauugaggccgagcucaaaugcuuuggaaacaccgcuguggccaaguguaaugaaaaacaugacgaggaguucugcgauaugcugcgccuuuuugacuucaacaagcaggcgaucagacggcugaaaacagaagcccagaugagcauccagcucauuaauaaggcugucaacgcccugaucaaugaucaacuuauuaugaagaaccaucugcgcgacaucaugggcauuccuuauugcaauuacuccaaauauugguaccucaaccacaccgugacagggagaaccagccugccccgguguuggcuggugucuaauggauccuaccucaacgaaacgcacuucagcgacgauaucgagcagcaggcugacaauaugaucacagagcugcuucaaaaggaauauauggaucgccagggcaaaaccccucuggggcucgucgaccuguuuguuuucucuaccagcuuuuaccugauuuccaucuuccuucaccucauuaagaucccgacacauagacacgugauuggaaaacccugcccuaagccccaucggcugaaccacaugggcaucuguucuugcggccuguauaaacacccuggggugcccgucaaguggaagcgcuga

SEQ ID NO: 1602 - RNA, 1473 nt, Artificial Sequence
  derived and/or modified protein sequence (opt5) from LASV(Lassa virus/H.sapiens-wt/NGA/2016/ISTH_0703;Clade II)__AVO03597__GPC
augggccagaucauuaccuucuuucaagaggugccccacgucaucgaagagguuaugaacauugugcugaucgcccucagccugcuugcuauucugaaggggaucuacaauguggccacaugcggacucuucggccuggucuccuuucuucugcucugugggagaucuugcagcacgaccuauaaaggaguguacgaacugcagacacuggagcucgacauggcgucccugaacaugaccaugccucuuucuuguacaaagaauaacagccaucacuauaucaugguuggcaaugaaaccgggcuggagcucacacugaccaacacguccauuaucaaucauaaauucugcaaccuuucugaugcucacaagaaaaaucuguacgaccaugcccucaugagcauuaucuccaccuuucaccugagcauuccgaacuucaaucaguaugaggccaugucuugugauuuuaacggaggcaagaucuccgugcaguacaaucugagccacacauaugcugucgacgccgcuucucauugcggcaccauugccaacggggugcuccaaacauucaugcggauggcguggggaggcuccuacaucgcccuggauagcgggaagggaucuugggacuguaucaugaccuccuaccaguaucuuauuauccagaauacgacaugggaagaucacugccaguuuagccgccccuccccuauuggcuaccuggggcuccugucucaaagaacccgggacaucuauauuagccgcagacuucugggaacauucaccuggacccucuccgauagcgagggcaacgaaacacccggcggguacugucugacgcgguggaugcugaucgaggcugagcucaaaugcuuuggaaacaccgccguugcuaaguguaaugaaaaacaugacgaggaguucugcgauaugcugcgccuuuuugacuucaacaagcaggccaucagacggcugaaaacagaagcgcagaugucuauucagcucaucaauaaggccgugaacgcucugauuaaugaucaacuuaucaugaagaaccaucugcgcgacauuaugggcaucccuuauugcaauuacuccaaauauugguaccucaaccacaccgucacagggagaaccagccugccccgguguuggcuggugucuaauggaagcuaccucaacgaaacgcacuucuccgacgauaucgagcagcaggccgacaauaugauuacagagcugcuucaaaaggaauauaucgagcgccagggcaaaaccccucuggggcucguggaucuguuugucuucucuaccagcuuuuaccugauuuccaucuuccuucaccucauuaagaucccgacacauagacacguuauuggaaaacccugcccuaagccccaucggcugaaccacaugggcaucuguagcugcggccuguauaaacacccuggggugcccgugaaguggaagcgcuga

SEQ ID NO: 1603 - RNA, 1473 nt, Artificial Sequence
  derived and/or modified protein sequence (opt5) from LASV(Lassa virus/H.sapiens-wt/NGA/2016/ISTH_0717;Clade II)__AVO03547__GPC
augggccagaucgugaccuucuuucaagaggucccccacguuauugaagaggugaugaacaucgugcugauugcccucagcauccuggcuauucuuaaggggcuguacaaugucgccacaugcggacucaucggccuggugacguuccuucugcucuccgggagaucuuguagcaugaucuauaaaggaguuuacgaacugcagacccuggagcucaacauggaaacacugaauaugaccaugccucuuuccugcacaaagaacaauucucaucacuauauuauggugggcaacgagaccgggcuggagcucacacugaccaauacgagccuucugaaccauaaauuuuguaaucucuccgacgcgcacaagaaaaaccuguacgaucauacccugaugucuaucauuagcacauuccaccucuccaucccgaauuuuaaccaguaugaagcuaugagcugcgacuucaauggaggcaagauuaccguccaguacaaccugucucacacauaugccguggaugccguuaaucauuguggcacccuugcuaacgggauccugcaaacguuuaugcggauggccuggggaggcuccuacauugcucucgacagccgccacgggucuugggauugcaucaugacauccuaccaguaucugaucauucagaacaccacaugggaggaccauugucaguucagcagacccucuccuaucggauaccuuggccugcucucccaacggacccgcgauauuuauaucagcagacggcugcuggggaccuuuacauggacgcucuccgacucugaaggaaaugagacccccggcggcuacugccugacacgcuggaugcuuauugaggccgaacugaaguguuucgggaacaccgcgguggccaaaugcaaugagaagcacgaugaagaguuuugugacaugcucagacuguucgauuuuaacaaacaggcuauccggcgccuuaaggccgaagcucagaugagcauccagcugauuaauaaagccgucaacgcgcucaucaaugaccaacugauuaugaagaaccaccugagagauaucaugggcauuccuuauugcaauuacuccaaguauugguaccucaaccauacaagcaccggacggacgucucugccccgcugcuggcuuguguccaaugggagcuaccugaacgagacacacuucucugacgacaucgagcagcaggccgauaauaugaucaccgaaaugcuccaaaaagaguaucuggacagacagggaaagaccccucugggccuuguggaucucuucgucuuuagcacauccuucuaccugauuucuaucuuucugcaucucauuaaaaucccgacccaccggcauauuguugggaagcccuguccuaaaccccaccgccugaaccacaugggaaucugcagcuguggccuuuauaagcagccuggcgugcccgugagauggaaacgguga

SEQ ID NO: 1604 - RNA, 1473 nt, Artificial Sequence
  derived and/or modified protein sequence (opt5) from LASV(Lassa virus/H.sapiens-wt/NGA/2016/ISTH_0753;Clade II)__AVO03609__GPC
augggccagaucauuaccuucuuucaagaggugccccacgucaucgaagagguuaugaacauugugcugaucgcccucagccugcuugcuauucugaaggggaucuacaauguggccacaugcggacucuucggccuggucuccuuucuucugcucugugggagaucuugcagcacgaccuauaaaggaguguacgaacugcagacacuggagcucgacauggcgucccugaacaugaccaugccucuuucuuguacaaagaauaacagccaucacuauaucaugguuggcaaugaaaccgggcuggagcucacacugaccaacacguccauuaucaaucauaaauucugcaaccuuucugaugcucacaagaaaaaucuguacgaccaugcccucaugagcauuaucuccaccuuucaccugagcauuccgaacuucaaucaguaugaggccaugucuugugauuuuaacggaggcaagaucuccgugcaguacaaucugagccacacauaugcugucgacgccgcuaaccauugcggcaccauugccaauggggugcuccaaacauucaugcggauggcguggggaggcucuuacaucgcccuggauuccgggaagggaaacugggacuguaucaugaccagcuaccaguaucuuauuauccagaacacgacaugggaagaucacugccaguuuucucgccccuccccuauuggcuaccuggggcuccugagccaaagaacccgggacaucuauauuucccgcagacuucugggaacauucaccuggacccucucugauagcgagggcaaugaaacacccggcggguacugucugacgcgguggaugcugaucgaggcugagcucaaaugcuuuggaaacaccgccguugcuaaguguaaugaaaaacaugacgaggaguucugcgauaugcugcgccuuuuugacuucaacaagcaggccaucuccagacugaaaacagaagcgcagaugagcauucagcucaucaauaaggccgugaacgcucugauuaaugaucaacuuaucaugaagaaccaucugcgggacauuaugggcaucccuuauugcaauuacucuaaauauugguaccucaaccacaccgucacagggcgcaccucccugcccagauguuggcuggugagcaauggaucuuaccucaacgaaacgcacuucagcgacgauaucgagcagcaggccgacaauaugauuacagagcugcuucaaaaggaauauauggaucggcagggcaaaaccccucuggggcucguggaccuguuugucuucuccaccucuuuuuaccugaucagcauuuuccuucaccucguuaagaucccgacacaucgccacgugauuggaaaacccugcccuaagccccauagacugaaccacaugggcaucuguuccugcggccuguauaaacacccuggggugcccgucaaguggaagcgguga

SEQ ID NO: 1605 - RNA, 1473 nt, Artificial Sequence
  derived and/or modified protein sequence (opt5) from LASV(Lassa virus/H.sapiens-wt/NGA/2016/ISTH_0759;Clade II)__AVO03593__GPC
augggccagaucauuaccuucuuucaagaggugccccacgucaucgaagagguuaugaacauugugcugaucgcccucagccugcuugcuauucugaaggggaucuacaauguggccacaugcggacucuucggccuggucuccuuucuucugcucugugggagaucuugcagcacgaccuauaaaggaguguacgaacugcagacacuggagcucgacauggcgucccugaacaugaccaugccucuuucuuguacaaagaauaacagccaucacuauaucaugguuggcaaugaaaccgggcuggagcucacacugaccaacacguccauuaucaaucauaaauucugcaaccuuucugaugcucacaagaaaaaucuguacgaccauacccucaugagcauuaucuccacauuucaccugagcauuccgaacuucaaucaguaugaggccaugucuugugauuuuaacggaggcaagaucuccgugcaguacaaucugagccacaccuaugccgucgacgcugccaaccauugcggcacaauugcuaauggggugcuccaaaccuucaugcggauggccuggggaggcucuuacaucgcgcuggauuccgggaagggaagcugggacuguaucaugacgucuuaccaguaucuuauuauccagaacacauccugggaagaucacugccaguuuagccgccccuccccuauuggcuaccuggggcuccugucucaaagaacccgggacaucuauauuagccgcagacuucugggaacauucaccuggacccucuccgauagcgagggcaacgaaacacccggcggguacugucugacgcgguggaugcugaucgaggccgagcucaaaugcuuuggaaauaccgcuguugccaaguguaacgaaaaacaugacgaggaguucugcgauaugcugcgccuuuuugacuucaauaagcaggcuaucagacggcugaaaacagaagcccagaugucuauucagcucaucaacaaggcggugaaugcccugauuaacgaucaacuuaucaugaagaaucaucugcgcgacauuaugggcaucccuuauugcaacuacuccaaauauugguaccucaaucacaccgucacagggaagaccagccugcccagauguuggcuggugucuaacggaagcuaccucaaugaaacgcacuucuccgacgauaucgagcagcaggcugacaacaugauuacagagcugcuucaaaaagaauauaucgaucggcagggcaagaccccucuggggcucguggaccuguuugucuucucuaccagcuuuuaccugauuuccaucuuccuucaccucguuaaaauuccgacacaucgccacgugaucggaaagcccugcccuaaaccccauagacugaaucacaugggcauuuguagcugcggccuguauaagcacccuggggugcccgucaaguggaaacgguga

SEQ ID NO: 1606 - RNA, 1473 nt, Artificial Sequence
  derived and/or modified protein sequence (opt5) from LASV(Lassa virus/H.sapiens-wt/NGA/2016/ISTH_0777;Clade II)__AVO03615__GPC
augggccagaucauuaccuucuuucaagaggugccccacgucaucgaagagguuaugaacauugugcugaucgcccucagccugcuugcuauucugaaggggaucuacaauguggccacaugcggacuccugggccuuaucuccuuccugcuccugugugggagaucuugcagcacgaccuauaaaggagucuacgaacugcagacacucgagcuggacauggcgaaccuuaauaugaccaugccucuguccuguacaaagaacucuagccaucacuauauuauggugggcaaugaaaccgggcucgagcugacacuuaccaacacguccaucauuaaucauaaauuuugcaaccugucugaugcucacaagaaaaaucucuacgaccaugcccugaugagcaucauuuccaccuuccaccugagcaucccgaacuuuaaucaguaugaggccaugucuugugauuucaacggaggcaagauuuccguucaguacaaucucagccacgcuuaugccguggacgcugccaaccauugcggcacaaucgcgaaugggguccugcaaaccuuuaugcggauggccuggggaggcucuuacaucgcucuugauuccgggaagggaaacugggacuguauuaugacaagcuaccaguaucugaucauucagaacaccacgugggaagaucacugccaguucucucgccccuccccuaucggcuaccucgggcugcuuagccaaagaacacgggacauuuauaucucccgcagacugcucggaaccuuuacauggacccugucugauagcgagggcaaugaagcccccggcggguacugucugacccgguggaugcucaucgaggcugagcugaaaugcuucggaaacacagccauugcgaaguguaaugaaaaacaugacgaggaauuuugcgauaugcuucgccuguucgacuuuaacaagcaggccaucagacggcucaaaacggaggcucagauguccauucagcugaucaauaaggccgugaacgcucuuauuaaugaucaacugaucaugaagaaccaccuccgcgacaucaugggcauuccuuauugcaauuacagcaaauauugguaccugaaccacaccguuacagggaagaccucucugcccagauguuggcucaucuccaauggaagcuaccugaacgaaacacauuucucugacgauauugagcagcaggccgacaauaugaucaccgagcuucugcaaaaagaauauauggaucggcagggcaagacgccucucgggcugguggaccuguucgucuuuagcacauccuucuaccuuauuucuaucuuucuccaccuggugaaaauuccgacccaucgccacaucgugggaaagcccugcccuaaaccccauagacugaaccacaugggcaucuguagcugcggccucuauaagcacccugggguccccguuaaguggaaacgguga

SEQ ID NO: 1607 - RNA, 1473 nt, Artificial Sequence
  derived and/or modified protein sequence (opt5) from LASV(Lassa virus/H.sapiens-wt/NGA/2016/ISTH_0779;Clade II)__AVO03655__GPC
augggccagaucauuaccuucuuucaagaggugccccacgucguugaagaggugaugaacgugguccugaucgcccucagccugcuugcuauucugaaggggaucuacaauauugccacaugcggacucuucggccugaucuccuuucuucugcucugugggagaucuugcagcacgaccuauaaaggaguguacgaacugcagacacuggagcucgacauggcgaaccugaauaugaccaugccucuuuccuguacaaagaacaauucucaucacuauaucaugguuggcaacgaaaccgggcuggagcucacacugaccaauacgagcauuaucaaccauaaauucugcaaucuuuccgaugcucacaagaaaaaccuguacgaccauacccucaugucuauuaucagcacauuucaccuguccauuccgaauuucaaccaguaugaggccaugagcugugauuuuaauggaggcaagaucucugugcaguacaaccugucccacggcuaugccgucgacgcugccaaucauugcgggaccauugcuaacggagugcuccaaacauucaugcggauggccuggggcgggagcuacaucgcgcuggauucuggaaagggcaacugggacuguaucaugaccuccuaccaguaucuuguuauucagaauacgacaugggaagaucacugccaguuuagccgccccucuccuaucggguaccugggacuccugucccaaagaacccgggacauuuauaucagccgcagacuucugggcacauucaccuggacccucuccgauucugagggcaacgacgcccccgggggauacugucugacacgguggaugcugauugaagcugagcucaaaugcuuuggcaauacggccaucgcuaaguguaacgagaaacaugaugaagaguucugcgacaugcugcgccuuuuugauuucaauagacaggccaucaagcggcugaaaaccgaagcgcagaugagcauucagcucaucaacaaggccgugaaugcucugauuaacgaccaacuuaucaugaagaaucaucugcgcgacauuauggggaucccuuauugcaacuacuccaaauauugguaccucaauaacacagucaccggaaagagcucucugcccaaauguuggcugguguccaauggcagcuaccucaacgagacacacuucucugaugacaucgaacagcaggccgauaauaugauuaccgagaugcugcaaaaggaguauaucgacagacaggggaaaacgccucuuggacugguggaucucuuugucuucagcacauccuuuuaccugauuucuaucuuccugcaccuuguucggauuccgacccaccgccauaucaccggcaagcccugcccuaaaccccacagacucaaccauaugggcauuuguagcugcgggcuguauaagcagccuggagugcccgugaaguggaaacgguga

SEQ ID NO: 1608 - RNA, 1473 nt, Artificial Sequence
  derived and/or modified protein sequence (opt5) from LASV(Lassa virus/H.sapiens-wt/NGA/2016/ISTH_0917;Clade II)__AVO03535__GPC
augggccagaucgugaccuucuuucaagaggucccccacguuauugaagagaucaugaacauugugcugaucacacucagccugcuugccauucugaaggggguguacaaucucgcuacgugcggacugaucggccuuaucaccuuccuguuucucugugggagauccugcucuaugacauauaaaggaaacuaccagcuggaaacccuggagcucaauauggaaaugcugaacaugacaaugccucuuagcuguaccaagaauaacucccaucacuauauucgggucggcaaugagacagggcuggagcucacccugacgaacaccucuaucauucagcauaaauucugcaaucuuagcgacgcccacaagcgcaaccuguacgaucauucccucaugucuaucgugagcacauuucaccuguccauuccgaauuucaaccaguaugaagcgaugagcugugacuuuaauggaggcaaaaucucuauucaauacaaccugucccacaccuaugcuggcgaugccgccaagcauugcgggacacucgcuaauggaauccugcagaccuucaugagaauggccuggggcgggagcuacaucgcucuugacucuggacggggcgggugggauuguauuaugacgaacuaccaguaucugaucauucagaacguuacaugggaggaccacugccaauuuucccgccccagcccuaucggauaccucggccugcuuucucagagaacccgggaaguguauauuucccgcagacugcucggcacauucaccuggacccugagcgauuccgaggggaaugaggcccccggaggcuacugucugacacgguggaugcucaucgaagcggagcugaagugcuuugggaacacggccgucgcuaaauguaaugaaaagcaugacgaggaguucugcgauaugcuucgccuguuugacuucaacaaacaggccaucagacggcucaaggcugaaacccagaugucuauucaacugaucaauaaagccgugaacgcgcuuauuaaugaucagcugaucaugaagaaccaccuccgcgacauuaugggaaucccuuauugcaauuacagcaaguauugguaccugaaccacacaaucaccggcagaacaucccugccccgguguuggcucguuagcaaugggucuuaccugaacgagacccauuucuccgaugacauugaacagcaagccgacaauaugaucacggagaugcuucagaaagaauauauugaucgccagggaaagacaccucugggccucguggaccuguuugucuucagcaccucuuuuuaccugaucagcauuuuccuucaccucgugaaaaucccgacccauagacacauugugggcaaguccugccccaaaccucaucggcugaaccacauggggaucuguucuugcggacuguauaagagacccggcgucagcguucgcuggaaacgguga

SEQ ID NO: 1609 - RNA, 1473 nt, Artificial Sequence
  derived and/or modified protein sequence (opt5) from LASV(Lassa virus/H.sapiens-wt/NGA/2016/ISTH_1006;Clade II)__AVO03643__GPC
augggccagaucauuaccuucuuucaagaggugccccacgucaucgaagagguuaugaacauugugcugaucgcccucagccugcuugcuauucugaaggggaucuacaauguggccacaugcggacucuucggccuggucgcguuucuucugcucugugggagauccugcucuacgaccuauaaaggaguguacgaacugcagacacuggagcucgacauggcuagccugaacaugaccaugccucuuuccuguacaaagaauaacucucaucacuauaucaugguuggcaaugaaaccgggcuggagcucacacugaccaacacgagcauuaucaaucauaaauucugcaaccuuuccgaugcccacaagaaaaaucuguacgaccaugcccucaugucuauuaucagcaccuuucaccuguccauuccgaacuucaaucaguaugaggcuaugggaugugauuuuaacggcggcaagaucagcgugcaguacaaucugucucacuccuaugccgucgacgcugccaaccauugcgggacaauugcgaauggagugcuccaaaccuucaugcggauggccuggggcgggagcuacaucgcucuggauucuggaaagggcuccugggacuguaucaugacaagcuaccaguaucuuauuauccagaacaccacgugggaagaucacugccaguuuucucgccccuccccuauuggguaccugggacuccugagccaaagaacacgggacaucuauauuucccgcagacuucugggcaccuucacauggacccucucugauagcgagggcaacgaaacccccgggggauacugucugacacgguggaugcugaucgaggccgagcucaaaugcuuuggcaauacggcuguugccaaguguaacgaaaaacaugacgaggaguucugcgauaugcugcgccuuuuugacuucaauaagcaggcgaucagacggcugaaaaccgaagcccagauguccauucagcucaucaacaaggcugugaaugcccugauuaacgaucaacuuaucaugaagaaucaucugcgcgacauuauggggaucccuuauugcaacuacagcaaauauugguaccucaaucacacagucaccggaagaacaucucugccccgguguuggcugguguccaacggcagcuaccucaaugaaacccacuucucugacgauaucgagcagcaggcugacaacaugauuacggagcugcuucaaaaggaauauauggaucgccaggggaaaacaccucugggacucguggaccuguuugucuucagcaccuccuuuuaccugaucucuauuuuccuucaccucaucaagauuccgacccauagacacguuaucggcaaacccugcccuaagccccaucggcugaaucacaugggcauuuguagcugcgggcuguauaaacacccuggagugcccgugaaguggaagcgcuga

SEQ ID NO: 1610 - RNA, 1473 nt, Artificial Sequence
  derived and/or modified protein sequence (opt5) from LASV(Lassa virus/H.sapiens-wt/NGA/2016/ISTH_1026;Clade II)__AVO03589__GPC
augggccagaucauuaccuucuuucaagaggugccccacgucaucgaagagguuaugaacauugugcugaucgcccucagccugcuugcuauucugaaggggaucuacaauguggccacaugcggacucuucggccuggucuccuuucuucugcucugugggagaucuugcagcacgaccuauaaaggaguguacgaacugcagacacuggagcucgacauggcgucccugaacaugaccaugccucuuucuuguacaaagaauaacagccaucacuauaucaugguuggcaaugaaaccgggcuggagcucacacugaccaacacguccauuaucaaucauaaauucugcaaccuuucugaugcucacaagaaaaaucuguacgaccaugcccucaugagcauuaucuccaccuuucaccugagcauuccgaacuucaaucaguaugaggccaugucuugugauuuuaacggaggcaagaucuccgugcaguacaaucugagccacgcuuaugccauugacgcugccucucauugcggcacaaucgcgaacgggguccuccaaaccuucaugcggauggccuggggaggcuccuacaucgcucuggauagcgggaagggaucuugggacuguauuaugacauccuaccaguaucuuaucauucagaauaccacgugggaagaucacugccaguuuagccgccccuccccuaucggcuaccuggggcuccugucucaaagaacacgggacauuuauaucagccgcagacuucugggaaccuucacauggacccucuccgauagcgagggcaacgaaacccccggcggguacugucugacacgguggaugcugaucgaggccgagcucaaaugcuuuggaaacacggcuguggccaaguguaaugaaaaacaugacgaggaguucugcgauaugcugcgccuuuuugacuucaacaagcaggcgauuagacggcugaaaaccgaagcccagaugucuauccagcucauuaauaaggcuguuaacgcccugaucaaugaucaacuuauuaugaagaaccaucugcgcgacaucaugggcaucccuuauugcaauuacuccaaauauugguaccucaaccacacagugaccgggaagacaagccugcccagauguuggcuggucucuaauggaagcuaccucaacgaaacccacuucuccgacgauauugagcagcaggcugacaauaugaucacggagcugcuucaaaaagaauaucuggaucggcagggcaagacaccucucgggcugguggaccuguuuguguucucuaccagcuuuuaccuuauuuccaucuuccuccaccuggucaaaauuccgacccaucgccacguuaucggaagacccugcccuaagccccaucggcugaaccacaugggcauuuguagcugcggccucuauaaacacccuggggugcccgugaaguggaagcgcuga

SEQ ID NO: 1611 - RNA, 1473 nt, Artificial Sequence
  derived and/or modified protein sequence (opt5) from LASV(Lassa virus/H.sapiens-wt/NGA/2016/ISTH_1070;Clade II)__AVO03651__GPC
augggccagaucauuaccuucuuucaagaggugccccacgucaucgaagagguuaugaacauugugcugaucgcccucagccugcuugcuauucugaaggggaucuacaauguggccacaugcggacucuucggccuggucuccuuucuucugcucugugggagaucuugcagcacgaccuauaaaggaguguacgaacugcagacacuggagcucgacauggcgucccugaacaugaccaugccucuuucuuguacaaagaauaacagccaucacuauaucaugguuggcaaugaaaccgggcuggagcucacacugaccaacacguccauuaucaaucauaaauucugcaaccuuucugaugcucacaagaaaaaucuguacgaccaugcccucaugagcauuaucuccaccuuucaccugagcauuccgaacuucaaucaguaugaggccaugucuugugauuuuaacggaggcaagaucuccgugcaguacaaucugagccacacauucgcugucgacgccgcuaaccauugcggcaccauugccaauggggugcuccaaacauuuaugcggauggcguggggaggcucuuauaucgcccuggauuccgggaagggaagcugggacuguaucaugaccucuuaccaguaccuuauuauccagaacacgacaugggaagaucacugccaguucucccgccccagcccuauuggcuaucuggggcuccugucccaaagaacccgggacaucuacauuucucgcagacuucugggaacauuuaccuggacccucagcgauuccgagggcaacgaaacacccggcggguauugucugacgcgguggaugcugaucgaggcugagcucaaaugcuucggaaauaccgccguugcuaaguguaacgaaaaacaugacgaggaauuuugcgauaugcugcgccuuuucgacuucaauaagcaggccaucagacggcugaaaacagaggcgcagaugagcauucagcucaucaacaaggccgugaaugcucugauuaacgaucaacuuaucaugaagaaucaucugcgcgacauuaugggcaucccuuacugcaacuauucuaaauacugguaucucaaucacaccgucacagggaagaccucccugcccagauguuggcuggugagcaacggaucuuaccucaaugaaacgcacuuuagcgacgauaucgagcagcaggccgacaacaugauuacagagcugcuucaaaaagaauacauggaucggcagggcaagaccccucuggggcucguggaccuguucgucuuuuccaccucuuucuaucugaucagcauuuuucuucaccucguuaaaaucccgacacaucgccacauuaucggaaagcccugcccuaaaccccauagacugaaucacaugggcauuuguuccugcggccuguacaagcacccuggggugcccgugaaguggaaacgguga

SEQ ID NO: 1612 - RNA, 1473 nt, Artificial Sequence
  derived and/or modified protein sequence (opt5) from LASV(Lassa virus/H.sapiens-wt/NGA/2016/ISTH_1123;Clade II)__AVO03645__GPC
augggccagaucauuaccuucuuucaagaggugccccacgucaucgaagagguuaugaacauugugcugaucgcccucagccugcuugcuauucugaaggggaucuacaauguggccacaugcggacucuucggccuggucuccuuucuucugcucugugggagaucuugcagcacgaccuauaaaggaguguacgaacugcagacacuggagcucgacaugggcucccugaacaugaccaugccucuuucuuguacaaagaauaacagccaucacuauaucaugguugggaaugaaaccggacuggagcucacacugaccaacacguccauuaucaaucauaaauucugcaaccuuucugaugcgcacaagaaaaaucuguacgaccaugcucucaugagcauuaucuccaccuuucaccugagcauuccgaacuucaaucaguaugaggccaugucuugugauuuuaacggcggcaagaucuccgugcaguacaaucugagccacgccuaugcugucgacgccgcuaaccauugcgggacaauugccaauggagugcuccaaaccuucaugcggauggcguggggcgggucuuacaucgcccuggauuccggaaagggcagcugggacuguaucaugacaucuuaccaguaucuuauuauccagaacaccuccugggaagaucacugccaguuuagccgccccuccccuauuggguaccugggacuccugucucaaagaacgcgggacaucuauauuagccgcagacuucugggcacauucaccuggacacucuccgauagcgagggcaacgaaacccccgggggauacugucugacccgguggaugcugaucgaggcugagcucaaaugcuuuggcaauacagccguugcuaaguguaacgaaaaacaugacgaggaguucugcgauaugcugcgccuuuuugacuucaauaagcaggccaucagacggcugaaaacggaagcgcagaugucuauucagcucaucaacaaggccgugaaugcucugauuaacgaucaacuuaucaugaagaaucaucugcgcgacauuauggggaucccuuauugcaacuacuccaaauauugguaccucaaucacaccgucacaggaaagaccagccugcccagauguuggcuggugucuaacggcagcuaccucaaugaaacacacuucuccgacgauaucgagcagcaggccgacaacaugauuaccgagcugcuucaaaaagaauauaucgaucggcaggggaagacgccucugggacucguggaccuguuugucuucucuaccagcuuuuaccugauuuccaucuuccuucaccucguuaaaauuccgacacaucgccacgugaucggcaagcccugcccuaaaccccauagacugaaucacaugggcauuuguagcugcgggcuguauaagcacccuggagugcccgucaaguggaaacgguga

SEQ ID NO: 1613 - RNA, 1473 nt, Artificial Sequence
  derived and/or modified protein sequence (opt5) from LASV(Lassa virus/H.sapiens-wt/NGA/2016/ISTH_1150;Clade II)__AVO03627__GPC
augggccaggugaucaccuucuuucaagagauuccccacgucaucgaagagguuaugaacauugugcugaucacacucagccugcuugccauucugaaggggaucuacaauguggcuacgugcggacucuucggccugaucuccuuucuucugcucugugggagaucuugcagcaccacauauaaaggagucuacgaacugcagacccuggagcucgacauggccaaccugaauaugacaaugccucuuuccuguaccaagaacucuagccaucacuauauuauggugggcaaugaaacagggcuggagcucacccugacgaacaccuccaucauuaaucauaaauucugcaaccuuucugaugcgcacaagaaaaaucuguacgaccaugcucucaugagcaucauuuccacauuucaccugagcaucccgaacuucaaucaguaugaggccaugucuugugauuuuaacggaggcaagauuuccguucaguacaaucugagccacgccuaugcuguggacgccgcuaaccauugcggcaccaucgccaaugggguccuccaaacauucaugcggauggcguggggaggcucuuacaucgcccuggauuccgggaagggaaacugggacuguauuaugaccagcuaccaguaucuuaucauucagaacacgacaugggaagaucacugccaguuuucucgccccuccccuaucggcuaccuggggcuccugagccaaagaacccgggacauuuauaucucccgcagacuucugggaacauucaccuggacccucucugauagcgagggcaaugaagcucccggcggguacugucugacacgguggaugcugaucgaggccgagcucaaaugcuuuggaaacacggcuauugccaaguguaaugaaaaacaugacgaggaguucugcgauaugcugcgccuuuuugacuucaacaagcaggcgaucagacggcugaaaaccgaagcccagaaguccauucagcucaucaauaaggcugugaacgcccugauuaaugaucaacuuaucaugaaaaaccaucugcgcgacaucaugggcauuccuuauugcaauuacagcaaguauugguaccucaaccacacaguuaccgggaaaacaucucugcccaaguguuggcugaucuccaauggaagcuaccucaacgaaacccacuucucugacgauauugagcagcaggcugacaauaugaucacggagcugcuucaaaaagaauauauggauagacagggcaagacaccucuggggcucguggaccuguuugucuucagcaccuccuuuuaccugauuucuaucuuccuucaccucgugaaaauuccgacccaucggcacaucgugggacgccccugcccuaagccccauagacugaaccacaugggcaucuguagcugcggccuguauaagcacccugggguccccguuaaauggaagcgguga

SEQ ID NO: 1614 - RNA, 1473 nt, Artificial Sequence
  derived and/or modified protein sequence (opt5) from LASV(Lassa virus/H.sapiens-wt/NGA/2016/ISTH_1174;Clade II)__AVO03555__GPC
augggccagaucauuaccuucuuucaagaggugccccacgucaucgaagagguuaugaacauugugcugaucgcccucagccugcuugcuauucugaaggggaucuacaauguggccacaugcggauucuuuggccucgucuccuuccugcuucugugugggagaucuugcagcacgaucuauaaaggaguguacgaacuccagacccuggagcuggacauggcgucccucaacaugacaaugccucugucuuguaccaagaauaacagccaucacuauauuaugguuggcaaugaaacagggcuugagcugacccucacaaacaccuccaucauuaaucauaaauuuugcaaccugucugaugcucacaagaaaaaucuuuacgaccaugcccugaugagcaucauuuccacguuccaccucagcaucccgcacuuuaaccaguaugaggccaugucuugugauuucaauggaggcaagauuuccgugcaguacaaccugagccauaccuaugcugucgacgccgcuaaucacugcggcacaaucgccaacggggugcugcaaaccuuuaugcggauggcguggggaggcucuuacaucgcccucgauuccgggaagggaagcugggacuguauuaugacaucuuaccaguaucugaucauucagaauaccacgugggaagaucauugccaguucucccgccccagcccuaucggcuaccuugggcugcucucccaaagaacacgggacauuuauaucucucgcagacugcuuggaaccuuuacauggacccugagcgauuccgagggcaacgaaacccccggcggguacugucucacacgguggaugcugaucgaggcugagcugaaaugcuucggaaacacggccguugcuaaguguaaugaaaaacacgacgaggaauuuugcgauaugcuccgccuguucgacuucaacaagcaggccauuagaaaacuuaagaccgaggcgcagaugagcauccagcugauuaauaaggccgugaacgcucucaucaaugaucaacugauuaugaaaaaccaccuucgggacaucaugggcaucccuuauugcaauuacucuaaguauugguaccugaaccauacagucaccgggaaaacaucccucccccgcuguuggcuggugagcaauggaucuuaccugaacgaaacccacuuuagcgacgauauugagcagcaggccgacaauaugaucacggagcuccugcaaaaggaauauauggauagacagggcaaaacaccucuugggcugguggaccucuucgucuuuuccaccucuuucuaccugauuagcaucuuucugcaucuuguuaagauuccgacccaccggcaugugaucggaaaacccugcccuaagccccaccgccucaaccacaugggcauuuguuccugcggccuguauaagcauccuggggugcccgucaaauggaagagauga

SEQ ID NO: 1615 - RNA, 1473 nt, Artificial Sequence
  derived and/or modified protein sequence (opt5) from LASV(Lassa virus/H.sapiens-wt/NGA/2016/ISTH_1207;Clade II)__AVO03599__GPC
augggccagaucauuaccuucuuucaagaggugccccacgucaucgaagagguuaugaacauugugcugaucgcccucagccugcuugcuauucugaaggggaucuacaauguggccacaugcggacucuucggccuggucuccuuucuucugcucugugggagaucuugcagcacgaccuauaaaggaguguacgaacugcagacacuggagcucgacaugaccucccugaacaugacaaugccucuuucuuguaccaagaauaacagccaucacuauaucaugguuggcaaugaaacagggcuggagcucacccugacgaacaccuccauuaucaaucauaaauucugcaaccuuucugaugcgcacaagaaaaaucuguacgaccaugcucucaugagcauuaucuccacauuucaccugagcauuccgaacuucaaucaguaugaggccaugucuugugauuuuaacggaggcaagaucuccgugcaguacaaucugagccacaccuaugccgucgacgcugccaaccauugcggcacaauugcuaauggggugcuccaaaccuucaugcggauggccuggggaggcucuuacaucgcgcuggauuccgggaagggaagcugggacuguaucaugacgucuuaccaguaucuuauuauccagaacacaaccugggaagaucacugccaguuuucccgccccagcccuauuggcuaccuggggcuccugucccaaagaacacgggacaucuauauuucucgcagacuucugggaaccuucaccuggacacucagcgauuccgagggcaacgacacgcccggcggguacugucugacccgguggaugcugaucgaagccgagcucaaaugcuuuggaaauacagcuguugccaaguguaacgagaaacaugaugaagaguucugcgacaugcugcgccuuuuugauuucaauaagcaggcuaucagacggcugaaaaccgaagcccagaugagcauucagcucaucaacaaggcggugaaugcccugauuaacgaccaacuuaucaugaagaaucaucugcgcgacauuaugggcaucccuuauugcaacuacucuaaauauugguaccucaaucacacagucaccgggaagacgucccugcccagauguuggcuggugagcaacggaucuuaccucaaugagacacacuucagcgaugacaucgaacagcaggcugauaacaugauuaccgagcugcuucaaaaagaguauaucgaccggcagggcaagaccccucuggggcucguggaucuguuugucuucuccacaucuuuuuaccugauuagcaucuuccuucaccucguuaaaauuccgacccaucgccacgugaucggaaagcccugcccuaaaccccauagacugaaucacaugggcauuuguuccugcggccuguauaagcacccuggggugcccgucaaguggaaacgguga

SEQ ID NO: 1616 - RNA, 1473 nt, Artificial Sequence
  derived and/or modified protein sequence (opt5) from LASV(Lassa virus/H.sapiens-wt/NGA/2016/ISTH_1306;Clade II)__AVO03623__GPC
augggccagaucauuaccuucuuucaagaggugccccacgucaucgaagagguuaugaacauugugcugaucgcccucagccugcuugcuauucugaaggggaucuacaauguggccacaugcggacucuucggccuggucuccuuucuucugcucugugggagaucuugcagcacgaccuauaaaggaguguacgaacugcagacacuggagcucgacauggcgucccugaacaugaccaugccucuuucuuguacaaagaauaacagccaucacuauaucaugguuggcaaugaaaccgggcuggagcucacacugaccaacacguccauuaucaaucauaaauucugcaaccuuucugaugcucacaagaaaaaucuguacgaccaugcccucaugagcauuaucuccaccuuucaccugagcauuccgaacuucaaucaguaugaggccaugucuugugauuuuaacggaggcaagaucuccgugcaguacaaucugagccacacauaugcugucgacgccgcuaaccauugcggcaccguggccaaugggguucuccaaacauucaugcggauggcguggggaggcucuuacauugcccuggauuccgggaagggaagcugggacuguaucaugaccucuuaccaguaucuuaucauucagaacacgacaugggaagaucacugccaguuuucccgccccagcccuaucggcuaccuggggcuccugucccaaagaacccgggacauuuauaucucucgcagacuucugggaacauucaccuggacccucagcgauuccgagggcaacgaaacacccggcggguacugucugacgcgguggaugcugauugaggcugagcucaaaugcuuuggaaauaccgccguggcuaaguguaacgaaaaacaugacgaggaguucugcgauaugcugcgccuuuuugacuucaauaagcaggccaucagacggcugaaaacagaagcgcagaugagcauccagcucauuaacaaggccgucaaugcucugaucaacgaucaacuuauuaugaagaaucaucugcgcgacaucaugggcauuccuuauugcaacuacucuaaauauugguaccucaaucacaccgugacagggagaaccucccugccccgguguuggcuggugagcaacggaucuuaccucaaugaaacgcacuucagcgacgauaucgagcagcaggccgacaacaugaucacagagcugcuucaaaaggaauauauugaucgccagggcaaaaccccucuggggcucgucgaccuguuuguuuucuccaccucuuuuuaccugaucagcauuuuccuucaccucgugaagaucccgacacauagacacgugauuggaaaacccugcccuaagccccaucggcugaaucacaugggcaucuguuccugcggccuguauaaacacccugggguccccgugaaguggaagcgcuga

SEQ ID NO: 1617 - RNA, 1473 nt, Artificial Sequence
  derived and/or modified protein sequence (opt5) from LASV(Lassa virus/H.sapiens-wt/NGA/2016/ISTH_1311;Clade II)__AVO03575__GPC
augggccagaucgugaccuucuuucaagaggucccccacguuauugaagaggugaugaacaucgugcugauugcccucagccugcuugcuauccugaaggggauuuacaaugucgccacaugcggacucuucggccugaucuccuuucuucugcucugugggagaucuugcagcacgaccuauaaaggaguguacgaacugcagacacuggagcucgacauggcgaaccugaauaugaccaugccucuuuccuguacaaagaacaauucucaucacuauaucaugguuggcaacgaaaccgggcuggagcucacacugaccaauacgagcauuaucaaccauaaauucugcaaucuuuccgaugcucacaagaaaaaccuguacgaccaugcccucaugucuauuaucagcaccuuucaccuguccauuccgaauuucaaccaguaugaggccaugagcugugauuuuaauggaggcaagaucucugugcaguacaaccugucccacgcuuaugccggcgacgcugccagccauugcgggacaauugcgaauggaguccuccaaaccuucaugcggauggccuggggcgggucuuacaucgcucuggauuccggaaagggcaacugggacuguaucaugacaagcuaccaguaucuuauuauccagaacaccacgugggaagaucacugccaguuuucucgccccuccccuauuggguaccugggacuccugagccaaagaacacgggacaucuauauuucccgcagacuucugggcaccuucacauggacccucucugauagcgagggcaaugacgcccccgggggauacugucugacccgguggaugcugaucgaagcugagcucaaaugcuuuggcaacacagccaucgcgaaguguaaugagaaacaugaugaagaguucugcgacaugcugcgccuuuuugauuucaacaagcaggccauuaaaagacugaagacggaagcucagauguccauccagcucauuaauaaggccgugaacgcucugaucaaugaccaacuuauuaugaaaaaccaucugcgggacaucauggggaucccuuauugcaauuacagcaaguauugguaccucaaccacaccacaaccggaaaaacaucucugcccaaguguuggcugauuuccaauggcagcuaccucaacgagacccacuucucugaugacaucgaacagcaggccgauaauaugauuacggagcugcuucaaaaagaguaucuggaccgccaggggaagacaccucucggacugguugaucuguuuguguucagcaccuccuuuuaccuuaucucuauuuuccuccaccugaucaaaauuccgacccauagacacaucgucggccggcccugcccuaagccccaucgccugaaccacaugggcaucuguagcugcgggcucuauaagcacccuggagugcccgugaaauggaagagauga

SEQ ID NO: 1618 - RNA, 1473 nt, Artificial Sequence
  derived and/or modified protein sequence (opt5) from LASV(Lassa virus/H.sapiens-wt/NGA/2016/ISTH_1423;Clade II)__AVO03577__GPC
augggccagaucgugaccuucuuucaagaggucccccacguuauugaagaggugaugaacaucgugcugauugcccucagccugcuugcuauccugaaggggauuuacaaugucgccacaugcggacucuucggccugguguccuuucuucugcucugugggagaucuugcagcacgaccuauaaaggaguuuacgaacugcagacacuggagcucgacauggcgaaccugaauaugaccaugccucuuuccuguacaaagaacaauucucaucacuauaucauggugggcaacgaaaccgggcuggagcucacacugaccaauacgagcaucauuaaccauaaauucugcaaucuuuccgaugcucacaagaaaaaccuguacgaccaugcccucaugucuaucauuagcaccuuucaccuguccaucccgaauuucaaccaguaugaggccaugagcugugauuuuaauggaggcaagauuucuguccaguacaaccugucccacagcuaugcuguggacgccgcuaaucauugcggcacaguugccaacggggugcuccaaaccuucaugcggauggcguggggaggcucuuacaucgcccuggauuccgggaagggaagcugggacuguauuaugacaucuuaccaguaucuuaucauccagaacauuaccugggaagaucacugccaguuuucccgccccagcccuaucggcuaccuggggcuccugucccaaagaacgcgggacauuuauaucucucgcagacuucugggaacauucaccuggacacucagcgauuccgagggcaaagaaacccccggcggguacugucugacccgguggaugcugauugaggcugagcucaagugcuuuggaaauacagccgucgcuaaauguaacgaaaagcaugacgaggaguucugcgauaugcugcgccuuuuugacuucaauaaacaggccaucagacggcugaagacggaagcgcagaugagcauccagcucauuaacaaggccgugaaugcucugaucaacgaucaacuuauuaugaaaaaucaucugcgcgacaucaugggcauuccuuauugcaacuacucuaaguauugguaccucaaucacaccgugacagggaaaaccucccugcccagauguuggcuggucagcaacggaucuuaccucaaugaaacacacuucagcgacgauaucgagcagcaggccgacaacaugaucaccgagcugcuucaaaaggaauauauugaucggcagggcaaaacgccucuggggcucguugaccuguuuguguucuccacaucuuuuuaccugaucagcauuuuccuucaccucgugaagaucccgacccaucgccacauucugggaaaacccugcccuaagccccauagacugaaucacaugggcaucuguuccugcggccucuauaagcacccugggguccccgugaaauggaagcgguga

SEQ ID NO: 1619 - RNA, 1473 nt, Artificial Sequence
  derived and/or modified protein sequence (opt5) from LASV(Lassa virus/H.sapiens-wt/NGA/2016/ISTH_1462;Clade II)__AVO03587__GPC
augggccagaucauuaccuucuuucaagaggugccccacgucaucgaagagguuaugaacauugugcugaucgcccucagccugcuugcuauucugaaggggaucuacaauguggccacaugcggacucuucggccuggucuccuuucuucugcucugugggagaucuugcagcacgaccuauaaaggaguguacgaacugcagacacuggagcucgacauggcgucccugaacaugaccaugccucuuucuuguacaaagaauaacagccaucacuauaucaugguuggcaaugaaaccgggcuggagcucacacugaccaacacguccauuaucaaucauaaauucugcaaccuuucugaugcucacaagaaaaaucuguacgaccaugcccucaugagcauuaucuccaccuuucaccugagcauuccgaacuucaaucaguaugaggccaugucuugugauuuuaacggaggcaagaucuccgugcaguacaaucugagccacacauaugcugucgacgccgcuaaccauugcggcaccauugccaauggggugcuccaaacauucaugcggauggcguggggaggcucuuacaucgcccuggauuccgggaagggaagcugggacuguaucaugaccucuuaccaguaucuuauuauccagaacacgacaugggaagaucacugccaguuuucccgccccagcccuauuggcuaccuggggcuccugucccaaagaacccgggacaucuauauuucucgcagacuucugggaacauucaccuggacccucagcgauuccgagggcaacgaaacacccggcggguacugucugacgcgguggaugcugaucgaggcugagcucaaaugcuuuggaaauaccgccguugcuaaguguaacgaaaaacaugacgaggaguucugcgauaugcugcgccuuuuugacuucaauaagcaggccaucagacggcugaaaacagaagcgcagaugagcauucagcucaucaacaaggccgugaaugcucugauuaacgaucaacuuaucaugaagaaucaucugcgcgacauuaugggcaucccuuauugcaacuacucuaaauauugguaccucaaucacaccgucacagggagaaccucccugccccgguguuggcuggugagcaacggaucuuaccucaaugaaacgcacuucagcgacgauaucgagcagcaggccgacaacaugauuacagagcugcuucaaaaggaauauaucgagcgccagggcaaaaccccucuggggcucguggaucuguuugucuucuccaccucuuuuuaccugauuagcaucuuccuucaccucauuaagaucccgacacauagacacguuauuggaaaacccugcccuaagccccaucggcugaaucacaugggcaucuguuccugcggccuguauaaacacccuggggugcccgugaaguggaagcgcuga

SEQ ID NO: 1620 - RNA, 1473 nt, Artificial Sequence
  derived and/or modified protein sequence (opt5) from LASV(Lassa virus/H.sapiens-wt/NGA/2016/ISTH_1472;Clade II)__AVO03605__GPC
augggccagaucauuaccuucuuucaagaggugccccacgucaucgaagagguuaugaacauugugcugaucgcccucagccugcuugcuauucugaaggggaucuacaauguggccacaugcggacucuucggccuggucuccuuucuucugcucugugggagaucuugcagcacgaccuauaaaggaguguacgaacugcagacacuggagcucgacauggcgucccugaacaugaccaugccucuuucuuguacaaagaauaacagccaucacuauaucaugguuggcaaugaaaccgggcuggagcucacacugaccaacacguccauuaucaaucauaaauucugcaaccuuucugaugcucacaagaaaaaucuguacgaccaugcccucaugagcauuaucuccaccuuucaccugagcauuccgaacuucaaucaguaugaggccaugucuugugauuuuaacggaggcaagaucuccgugcaguacaaucugagccacacauaugcugucgacgccgcuaaccauugcggcaccauugccaauggggugcuccaaacauucaugcggauggcguggggaggcucuuacaucgcccuggauuccgggaagggaagcugggacuguaucaugaccucuuaccaguaucuuauuauccagaacacgacaugggaagaucacugccaguuuucccgccccagcccuauuggcuaccuggggcuccugucccaaagaacccgggacaucuauauuucucgcagacuucugggaacauucaccuggacccucagcgauuccgagggcaacgaaacacccggcggguacugucugacgcgguggaugcugaucgaggcugagcucaaaugcuuuggaaauaccgccguugcuaaguguaacgaaaaacaugacgaggaguucugcgauaugcugcgccuuuuugacuucaauaagcaggccaucagacggcugaaaacagaagcgcagaugagcauucagcucaucaacaaggccgugaaugcucugauuaacgaucaacuuaucaugaagaaucaucugcgcgacauuaugggcaucccuuauugcaacuacucuaaauauugguaccucaaucacaccgucacagggagaaccucccugccccgguguuggcuggugagcaacggaucuuaccucaaugaaacgcacuucagcgacgauaucgagcagcaggccgacaacaugauuacagagcugcuucaaaaggaauauaucgaucgccagggcaaaaccccucuggggcucguggaccuguuugucuucuccaccucuuuuuaccugauuagcaucuuccuucaccucauuaagaucccgacacauagacacguuauuggaaaacccugcccuaagccccaucggcugaaucacaugggcaucuguuccugcggccuguauaaacacccuggggugcccgugaaguggaagcgcuga

SEQ ID NO: 1621 - RNA, 1473 nt, Artificial Sequence
  derived and/or modified protein sequence (opt5) from LASV(Lassa virus/H.sapiens-wt/NGA/2016/ISTH_1474;Clade II)__AVO03613__GPC
augggccagaucauuaccuucuuucaagaggugccccacgucaucgaagagguuaugaacauugugcugaucgcccucagccugcuugcuauucugaaggggaucuacaauguggccacaugcggacucuucggccuggucuccuuucuucugcucugugggagaucuugcagcacgaccuauaaaggaguguacgaacugcagacacuggagcucgacauggcgucccugaacaugaccaugccucuuucuuguacaaagaauaacagccaucacuauaucaugguuggcaaugaaaccgggcuggagcucacacugaccaacacguccauuauccaucacaaauucugcaaucuuucugaugcucauaagaaaaaccuguacgaccacgcccucaugagcauuaucuccaccuuucaccugagcauuccgaauuucaaccaguaugaggccaugucuugugauuuuaauggaggcaagaucuccgugcaguacaaccugagccauacauaugcugucgacgccgcuaaucacugcggcaccauugccaacggggugcuccaaacauucaugcggauggcguggggaggcucuuacaucgcccuggauuccgggaagggaagcugggacuguaucaugaccucuuaccaguaucuuauuauccagaauacgacaugggaagaucauugccaguuuucccgccccagcccuauuggcuaccuggggcuccugucccaaagaacccgggacaucuauauuucucgcagacuucugggaacauucaccuggacccucagcgauuccgagggcaacgaaacacccggcggguacugucugacgcgguggaugcugaucgaggcugagcucaaaugcuuuggaaacaccgccguugcuaaguguaaugaaaaacacgacgaggaguucugcgauaugcugcgccuuuuugacuucaacaagcaggccaucagacggcugaaaacagaagcgcagaugagcauucagcucaucaauaaggccgugaacgcucugauuaaugaucaacuuaucaugaagaaccaucugcgcgacauuaugggcaucccuuauugcaauuacucuaaauauugguaccucaaccacaccgucacagggagaaccucccugccccgguguuggcuggugagcaauggaucuuaccucaacgaaacgcacuucagcgacgauaucgagcagcaggccgacaauaugauuacagagcugcuucaaaaggaauauaucgaucgccagggcaaaaccccucuggggcucguggaccuguuugucuucuccaccucuuuuuaccugauuagcaucuuccuucaucucauuaagaucccgacacacagacauguuauuggaaaacccugcccuaagccccaccggcugaaccacaugggcaucuguuccugcggccuguauaaacauccuggggugcccgugaaguggaagcgcuga

SEQ ID NO: 1622 - RNA, 1476 nt, Artificial Sequence
  derived and/or modified protein sequence (opt5) from LASV(Lassa virus/H.sapiens-wt/NGA/2016/ISTH_1496;Clade II)__AVO03579__GPC
augggccagaucauuaccuucuuucaagaggugccccacgucaucgaagagguuaugaacauugugcugaucgcccucagccugcuugcuauucugaaggggguguacaaugucgccacaugcggacucuucggccugguguccuuucuucugcucugugggagaucuugcagcacgaccaucuauaaaggaguuuacgaacugcagacacuggagcucgacauggcgucccugaacaugaccaugccucuuucuuguacaaagaauaacagccaucacuauaucauggugggcaaugaaaccgggcuggagcucacacugaccaacacguccauuaucaaucauaaauucugcaaccuuucugaugcucacaagaaaaaucuguacgaccaugcccucaugagcauuaucuccaccuuucaccugagcauuccgaacuucaaucaguaugaggccaugucuugugauuuuaacggaggcaagaucuccguccaguacaaucugagccacgcuuaugccguggacgcugccaaccauugcggcacaauugcgaaugggguucuccaaaccuucaugcggauggccuggggaggcucuuacaucgcucuggauuccgggaagcgcagcugggacuguaucaugacaucuuaccaguaucuuauuauccagaacaccacgugggaagaucacugccaguuuuccagacccagcccuauuggauaccugggccuccugucccaacggacacgcgacaucuauauuucuagacggcuucuggggaccuucacauggacccucagcgauuccgagggaaacgaaacccccggcggcuacugucugacacgcuggaugcugaucgaggccgagcucaaaugcuuugggaauacggcuguggccaaguguaacgaaaaacaugacgaggaguucugcgauaugcugagacuuuuugacuucaauaagcaggcgauccggcgccugaaaaccgaagcccagaugagcauucagcucaucaacaaggcugucaaugcccugauuaacgaucaacuuaucaugaagaaucaccugagagacauuaugggaaucccuuauugcaacuacucuaaauauugguaccucaaucacacagugaccggcaagacaucccugccccgguguuggcuggugagcaacgggucuuaccucaaugaaacccauuucagcgacgauaucgagcagcaggcugacaacaugauuacggagcugcuucaaaaagaauauaucgaucgccagggaaagacaccucugggccucgucgaccuguuuguuuucuccaccucuuuuuaccugauuagcaucuuccuucaccucgugaaaauuccgacccauagacacgugaucgggaagcccugcccuaaaccccaucggcugaaucacaugggaauuuguuccugcggccuguauaagcacccuggcguccccgugaaguggaaacgcuga

SEQ ID NO: 1623 - RNA, 1473 nt, Artificial Sequence
  derived and/or modified protein sequence (opt5) from LASV(Lassa virus/H.sapiens-wt/NGA/2016/ISTH_1541;Clade II)__AVO03553__GPC
augggccagaucgugacauucuuucaagaggucccccacguuauugaagagaucaugaacauugugcugaucacacucagccugcuugccgugcugaaggggauuuacaauuucgcuacgugcggacucaucggccugaucaccuuucuuuuccugugugggagauccugcucuacaauuuauaaaggaaacuaccagcuccagacccuggaacugaauauggagacacucaacaugaccaugccucugagcuguacaaagaauaacucccaucacuauauccgggucggcaaugaaaccgggcuugagcugacgcucaccaacgugucuauuaucaaucaucgcuuuugcaaccugagcgacgcccacaaaagaaaucuuuacgaucauacacugauguccauuaucucuaccuuccaccucagcauuccgaacuuuaaucaguaugaggcgauguccugugacuucaacggaggcaagaucagcguucaauacaaucugucucacggcuaugcuguggaugccgccaaacauugcgggacagucgcuaacggagugcugcagaccuuuaugcggauggccuggggcggguccuacaucgcucucgacagcggaaagggcaacugggauuguauuaugacgucuuaccaguaucugaucauucagaauacaaccugggaagaccacugccaauucucccgccccagcccuaucggguaccuuggacugcucucucagagaacacgggauauuuauaucucccgcagacugcuuggcaccuuuaccuggacacugagcgacuccgagggccgggaaacgcccgggggauacugucucacccgcuggaugcugaucgaggccgagcugaagugcuucggcaacacagcgguugccaaauguaaugaaaagcaugaugaggaauuuugcgacaugcucagacuguucgauuucaacaaacaggcuauucagcggcuuaagaccgaggcccaaaugucuauccagcugauuaauaaagcugugaacgcccucaucaaugaccagcugauuaugaagaaccaccuucgcgauaucauggggaucccuuauugcaauuacagcaaguauugguaccugaaccacacaaccacgggaaaaacaucccuccccaaguguuggcuggucaccaauggcagcuaccugaacgaaacccauuuuucugacgacauugagcaacaggcggauaauaugaucacagagaugcuccagaaagaauauauugacagacaggggaagaccccucugggacuuguggaucuguucguguuuuccaccagcuucuaccucaucucuauuuuucugcaccugaucaaaauuccgaaccaucggcacaucgucggcaagcccugcccuaaaccccaucgccuuaaucacaugggcaucuguagcugcggguucuauaagcaaccuggaguucccgugagauggaagcgguga

SEQ ID NO: 1624 - RNA, 1473 nt, Artificial Sequence
  derived and/or modified protein sequence (opt5) from LASV(Lassa virus/H.sapiens-wt/NGA/2016/ISTH_1546;Clade II)__AVO03537__GPC
augggccagaucgugaccuucuuucaagagauuccccacgucguugaagagaucaugaacauugugcugaucacacucagccugcuugccauucugaaggggcucuacaauuucgcuacgugcggacugaucggccuuaucaccuuucuguuccucugugggagauccugcucuacaauuuauaaaggaagcuaccagcugcaggcccuggaacucaacauggagacccugaauaugacaaugccucuuuccuguaccaagaacaauucucaucacuauauccgggugggcaacgaaacagggcuggagcucacccugacgaauaccagcauuaucaaccauaaauuuugcaaucuuuccgacgcgcacaagaaaaaccuguacgaucauacacucaugucuauuaucagcaccuuccaccuguccauuccgaauuuuaaccaguaugaggcuaugagcugugacuucaauggaggcaagaucucuguccaauacaaccugucccacagcuaugccggcgaugccgcucgccauugcgggacaguggccaauggaguucuccagaccuuuaugagaauggcuuggggcgggucuuacaucgcccuggacuccggaaagggcaacugggauuguauuaugacgagcuaccaguaucuuaucauucagaacacaaccugggaagaccacugccaauucucucggcccuccccuaucggguaccugggacuccugagccagcgcacaagagauauuuauaucucccggcgccuucugggcaccuuuaccuggacacucucugacagcgagggcaaagaaacgcccgggggauacugucugaccagauggaugcugaucgaggcggagcucaagugcuucggcaauacagccguggcuaaauguaacgaaaagcaugaugaggaauuuugcgacaugcugcggcuuuucgauuucaauaaacaggccauucagcgccugaagaccgaggcucaaauguccauccagcucauuaacaaggccgucaaugcgcugaucaacgaccagcuuauuaugaaaaaucaccugagagauaucauggggaucccuuauugcaacuacagcaaguauugguaccucaaucacacaaccacgggaaaaacaucucugccccgguguuggcugguguccaacggcagcuaccucaaugaaacccauuuuucugacgacauugagcaacaggccgauaacaugaucaccgagaugcugcagaaggaauauauugaccgccaggggaaaacaccucuuggacugguugaucucuucguguuuagcaccuccuucuaccugaucucuauuuuucugcaccuuaucaagauuccgacacauagacacaucgucggcaaaagcugccccaagccucaucggcucaaucacaugggcaucuguuccugcgggcuguauaagcaacccggagugccugugaaauggaagcgcuga

SEQ ID NO: 1625 - RNA, 1473 nt, Artificial Sequence
  derived and/or modified protein sequence (opt5) from LASV(Lassa virus/H.sapiens-wt/NGA/2016/ISTH_1591;Clade II)__AVO03647__GPC
augggccagaucauuaccuucuuucaagaggugccccacgucaucgaagagguuaugaacauugugcugaucgcccucagccugcuugcuauucugaaggggaucuacaauguggccacaugcggacucuucggccuggucuccuuucuucugcucugugggagaucuugcagcacgaccuauaaaggaguguacgaacugcagacacuggagcucgacauggcgucccugaacaugaccaugccucuuucuuguacaaagaauaacagccaucacuauaucaugguuggcaaugaaaccgggcuggagcucacacugaccaacacguccauuauccagcauaaauucugcaaucuuucugaugcucacaagaaaaaccuguacgaccaugcccucaugagcauuguguccaccuuucaccugagcaucccgaauuucaaccaguaugaggccaugucuugugauuuuaauggaggcaagauuacaguccaauacaaccugucccacagcuaugcuaucgacgccgcuaaucauugcggcaccguggccaacgggguucuccagacauucaugcggauggcguggggaggcucuuacauugcccuggauuccgggcgcggaagcugggacuguaucaugaccucuuaccaguaucuuaucauucagaauacgacaugggaagaucacugccaauuuuccagacccagcccuaucggcuaccuggggcuccugucccagcggacccgcgacauuuauaucucuagacggcuucugggaacauucaccuggacccucagcgauuccgagggcaacgaaacacccggcggguacugucugacgcgcuggaugcugauugaggcugagcucaagugcuuuggaaacaccgccguggcuaaauguaaugaaaagcaugacgaggaguucugcgauaugcugagacuuuuugacuucaacaaacaggccauccggcgccugaaggcggaagcccagaugagcauccaacucauuaauaaagcugucaacgcccugaucaaugaucagcuuauuaugaagaaccaccugagagacaucaugggcauuccuuauugcaauuacucuaaguauugguaccucaaccacacagugaccgggcggacaucccugccccgcuguuggcuggugagcaauggaucuuaccucaacgaaacccauuucagcgacgauaucgagcagcaagcugacaauaugaucacggagcugcuucagaaagaauauauggauagacagggcaagacaccucuggggcucgucgaccuguuuguuuucuccaccucuuuuuaccugauuagcaucuuccuucaccucgugaaaauuccgacccaucggcacaucauuggaaagcccugcccuaaaccccaucgccugaaccacaugggcguguguuccugcggccuguauaagcacccugggguccccgugaaauggaagagauga

SEQ ID NO: 1626 - RNA, 1473 nt, Artificial Sequence
  derived and/or modified protein sequence (opt5) from LASV(Lassa virus/H.sapiens-wt/NGA/2016/ISTH_1604;Clade II)__AVO03541__GPC
augggccagaucgugaccuucuuucaagaggucccccacguuauugaagagaucaugaacauugugcugaucacacucagccugcuugccauucugaaggggguguacaaucucgcuacgugcggacugaucggccuuaucaccuuccuguuucucugugggagauccugcucuaugacauauaaaggaagcuaccagcuggaaacccuggagcucaacauggaaacacugaauaugaccaugccucuuuccuguacaaagaacaccucucaucacuauauucgggucggcaaugagacggggcuggagcucacccugacaaacaccagcaucauuaaucauaaauucugcaaccuuuccgacgcccacaagaaaaaucuguacgaucauucucucaugagcaucguguccacauuucaccugagcauuccgaacuucaaucaguaugaagcgaugucuugugacuuuaacggaggcaagaucuccauucaguacaaucugagccacgcuuaugccggcgaugccgcuaagcauugcgggacccucgccaacggaguucugcaaacguucaugcgcauggcuuggggcgggucuuacaucgcccuugacuccggaagaggcaauugggauuguaucaugacaagcuaccaguaucugauuauccagaacaccacaugggaggaccacugccaguuuucucggcccuccccuauuggguaccucggacugcuuagccaacgcaccagagaaaucuauauuucccggcgccugcucggcaccuucacauggacgcugucugauagcgagggcaacgaggcgcccgggggauacugucugaccagauggaugcucaucgaagccgagcugaaaugcuuuggcaaugcugccguggcuaaguguaacgaaaaacaugacgaggaguucugcgauaugcuucggcuguuugacuucaauaagcaggccauccagcgccucaaaacagaagcgcagauguccauucaacugaucaacaaggccgucaaugcucuuauuaacgaucagcugaucaugaagaaucaccucagagacauuauggggaucccuuauugcaacuacagcaaauauugguaccugaaucacaccacaaccggacggacgucucugccccgcuguuggcucguguccaacggcagcuaccugaaugagacacauuucucugaugacaucgaacagcaagccgacaacaugauuaccgagaugcuucagaaggaauauaucgauagacaggggaaaaccccucugggacucguugaccuguuuguguucagcacauccuuuuaccugauuucuaucuuccuucaccucgucaagauuccgacccaucggcacaucgugggcaaaagcugccccaagccucaucgccugaaucacaugggcauuuguuccugcgggcuguauaaacagcccggagugccugucagauggaagcgguga

SEQ ID NO: 1627 - RNA, 1473 nt, Artificial Sequence
  derived and/or modified protein sequence (opt5) from LASV(Lassa virus/H.sapiens-wt/NGA/2016/ISTH_1609;Clade II)__AVO03661__GPC
augggccagaucgugaccuucuuucaagagauuccccacgucaucgaagagguuaugaacauugugcugaucacacucagccugcuugccgugcugaaggggauuuacaauuucgcuacgugcggacucaucggccugaucaccuuucuuuuccugugugggagauccugcucuacaauuuauaaaggaagcuaccagcuccagaagcuggaacugaacauggagacccucaauaugacaaugccucuguccuguaccaaaaacucuagccaucacuauauccgggucggcaaugaaacagggcuugagcugacccucacgaacaccuccauuaucucucauaaguuuugcaaucugagcgacgcccacaaaaagaaccuuuacgaucaugcgcugauguccauuaucagcacauuccaccucucuauuccgaauuuuaaccaguaugaggcuauguccugugacuucaauggaggcaagaucagcgugcaauacaaccugucucacuccuaugccggcgaugccgcucgccauugcgggacccuggccaauggaguucuccagacauuuaugagaauggcuuggggcgggagcuacaucgcccuggacucuggaaaaggcaacugggauuguauuaugaccuccuaccaguuccuuaucauucagaauacgacaugggaagaccacugccaauuuagccggcccuccccuaugggguaucugggacuccugucucagcgcaccagagauaucuacauuagccggcgccuucugggcacauucaccuggacccucuccgacagcgagggcaaggaaacacccgggggauauugucugacgagauggaugcugaucgaggcggagcucaaaugcuuuggcaacaccgccguggcuaaguguaacgaaaaacaugaugaggaguucugcgacaugcugcggcuuuucgauuuuaauaagcaggccauccagcgccugaagacagaagcucaaaugucuauucagcucaucaacaaagccgucaaugcgcugauuaacgaccagcuuaucaugaagaaucaccugagagauauuauggggaucccuuacugcaacuauucccaauacugguaucucaaucacaccaucacaggaaaaaccagccugcccaaguguuggcuggugucuaacggcagcuaccucaaugaaacgcauuucuccgacgacauugagcagcaggccgauaacaugaucacagagaugcugcagaaagaauacauugaccggcaagggaagaccccucuuggacugguugaucucuuuguguucucuaccagcuuuuaucugaucuccauuuuccugcaccuuaucaaaauuccgacacaucgccacaucgucggcaagagcugccccaagccucauagacucaaucggaugggcaucuguucuugcgggcuguacaaacagcccggagugccugugaaguggaaacgcuga

SEQ ID NO: 1628 - RNA, 1473 nt, Artificial Sequence
  derived and/or modified protein sequence (opt5) from LASV(Lassa virus/H.sapiens-wt/NGA/2016/ISTH_1610;Clade II)__AVO03603__GPC
augggccagaucauuaccuucuuucaagaggugccccacgucaucgaagagguuaugaacauugugcugaucgcccucagccugcuugcuauucugaaggggaucuacaauguggccacaugcggacucuucggccuggucuccuuucuuuuccugugugggagaucuugcagcacgaccuauaaaggaguguacgaacuccagacacuggagcuggacauggcgucccucaacaugaccaugccucugucuuguacaaagaauaacagccaucacuauaucaugguuggcaaugaaaccgggcuugagcugacacucaccaacacguccauuaucaaucauaaauuuugcaaccugucugaugcucacaagaaaaaucuuuacgaccaugcccugaugagcauuaucuccaccuuccaccucagcauuccgaacuuuaaucaguaugaggccaugucuugugauuucaacggaggcaagaucuccgugcaguacaaucugagccacacauaugcuauugacgccgcuaaccauugcggcaccaucgccaaugggguccugcaaacauuuaugcggauggcguggggaggcucuuacaucgcccucgauuccgggcgcggaagcugggacuguauuaugaccucuuaccaguaucugaucauucagaacacgacaugggaagaucacugccaguucuccagacccagcccuaucggcuaccuugggcugcucucccaacggacccgcgacauuuauaucucuagacggcugcuuggaacauuuaccuggacccugagcgauuccgagggcaacgaaacacccggcggguacugucucacgcgcuggaugcugaucgaggcugagcugaagugcuucggaaauaccgccguggcuaaauguaacgaaaagcaugacgaggaauuuugcgauaugcucagacuguucgacuucaauaaacaggccauucggcgccuuaaggcggaggcccagaugaacauccagcugauuaauaaagcuguuaacgcccucaucaaugaucaacugauuaugaagaaccaccuuagagacaucaugggcaucccuuauugcaauuacagcaaguauugguaccugaaccacacagugaccgggcggacaucucucccccgcuguuggcuggucuccaauggaagcuaccugaacgaaacccauuuuucugacgauauugagcagcaggcugacaauaugaucacggagcuccugcaaaaagaauauauggauagacagggcaagacaccucuugggcugguggaccucuucguguuuagcaccuccuucuaccugauuucuaucuuucugcaccuuauuaaaaucccgacccaucggcacauugucggaaagcccugcccuaaaccccaucgccucaaccacaugggcaucuguagcugcggccuguauaagcacccugggguucccgugaaauggaagagauga

SEQ ID NO: 1629 - RNA, 1473 nt, Artificial Sequence
  derived and/or modified protein sequence (opt5) from LASV(Lassa virus/H.sapiens-wt/NGA/2018/ISTH_0959;Clade II)__AVV65099__GPC
augggccagaucauuaccuucuuucaagaggugccccacgucaucgaagagguuaugaacauugugcugaucgcccucagccugcuugcuauucugaaggggaucuacaauguggucacaugcggacucuucggccugguguccuuucuucugcucugugggagaucuugcagcacgaccuauaaaggaguuuacgaacugcagacacuggagcucgacauggccucccugaacaugaccaugccucuuucuuguacaaagaauaacagccaucacuauaucauggugggcaaugaaaccgggcuggagcucacacugaccaacacguccauuaucaaucauaaauucugcaaccuuucugaugcgcacaagaaaaaucuguacgaccaugcucucaugagcauuaucuccaccuuucaccugagcauuccgaacuucaaucaguaugaggccaugucuugugauuuuaacggaggcaagaucuccguccaguacaaucugagccacgccuaugcuauugacgccgcuaaccauugcggcacaaucgccaauggggugcuccaaaccuucaugcggauggcguggggaggcucuuacaucgcccuggauuccgggaagggaagcugggacuguauuaugacaucuuaccaguaucuuaucauucagaacaccacgugggaagaucacugccaguuuucccgccccagcccuaucggcuaccuggggcuccugucccaaagaacacgggacauuuauaucucucgcagacuucugggaaccuucacauggacccucagcgauuccgagggcaacgaaacccccggcggguacugucugacacgguggaugcugaucgaggcugagcucaaaugcuuuggaaauacggccguugcuaaguguaacgaaaaacaugacgaggaguucugcgauaugcugcgccuuuuugacuucaauaagcaggccauuagacggcugaaaaccgaagcgcagaugagcauccagcucauuaacaaggccgugaaugcucugaucaacgaucaacuuauuaugaagaaucaucugcgcgacaucaugggcaucccuuauugcaacuacucuaaauauugguaccucaaucacacagucaccgggaagacaucccugcccagauguuggcuggugagcaacggaucuuaccucaaugaaacccacuucagcgacgauauugagcagcaggccgacaacaugaucacggagcugcuucaaaaagaauauauugaucggcagggcaagacaccucuggggcucguggaccuguuugucuucuccaccucuuuuuaccugaucagcauuuuccuucaccucguuaaaaucccgacccaucgccacgugauuggaaagcccugcccuaaaccccauagacugaaucacaugggcaucuguuccugcggccuguauaagcacccuggggugcccgucaaguggaaacgguga

SEQ ID NO: 1630 - RNA, 1473 nt, Artificial Sequence
  derived and/or modified protein sequence (opt5) from LASV(Lassa virus/H.sapiens-wt/NGA/2018/ISTH_1024;Clade II)__AVV65105__GPC
augggccagaucauuaccuucuuucaagaggugccccacgucaucgaagagguuaugaacauugugcugaucgcccucagccugcuugcuauucugaaggggguguacaaugucgccacaugcggacucuucggccugguguccuuucuucugcucugugggagaucuugcagcacgaccuauaaaggaguuuacgaacugcagacacuggagcucgacauggcgaaccugaauaugaccaugccucuuuccuguacaaagaacaauucucaucacuauauccgggugggcaacgaaaccgggcuggagcucacacugaccaauacgagcaucauuaaccauaaauucugcaaucuuuccgaugcucacaagaacaaucuguacgaccaugcccucaugucuaucauuagcaccuuucaccuguccaucccgaacuucaaucaguaugaggccaugagcugugauuuuaacggaggcaaaauuucuguccaguacaaucugucccacgcuuaugccguggacgcugccaaccauugcggcacaaucgcgaacgggguucuccaaaccuucaugcgcauggccuggggaggcagcuacauugcucuggauucugggagaggauccugggacuguaucaugacaagcuaccaguaucuuaucauucagaauaccacgugggaagaucacugccaguuuucucggcccuccccuaucggcuaccuggggcuccugagccaacgcacaagagacauuuauaucucccggcgccuucugggaaccuucacauggacccucucugauagcgagggcaacgaaacccccggcggguacugucugacaagauggaugcugauugaggccgagcucaagugcuuuggaaauacggcuguggccaaguguaacgaaaaacaugacgaggaguucugcgauaugcugcggcuuuuugacuucaauaagcaggcgauccgcagacugaaaaccgaagcccagauguccauccagcucauuaacaaggcugucaaugcccugaucaacgaucaacuuauuaugaaaaaucaucugcgggacaucaugggcauuccuuauugcaacuacagcaaguauugguaccucaaucacacagugaccgggaagacaucucugccccgcuguuggcugguguccaacggaaccuaccucaaugaaacgcacuucagcgacgauaucgagcagcaggcugacaacaugaucacagagcugcuucaaaaagaauauauggauagacagggcaagaccccucuggggcucgucgaccuguuuguuuucucuaccagcuuuuaccugauuuccaucuuccuucaccucgugaaaauuccgacacaucggcacgugaucggaaagcccugcccuaaaccccaucgccugaaucacaugggcauuuguucuugcggccuguauaagcacccugggguccccgugaaauggaagagauga

SEQ ID NO: 1631 - RNA, 1473 nt, Artificial Sequence
  derived and/or modified protein sequence (opt5) from LASV(Lassa virus/H.sapiens-wt/NGA/2018/ISTH_1079;Clade II)__AVV65107__GPC
augggccagaucauuaccuucuuucaagaggugccccacgucaucgaagagguuaugaacauugugcugaucgcccucagccugcuugcuauucugaaggggaucuacaauguggccacaugcggacucuucggccuggucgcguuucuucugcucugugggagauccugcucuacgaccuauaaaggaguguacgaacugcagacacuggagcucgacauggcuagccugaacaugaccaugccucuuuccuguacaaagaauaacucucaucacuauaucaugguuggcaaugaaaccgggcuggagcucacacugaccaacacgagcauuaucaaucauaaauucugcaaccuuuccgaugcccacaagaaaaaucuguacgaccaugcccucaugucuauuaucagcaccuuucaccuguccauuccgaacuucaaucaguaugaggcuaugagcugugauuuuaacggaggcaagaucucugugcaguacaaucugucccacacauaugccgucgacgcugccaaccauugcggcaccauugcgaauggggugcuccaaacauucaugcggauggccuggggaggcagcuacaucgcucuggauucugggaagggauccugggacuguaucaugaccagcuaccaguaucuuauuauccagaacacgacaugggaagaucacugccaguuuucucgccccuccccuauuggcuaccuggggcuccugagccaaagaacccgggacaucuauauuucccgcagacuucugggaacauucaccuggacccucucugauagcgagggcaacgaaacacccggcggguacugucugacgcgguggaugcugaucgaggccgagcucaaaugcuuuggaaauaccgcuguugccaaguguaacgaaaaacaugacgaggaguucugcgauaugcugcgccuuuuugacuucaauaagcaggcgaucagacggcugaaaacagaagcccagauguccauucagcucaucaacaaggcugugaaugcccugauuaacgaucaacuuaucaugaagaaucaucugcgcgacauuaugggcaucccuuauugcaacuacagcaaauauugguaccucaaucacaccgucacagggagaaccucucugccccgguguuggcugguguccaacggaagcuaccucaaugaaacgcacuucucugacgauaucgagcagcaggcugacaacaugauuacagagcugcuucaaaaggaauauauggaucgccagggcaaaaccccucuggggcucguggaccuguuugucuucagcaccuccuuuuaccugaucucuauuuuccuucaccucaucaagauuccgacacauagacacguuaucggaaaacccugcccuaagccccaucggcugaaucacaugggcauuuguagcugcggccuguauaaacacccuggggugcccgugaaguggaagcgcuga

SEQ ID NO: 1632 - RNA, 1473 nt, Artificial Sequence
  derived and/or modified protein sequence (opt5) from LASV(Lassa virus/H.sapiens-wt/NGA/2018/ISTH_1177;Clade II)__AVV65101__GPC
augggccagaucauuaccuucuuucaagaggugccccacgucaucgaagagguuaugaacauugugcugaucgcccucagccugcuugcuauucugaaggggaucuacaauguggccacaugcggacucuucggccuggucuccuuucuucugcucugugggagaucuugcagcacgaccuauaaaggaguguacgaacugcagacacuggagcucgacauggcgucccugaacaugaccaugccucuuucuuguacaaagaauaacagccaucacuauauccggguuggcaaugaaaccgggcuggagcucacacugaccaacacguccauuaucgaucauaaauucugcaaucuuucugacgcucacaagaaaaaccuguacgaucaugcccucaugagcauuaucuccaccuuucaccugagcauuccgaauuucaaccaguaugaggccaugucuugugacuuuaauggaggcaagaucuccgugcaguacaaccugagccacacauaugcugucgaugccgcuaaucauugcggcaccauugccaacggggugcuccaaacauucaugcgcauggcguggggaggcucuuacaucgcccuggacuccgggaagggaagcugggauuguaucaugaccucuuaccaguaucuuauuauccagaauacgacaugggaagaccacugccaguuuuccagacccagcccuauuggcuaccuggggcuccugucccaacggacccgcgauaucuauauuucuagacggcuucugggaacauucaccuggacccucagcgacuccgagggcaacgaaacacccggcggguacugucugacgcgcuggaugcugaucgaggcugagcucaaaugcuuuggaaacaccgccguugcuaaguguaaugaaaaacaugaugaggaguucugcgacaugcugagacuuuuugauuucaacaagcaggccauccggcgccugaaaacagaagcgcagaugagcauucagcucaucaauaaggccgugaacgcucugauuaaugaccaacuuaucaugaagaaccaccugagagacauuaugggcaucccuuauugcaauuacucuaaauauugguaccucaaccacaccaucacagggcggaccucccugccccgcuguuggcuggucagcaauggaucuuaccucaacgaaacgcauuucagcgaugacauugagcagcaggccgauaauaugaucacagagcugcuucaaaaggaauauauggacagacagggcaaaaccccucuggggcucguggaucuguuuguguucuccaccucuuuuuaccugauuagcaucuuccuucaccucgucaagauuccgacacaucggcacguuaucggaaaacccugcccuaagccccaucgccugaaccacaugggcauuuguuccugcggccuguauaaacacccuggggugcccgugaaguggaagagauga

SEQ ID NO: 1633 - RNA, 1473 nt, Artificial Sequence
  derived and/or modified protein sequence (opt5) from LASV(Lassa virus/H.sapiens-wt/NGA/2018/ISTH_1375;Clade II)__AVV65115__GPC
augggccagaucauuaccuucuuucaagaggugccccacgucaucgaagagguuaugaacauugugcugaucgcccucagccugcuugcuauucugaaggggaucuacaauaucgccacaugcggacucuucggccugguguccuuucuucugcucugugggagaucuugcagcacgaccuauaaaggagucuacgaacugcagacacuggagcucgacauggcgucccugaacaugaccaugccucuuucuuguacaaagaauaacagccaucacuauauuauggugggcaaugaaaccgggcuggagcucacacugaccaacacguccaucauuaaucaucgguucugcaaccuuucugaugcucacaaaaagaaucuguacgaccaugcccucaugagcaucauuuccaccuuucaccugagcaucccgaacuucaaucaguaugaggccaugucuugugauuuuaacggaggcaaaauuuccguucaguacaaucugagccacgcuuaugccguggacgcugccaaccauugcggcacaaucgcgaaugggguccuccaaaccuucaugcgcauggccuggggaggcucuuacaucgcucuggauuccgggaagggaagcugggacuguauuaugacaucuuaccaguaucuuaucauucagaacaccacgugggaagaucacugccaguuuuccagacccagcccuaucggcuaccuggggcuccugucccaacggacacgcgacauuuauaucucuagacggcuucugggaaccuucacauggacccucagcgauuccgagggcaacgaaacccccggcggguacugucugacacgcuggaugcugaucgaggccgagcucaagugcuuuggaaauacggcuguggccaaauguaacgaaaagcaugacgaggaguucugcgauaugcugagacuuuuugacuucaauaaacaggcgauucggcgccugaagaccgaagcccagaugagcauccagcucauuaacaaagcuguuaaugcccugaucaacgaucaacuuauuaugaagaaucaccugagagacaucaugggcaucccuuauugcaacuacucuaaguauugguaccucaaucacacagugaccgggaaaacaucccugccccgguguuggcuggucagcaacggaucuuaccucaaugaaacccauuucagcgacgauauugagcagcaggcugacaacaugaucacggagcugcuucaaaaggaauauauugaucgccagggcaaaacaccucuggggcucguggaccuguuuguguucuccaccucuuuuuaccugaucagcauuuuccuucaccucgucaagaucccgacccauagacacguuauuggaaaacccugcccuaagccccaucggcugaaucacaugggcaucuguuccugcggccuguauaaacacccuggggugcccgugaaguggaagcgcuga

SEQ ID NO: 1634 - RNA, 1473 nt, Artificial Sequence
  derived and/or modified protein sequence (opt5) from LASV(Lassa virus/H.sapiens-wt/NGA/2018/ISTH_1381;Clade II)__AVV65111__GPC
augggccagaucgugaccuucuuucaagaggucccccacguuauugaagaggugaugaacaucgugcugauugcccucagccugcuugcuauccugaaggggauuuacaaugucgccacaugcggacucuucggccugguguccuuucuucugcucugugggagaucuugcagcacgaccuauaaaggaguuuacgaacugcagacacuggagcucgacauggcgucccugaacaugaccaugccucuuucuuguacaaagaauaacagccaucacuauaucauggugggcaaugaaaccgggcuggagcucacacugaccaacacguccaucauuaaucauaaauucugcaaccuuucugaugcucacaagaaaaaucuguacgaccaugcccucaugagcaucauuuccaccuuucaccugagcaucccgaacuucaaucaguaugaggccaugucuugugauuuuaacggaggcaagauuuccguccaguacaaucugagccacacauaugcuguggacgccgcuaaccauugcggcaccaucgccaaugggguucuccaaacauucaugcggauggcguggggaggcucuuacauugcccuggauuccgggaagggaagcugggacuguaucaugaccucuuaccaguaucuuaucauucagaacacgacaugggaagaucacugccaguuuucccgccccagcccuaucggcuaccuggggcuccugucccaaagaacccgggacauuuauaucucucgcagacuucugggaacauucaccuggacccucagcgauuccgagggcaacgaaacacccggcggguacugucugacgcgguggaugcugauugaggcugagcucaaaugcuuuggaaauaccgccguggcuaaguguaacgaaaaacaugacgaggaguucugcgauaugcugcgccuuuuugacuucaauaagcaggccaucagacggcugaaaacagaagcgcagaugagcauccagcucauuaacaaggccgucaaugcucugaucaacgaucaacuuauuaugaagaaucaucugcgcgacaucaugggcauuccuuauugcaacuacucuaaauauugguaccucaaucacaccgugacagggaagaccucccugcccagauguuggcuggugagcaacggaucuuaccucaaugaaacgcacuucagcgacgauaucgagcagcaggccgacaacaugaucacagagcugcuucaaaaagaauauauggaucggcagggcaagaccccucuggggcucgucgaccuguuuguuuucuccaccucuuuuuaccugauuagcaucuuccuucaccucgugaaaauuccgacacaucgccacguggucggaaagcccugcccuaaaccccauagacugaaucacaugggcaucuguuccugcggccuguauaagcacccuggggugcccguucgguggaagcgcuga

(The sequence listing continues in the following parts.)

1. RNA comprising at least one coding sequence encoding at least one antigenic peptide or protein derived from a Lassa virus (LASV) protein or a fragment or variant thereof, wherein said coding sequence is operably linked to a 5′-UTR derived from a HSD17B4 gene, a NDUFA4 gene, or a RPL32 gene and/or a 3′-UTR derived from a PSMB3 gene, a CASP1 gene, an ALB7 gene, or an alpha-globin gene.

2. RNA according to claim 1, wherein said coding sequence is operably linked to a 5′-UTR and/or 3′-UTR, comprising
a-1. at least one 5′-UTR derived from a 5′-UTR of a HSD17B4 gene, or from a corresponding RNA sequence, homolog, fragment or variant thereof and at least one 3′-UTR derived from a 3′-UTR of a PSMB3 gene, or from a corresponding RNA sequence, homolog, fragment or variant thereof; or
a-2. at least one 5′-UTR derived from a 5′-UTR of a NDUFA4 gene, or from a corresponding RNA sequence, homolog, fragment or variant thereof and at least one 3′-UTR derived from a 3′-UTR of a PSMB3 gene, or from a corresponding RNA sequence, homolog, fragment or variant thereof; or
b-4. at least one 5′-UTR derived from a 5′-UTR of a HSD17B4 gene, or from a corresponding RNA sequence, homolog, fragment or variant thereof and at least one 3′-UTR derived from a 3′-UTR of a CASP1 gene, or from a corresponding RNA sequence, homolog, fragment or variant thereof; or
i-2. at least one 5′-UTR derived from a 5′-UTR of a RPL32 gene, or from a corresponding RNA sequence, homolog, fragment or variant thereof and at least one 3′-UTR derived from a 3′-UTR of a ALB7 gene, or from a corresponding RNA sequence, homolog, fragment or variant thereof; or
i-3. at least one 3′-UTR derived from a 3′-UTR of a alpha-globin gene gene, or from a corresponding RNA sequence, homolog, fragment or variant thereof.

3. RNA according to claim 1 or 2, wherein
said 5′-UTR derived from a HSD17B4 gene comprises or consists of a nucleic acid sequence being identical or at least 70%, 80%, 85%, 86%, 87%, 88%, 89%, 90%, 91%, 92%, 93%, 94%, 95%, 96%, 97%, 98%, or 99% identical to SEQ ID NO: 13804 or 13805 or a fragment or a variant thereof;
said 5′-UTR derived from a NDUFA4 gene comprises or consists of a nucleic acid sequence being identical or at least 70%, 80%, 85%, 86%, 87%, 88%, 89%, 90%, 91%, 92%, 93%, 94%, 95%, 96%, 97%, 98%, or 99% identical to SEQ ID NO: 13812 or 13813 or a fragment or a variant thereof;
said 5′-UTR derived from a RPL32 gene comprises or consists of a nucleic acid sequence being identical or at least 70%, 80%, 85%, 86%, 87%, 88%, 89%, 90%, 91%, 92%, 93%, 94%, 95%, 96%, 97%, 98%, or 99% identical to SEQ ID NO: 13824 or 13825 or a fragment or a variant thereof;
said 3′-UTR derived from a PSMB3 gene comprises or consists of a nucleic acid sequence being identical or at least 70%, 80%, 85%, 86%, 87%, 88%, 89%, 90%, 91%, 92%, 93%, 94%, 95%, 96%, 97%, 98%, or 99% identical to SEQ ID NO: 13826 or 13827 or a fragment or a variant thereof;
said 3′-UTR derived from a CASP1 gene comprises or consists of a nucleic acid sequence being identical or at least 70%, 80%, 85%, 86%, 87%, 88%, 89%, 90%, 91%, 92%, 93%, 94%, 95%, 96%, 97%, 98%, or 99% identical to SEQ ID NO: 13828 or 13829 or a fragment or a variant thereof;
said 3′-UTR derived from a ALB7 gene comprises or consists of a nucleic acid sequence being identical or at least 70%, 80%, 85%, 86%, 87%, 88%, 89%, 90%, 91%, 92%, 93%, 94%, 95%, 96%, 97%, 98%, or 99% identical to SEQ ID NO: 13838 or 13839 or a fragment or a variant thereof;
said 3′-UTR derived from a alpha-globin gene comprises or consists of a nucleic acid sequence being identical or at least 70%, 80%, 85%, 86%, 87%, 88%, 89%, 90%, 91%, 92%, 93%, 94%, 95%, 96%, 97%, 98%, or 99% identical to EQ ID NO: 13840 or 13841 or a fragment or a variant thereof.

4. RNA according to any one of the preceding claims, wherein the LASV protein is derived from glycoprotein precursor (GPC), a prefusion-stabilized GPC, nucleoprotein (NP), zinc-binding matrix protein (Z), or a variant, fragment, or combination thereof, wherein GPC, prefusion-stabilized GPC, NP, Z are preferably full-length proteins.

5. RNA according claim 4, wherein the prefusion-stabilized GPC comprises at least one of the following mutations A, preferably of A1, A2, A3 and B, and C:
A amino acid substitutions allowing a covalent link of different structural elements of GPC, preferably by introduction of two additional cysteine residues, wherein preferably
A1 the amino acid substitutions allowing a covalent link of GP1 and GP2, preferably by introduction of two additional cysteine residues, preferably at position 207 or 206 and 360 or 359, preferably by amino acid substitutions R2070 or R2060 and G3600 or G359C, or
A2 the amino acid substitutions allowing a covalent link of GP1 to HR1 of GP2, preferably by introduction of two additional cysteine residues, preferably at position 81 or 80 and 319 or 318, preferably by amino acid substitutions T81 C or T800 and N3190 or N3180, or
A3 the amino acid substitutions allowing a covalent link of T-loop in GP2 to adjacent loop in GP2, preferably by introduction of two additional cysteine residues, preferably at positon 370 or 369 and 386 or 385, preferably by amino acid substitutions W3700 or W369C and W386C or W385C,
B amino acid substitutions allowing stabilization of GP2, preferably by introduction of a helix-breaking point mutation in the metastable region of HR1 of GP2 subunit, more preferably by introducing E329P or E328P,
C replacing the native GP1-GP2 cleavage site (S1 P) with a furin cleavage site, e.g. RRLL to RRRR to facilitate efficient processing of the mRNA encoded antigenic protein in target cells, preferably by amino acid substitutions L258R, L259R or L257R, L258R,
wherein prefusion-stabilized GPC preferably comprises at least one mutation A selected from A1, A2 and A3.

6. RNA according to any one of the preceding claims, wherein
said at least one coding sequence encodes at least one antigenic peptide or protein derived from LASV GPC comprising or consisting of an amino acid sequences being identical or at least 70%, 80%, 85%, 86%, 87%, 88%, 89%, 90%, 91%, 92%, 93%, 94%, 95%, 96%, 97%, 98%, or 99% identical to any one of SEQ ID NO: 1-254 or a fragment or a variant thereof;
said at least one coding sequence encoding at least one antigenic peptide or protein derived from LASV prefusion-stabilized GPC (“GPCmut1” or “GPCstabilized”) comprising or consisting of at least one amino acid sequences being identical or at least 70%, 80%, 85%, 86%, 87%, 88%, 89%, 90%, 91%, 92%, 93%, 94%, 95%, 96%, 97%, 98%, or 99% identical to any one of SEQ ID NO: 3567-3820 or a fragment or variant of any of these sequences;
said at least one coding sequence encoding at least one antigenic peptide or protein derived from LASV prefusion-stabilized GPC (“GPCmut2”) comprising or consisting of at least one amino acid sequences being identical or at least 70%, 80%, 85%, 86%, 87%, 88%, 89%, 90%, 91%, 92%, 93%, 94%, 95%, 96%, 97%, 98%, or 99% identical to any one of SEQ ID NO: 22949-22980 or a fragment or variant of any of these sequences;
said at least one coding sequence encoding at least one antigenic peptide or protein derived from LASV prefusion-stabilized GPC (“GPCmut3”) comprising or consisting of at least one amino acid sequences being identical or at least 70%, 80%, 85%, 86%, 87%, 88%, 89%, 90%, 91%, 92%, 93%, 94%, 95%, 96%, 97%, 98%, or 99% identical to any one of SEQ ID NO: 24645-24676 or a fragment or variant of any of these sequences;
said at least one coding sequence encoding at least one antigenic peptide or protein derived from LASV prefusion-stabilized GPC (“GPCmut4”) comprising or consisting of at least one amino acid sequences being identical or at least 70%, 80%, 85%, 86%, 87%, 88%, 89%, 90%, 91%, 92%, 93%, 94%, 95%, 96%, 97%, 98%, or 99% identical to any one of SEQ ID NO: 26341-26372 or a fragment or variant of any of these sequences;
said at least one coding sequence encoding at least one antigenic peptide or protein derived from LASV prefusion-stabilized GPC (“GPCmut5”) comprising or consisting of at least one amino acid sequences being identical or at least 70%, 80%, 85%, 86%, 87%, 88%, 89%, 90%, 91%, 92%, 93%, 94%, 95%, 96%, 97%, 98%, or 99% identical to any one of SEQ ID NO: 28037-28068 or a fragment or variant of any of these sequences;
said at least one coding sequence encoding at least one antigenic peptide or protein derived from LASV prefusion-stabilized GPC (“GPCmut6”) comprising or consisting of at least one amino acid sequences being identical or at least 70%, 80%, 85%, 86%, 87%, 88%, 89%, 90%, 91%, 92%, 93%, 94%, 95%, 96%, 97%, 98%, or 99% identical to any one of SEQ ID NO: 29733-29764 or a fragment or variant of any of these sequences;
said at least one coding sequence encoding at least one antigenic peptide or protein derived from LASV prefusion-stabilized GPC (“GPCmut7”) comprising or consisting of at least one amino acid sequences being identical or at least 70%, 80%, 85%, 86%, 87%, 88%, 89%, 90%, 91%, 92%, 93%, 94%, 95%, 96%, 97%, 98%, or 99% identical to any one of SEQ ID NO: 31429-31460 or a fragment or variant of any of these sequences;
said at least one coding sequence encoding at least one antigenic peptide or protein derived from LASV prefusion-stabilized GPC (“GPCmut8”) comprising or consisting of at least one amino acid sequences being identical or at least 70%, 80%, 85%, 86%, 87%, 88%, 89%, 90%, 91%, 92%, 93%, 94%, 95%, 96%, 97%, 98%, or 99% identical to any one of SEQ ID NO: 33125-33156 or a fragment or variant of any of these sequences;
said at least one coding sequence encoding at least one antigenic peptide or protein derived from LASV prefusion-stabilized GPC (“GPCmut9”) comprising or consisting of at least one amino acid sequences being identical or at least 70%, 80%, 85%, 86%, 87%, 88%, 89%, 90%, 91%, 92%, 93%, 94%, 95%, 96%, 97%, 98%, or 99% identical to any one of SEQ ID NO: 34821-34852 or a fragment or variant of any of these sequences;
said at least one coding sequence encoding at least one antigenic peptide or protein derived from LASV prefusion-stabilized GPC (“GPCmut10”) comprising or consisting of at least one amino acid sequences being identical or at least 70%, 80%, 85%, 86%, 87%, 88%, 89%, 90%, 91%, 92%, 93%, 94%, 95%, 96%, 97%, 98%, or 99% identical to any one of SEQ ID NO: 36517-36548 or a fragment or variant of any of these sequences;
said at least one coding sequence encoding at least one antigenic peptide or protein derived from LASV prefusion-stabilized GPC (“GPCmut11”) comprising or consisting of at least one amino acid sequences being identical or at least 70%, 80%, 85%, 86%, 87%, 88%, 89%, 90%, 91%, 92%, 93%, 94%, 95%, 96%, 97%, 98%, or 99% identical to any one of SEQ ID NO: 38213-38244 or a fragment or variant of any of these sequences,
said at least one coding sequence encoding at least one antigenic peptide or protein derived from LASV prefusion-stabilized GPC (“GPCmut12”) comprising or consisting of at least one amino acid sequences being identical or at least 70%, 80%, 85%, 86%, 87%, 88%, 89%, 90%, 91%, 92%, 93%, 94%, 95%, 96%, 97%, 98%, or 99% identical to any one of SEQ ID NO: 39909-39940 or a fragment or variant of any of these sequences,
said at least one coding sequence encoding at least one antigenic peptide or protein derived from LASV GPC lacking the cytoplasmic tail (“GPCmut13”) comprising or consisting of at least one amino acid sequences being identical or at least 70%, 80%, 85%, 86%, 87%, 88%, 89%, 90%, 91%, 92%, 93%, 94%, 95%, 96%, 97%, 98%, or 99% identical to any one of SEQ ID NO: 41605- 41636 or a fragment or variant of any of these sequences,
said at least one coding sequence encodes at least one antigenic peptide or protein derived from LASV NP comprising or consisting of an amino acid sequences being identical or at least 70%, 80%, 85%, 86%, 87%, 88%, 89%, 90%, 91%, 92%, 93%, 94%, 95%, 96%, 97%, 98%, or 99% identical to any one of SEQ ID NO: 7547-7797 or a fragment or a variant thereof;
said at least one coding sequence encoding at least one antigenic peptide or protein derived from HsPLAT_NP comprising or consisting of at least one amino acid sequences being identical or at least 70%, 80%, 85%, 86%, 87%, 88%, 89%, 90%, 91%, 92%, 93%, 94%, 95%, 96%, 97%, 98%, or 99% identical to any one of SEQ ID NO: 17968-18001 or a fragment or variant of any of these sequences;
said at least one coding sequence encoding at least one antigenic peptide or protein derived from HsALB_NP comprising or consisting of at least one amino acid sequences being identical or at least 70%, 80%, 85%, 86%, 87%, 88%, 89%, 90%, 91%, 92%, 93%, 94%, 95%, 96%, 97%, 98%, or 99% identical to any one of SEQ ID NO: 19328-19361 or a fragment or variant of any of these sequences;
said at least one coding sequence encoding at least one antigenic peptide or protein derived from IgE_NP comprising or consisting of at least one amino acid sequences being identical or at least 70%, 80%, 85%, 86%, 87%, 88%, 89%, 90%, 91%, 92%, 93%, 94%, 95%, 96%, 97%, 98%, or 99% identical to any one of SEQ ID NO: 20689-20722 or a fragment or variant of any of these sequences;
said at least one coding sequence encodes at least one antigenic peptide or protein derived from LASV Z comprising or consisting of an amino acid sequences being identical or at least 70%, 80%, 85%, 86%, 87%, 88%, 89%, 90%, 91%, 92%, 93%, 94%, 95%, 96%, 97%, 98%, or 99% identical to any one of SEQ ID NO: 11166-11347 or a fragment or a variant thereof.

7. RNA according to any one of the preceding claims, wherein
said the at least one coding sequence comprises or consists of at least one of the nucleic acid sequences being identical or at least 70%, 80%, 85%, 86%, 87%, 88%, 89%, 90%, 91%, 92%, 93%, 94%, 95%, 96%, 97%, 98%, or 99% identical to SEQ ID NOs: 255-2286 or a fragment or a fragment or variant of any of these sequences;
said the at least one coding sequence comprises or consists of at least one of the nucleic acid sequences being identical or at least 70%, 80%, 85%, 86%, 87%, 88%, 89%, 90%, 91%, 92%, 93%, 94%, 95%, 96%, 97%, 98%, or 99% identical to SEQ ID NOs: 3821-6106 (encoding GPCmut1) or a fragment or a fragment or variant of any of these sequences;
said the at least one coding sequence comprises or consists of at least one of the nucleic acid sequences being identical or at least 70%, 80%, 85%, 86%, 87%, 88%, 89%, 90%, 91%, 92%, 93%, 94%, 95%, 96%, 97%, 98%, or 99% identical to SEQ ID NOs: 22981-23108 (encoding GPCmut2) or a fragment or a fragment or variant of any of these sequences;
said the at least one coding sequence comprises or consists of at least one of the nucleic acid sequences being identical or at least 70%, 80%, 85%, 86%, 87%, 88%, 89%, 90%, 91%, 92%, 93%, 94%, 95%, 96%, 97%, 98%, or 99% identical to SEQ ID NOs: 24677-24804 (encoding GPCmut3) or a fragment or a fragment or variant of any of these sequences;
said the at least one coding sequence comprises or consists of at least one of the nucleic acid sequences being identical or at least 70%, 80%, 85%, 86%, 87%, 88%, 89%, 90%, 91%, 92%, 93%, 94%, 95%, 96%, 97%, 98%, or 99% identical to SEQ ID NOs: 26373-26500 (encoding GPCmut4) or a fragment or a fragment or variant of any of these sequences;
said the at least one coding sequence comprises or consists of at least one of the nucleic acid sequences being identical or at least 70%, 80%, 85%, 86%, 87%, 88%, 89%, 90%, 91%, 92%, 93%, 94%, 95%, 96%, 97%, 98%, or 99% identical to SEQ ID NOs: 28069-28196 (encoding GPCmut5) or a fragment or a fragment or variant of any of these sequences;
said the at least one coding sequence comprises or consists of at least one of the nucleic acid sequences being identical or at least 70%, 80%, 85%, 86%, 87%, 88%, 89%, 90%, 91%, 92%, 93%, 94%, 95%, 96%, 97%, 98%, or 99% identical to SEQ ID NOs: 29765-29892 (encoding GPCmut6) or a fragment or a fragment or variant of any of these sequences;
said the at least one coding sequence comprises or consists of at least one of the nucleic acid sequences being identical or at least 70%, 80%, 85%, 86%, 87%, 88%, 89%, 90%, 91%, 92%, 93%, 94%, 95%, 96%, 97%, 98%, or 99% identical to SEQ ID NOs: 31461-31588 (encoding GPCmut7) or a fragment or a fragment or variant of any of these sequences;
said the at least one coding sequence comprises or consists of at least one of the nucleic acid sequences being identical or at least 70%, 80%, 85%, 86%, 87%, 88%, 89%, 90%, 91%, 92%, 93%, 94%, 95%, 96%, 97%, 98%, or 99% identical to SEQ ID NOs: 33157-33284 (encoding GPCmut8) or a fragment or a fragment or variant of any of these sequences;
said the at least one coding sequence comprises or consists of at least one of the nucleic acid sequences being identical or at least 70%, 80%, 85%, 86%, 87%, 88%, 89%, 90%, 91%, 92%, 93%, 94%, 95%, 96%, 97%, 98%, or 99% identical to SEQ ID NOs: 34853-34980 (encoding GPCmut9) or a fragment or a fragment or variant of any of these sequences;
said the at least one coding sequence comprises or consists of at least one of the nucleic acid sequences being identical or at least 70%, 80%, 85%, 86%, 87%, 88%, 89%, 90%, 91%, 92%, 93%, 94%, 95%, 96%, 97%, 98%, or 99% identical to SEQ ID NOs: 36549-36676 (encoding GPCmut10) or a fragment or a fragment or variant of any of these sequences;
said the at least one coding sequence comprises or consists of at least one of the nucleic acid sequences being identical or at least 70%, 80%, 85%, 86%, 87%, 88%, 89%, 90%, 91%, 92%, 93%, 94%, 95%, 96%, 97%, 98%, or 99% identical to SEQ ID NOs: 38245-38372 (encoding GPCmut11) or a fragment or a fragment or variant of any of these sequences;
said the at least one coding sequence comprises or consists of at least one of the nucleic acid sequences being identical or at least 70%, 80%, 85%, 86%, 87%, 88%, 89%, 90%, 91%, 92%, 93%, 94%, 95%, 96%, 97%, 98%, or 99% identical to SEQ ID NOs: 39941-40068 (encoding GPCmut12) or a fragment or a fragment or variant of any of these sequences;
said the at least one coding sequence comprises or consists of at least one of the nucleic acid sequences being identical or at least 70%, 80%, 85%, 86%, 87%, 88%, 89%, 90%, 91%, 92%, 93%, 94%, 95%, 96%, 97%, 98%, or 99% identical to SEQ ID NOs: 41637-41764 (encoding GPCmut13) or a fragment or a fragment or variant of any of these sequences;
said the at least one coding sequence comprises or consists of at least one of the nucleic acid sequences being identical or at least 70%, 80%, 85%, 86%, 87%, 88%, 89%, 90%, 91%, 92%, 93%, 94%, 95%, 96%, 97%, 98%, or 99% identical to SEQ ID NOs: 7798-9805 (encoding NP) or a fragment or a fragment or variant of any of these sequences;
said the at least one coding sequence comprises or consists of at least one of the nucleic acid sequences being identical or at least 70%, 80%, 85%, 86%, 87%, 88%, 89%, 90%, 91%, 92%, 93%, 94%, 95%, 96%, 97%, 98%, or 99% identical to SEQ ID NOs: 18002-18103 (encoding SP- HsPLAT_NP) or a fragment or a fragment or variant of any of these sequences;
said the at least one coding sequence comprises or consists of at least one of the nucleic acid sequences being identical or at least 70%, 80%, 85%, 86%, 87%, 88%, 89%, 90%, 91%, 92%, 93%, 94%, 95%, 96%, 97%, 98%, or 99% identical to SEQ ID NOs: 19362-19463 (encoding SP- HsALB_NP) or a fragment or a fragment or variant of any of these sequences;
said the at least one coding sequence comprises or consists of at least one of the nucleic acid sequences being identical or at least 70%, 80%, 85%, 86%, 87%, 88%, 89%, 90%, 91%, 92%, 93%, 94%, 95%, 96%, 97%, 98%, or 99% identical to SEQ ID NOs: 20723-20824 (encoding SP- IgE_NP) or a fragment or a fragment or variant of any of these sequences;
said the at least one coding sequence comprises or consists of at least one of the nucleic acid sequences being identical or at least 70%, 80%, 85%, 86%, 87%, 88%, 89%, 90%, 91%, 92%, 93%, 94%, 95%, 96%, 97%, 98%, or 99% identical to SEQ ID NOs: 11348-12803 (encoding Z) or a fragment or a fragment or variant of any of these sequences.

8. RNA according to any one of the preceding claims, wherein the at least one coding sequence is a codon modified coding sequence, wherein the amino acid sequence encoded by the at least one codon modified coding sequence is preferably not being modified compared to the amino acid sequence encoded by the corresponding wild type coding sequence.

9. RNA according to claim 8, wherein the at least one codon modified coding sequence is selected from C maximized coding sequence, CAI maximized coding sequence, human codon usage adapted coding sequence, G/C content modified coding sequence, and G/C optimized coding sequence, or any combination thereof.

10. RNA according to claim 8 or 9, wherein the
at least one coding sequence comprising a codon modified nucleic acid sequence which is identical or at least 70%, 80%, 85%, 86%, 87%, 88%, 89%, 90%, 91%, 92%, 93%, 94%, 95%, 96%, 97%, 98%, or 99% identical to any one SEQ ID NOs: 509-2286 (encoding GPC) or a fragment or variant of any of these sequences, or
at least one coding sequence comprises a codon modified coding sequence comprising a nucleic acid sequence being identical or at least 70%, 80%, 85%, 86%, 87%, 88%, 89%, 90%, 91%, 92%, 93%, 94%, 95%, 96%, 97%, 98%, or 99% identical to any one SEQ ID NOs: 4075-6106 (encoding GPCmut1) or a fragment or variant of any of these sequences, or
at least one coding sequence comprises a codon modified coding sequence comprising a nucleic acid sequence being identical or at least 70%, 80%, 85%, 86%, 87%, 88%, 89%, 90%, 91%, 92%, 93%, 94%, 95%, 96%, 97%, 98%, or 99% identical to any one SEQ ID NOs: 22981-23108 (encoding GPCmut2) or a fragment or variant of any of these sequences, or
at least one coding sequence comprises a codon modified coding sequence comprising a nucleic acid sequence being identical or at least 70%, 80%, 85%, 86%, 87%, 88%, 89%, 90%, 91%, 92%, 93%, 94%, 95%, 96%, 97%, 98%, or 99% identical to any one SEQ ID NOs: 24677-24804 (encoding GPCmut3) or a fragment or variant of any of these sequences, or
at least one coding sequence comprises a codon modified coding sequence comprising a nucleic acid sequence being identical or at least 70%, 80%, 85%, 86%, 87%, 88%, 89%, 90%, 91%, 92%, 93%, 94%, 95%, 96%, 97%, 98%, or 99% identical to any one SEQ ID NOs: 26373-26500 (encoding GPCmut4) or a fragment or variant of any of these sequences, or
at least one coding sequence comprises a codon modified coding sequence comprising a nucleic acid sequence being identical or at least 70%, 80%, 85%, 86%, 87%, 88%, 89%, 90%, 91%, 92%, 93%, 94%, 95%, 96%, 97%, 98%, or 99% identical to any one SEQ ID NOs: 28069-28196 (encoding GPCmut5) or a fragment or variant of any of these sequences, or
at least one coding sequence comprises a codon modified coding sequence comprising a nucleic acid sequence being identical or at least 70%, 80%, 85%, 86%, 87%, 88%, 89%, 90%, 91%, 92%, 93%, 94%, 95%, 96%, 97%, 98%, or 99% identical to any one SEQ ID NOs: 29765-29892 (encoding GPCmut6) or a fragment or variant of any of these sequences, or
at least one coding sequence comprises a codon modified coding sequence comprising a nucleic acid sequence being identical or at least 70%, 80%, 85%, 86%, 87%, 88%, 89%, 90%, 91%, 92%, 93%, 94%, 95%, 96%, 97%, 98%, or 99% identical to any one SEQ ID NOs: 31461-31588 (encoding GPCmut7) or a fragment or variant of any of these sequences, or
at least one coding sequence comprises a codon modified coding sequence comprising a nucleic acid sequence being identical or at least 70%, 80%, 85%, 86%, 87%, 88%, 89%, 90%, 91%, 92%, 93%, 94%, 95%, 96%, 97%, 98%, or 99% identical to any one SEQ ID NOs: 33157-33284 (encoding GPCmut8) or a fragment or variant of any of these sequences, or
at least one coding sequence comprises a codon modified coding sequence comprising a nucleic acid sequence being identical or at least 70%, 80%, 85%, 86%, 87%, 88%, 89%, 90%, 91%, 92%, 93%, 94%, 95%, 96%, 97%, 98%, or 99% identical to any one SEQ ID NOs: 34853-34980 (encoding GPCmut9) or a fragment or variant of any of these sequences, or
at least one coding sequence comprises a codon modified coding sequence comprising a nucleic acid sequence being identical or at least 70%, 80%, 85%, 86%, 87%, 88%, 89%, 90%, 91%, 92%, 93%, 94%, 95%, 96%, 97%, 98%, or 99% identical to any one SEQ ID NOs: 36549-36676 (encoding GPCmut10) or a fragment or variant of any of these sequences, or
at least one coding sequence comprises a codon modified coding sequence comprising a nucleic acid sequence being identical or at least 70%, 80%, 85%, 86%, 87%, 88%, 89%, 90%, 91%, 92%, 93%, 94%, 95%, 96%, 97%, 98%, or 99% identical to any one SEQ ID NOs: 38245-38372 (encoding GPCmut11) or a fragment or variant of any of these sequences, or
at least one coding sequence comprises a codon modified coding sequence comprising a nucleic acid sequence being identical or at least 70%, 80%, 85%, 86%, 87%, 88%, 89%, 90%, 91%, 92%, 93%, 94%, 95%, 96%, 97%, 98%, or 99% identical to any one SEQ ID NOs: 39941-40068 (encoding GPCmut12) or a fragment or variant of any of these sequences, or
at least one coding sequence comprises a codon modified coding sequence comprising a nucleic acid sequence being identical or at least 70%, 80%, 85%, 86%, 87%, 88%, 89%, 90%, 91%, 92%, 93%, 94%, 95%, 96%, 97%, 98%, or 99% identical to any one SEQ ID NOs: 41637-41764 (encoding GPCmut13) or a fragment or variant of any of these sequences, or
at least one coding sequence comprises a codon modified coding sequence comprising a nucleic acid sequence being identical or at least 70%, 80%, 85%, 86%, 87%, 88%, 89%, 90%, 91%, 92%, 93%, 94%, 95%, 96%, 97%, 98%, or 99% identical to any one SEQ ID NOs: 8049-9805 (encoding NP) or a fragment or variant of any of these sequences, or
at least one coding sequence comprises a codon modified coding sequence comprising a nucleic acid sequence being identical or at least 70%, 80%, 85%, 86%, 87%, 88%, 89%, 90%, 91%, 92%, 93%, 94%, 95%, 96%, 97%, 98%, or 99% identical to any one SEQ ID NOs: 18002-18103, 19362-19463, or 20723-20824 (encoding SP-NP) or a fragment or variant of any of these sequences, or
at least one coding sequence comprises a codon modified coding sequence comprising a nucleic acid sequence being identical or at least 70%, 80%, 85%, 86%, 87%, 88%, 89%, 90%, 91%, 92%, 93%, 94%, 95%, 96%, 97%, 98%, or 99% identical to any one SEQ ID NOs: 11530-12803 (encoding Z) or a fragment or variant of any of these sequences.

11. RNA according to claims 8 to 10, wherein the
at least one coding sequence comprising a G/C optimized or G/C content modified coding sequence (opt1, opt5, opt6, opt11) comprising a nucleic acid sequence which is identical or at least 50%, 60%, 70%, 80%, 85%, 86%, 87%, 88%, 89%, 90%, 91%, 92%, 93%, 94%, 95%, 96%, 97%, 98%, or 99% identical to any one of the nucleic acid sequences according to the SEQ ID NOs: 509-762, 1525-2286 (encoding GPC) or a fragment or variant of any of these sequences, or
at least one coding sequence comprises a codon modified coding sequence comprising a nucleic acid sequence being identical or at least 70%, 80%, 85%, 86%, 87%, 88%, 89%, 90%, 91%, 92%, 93%, 94%, 95%, 96%, 97%, 98%, or 99% identical to any one SEQ ID NOs: 4075-4582, 5345-6106 (encoding GPCmut1) or a fragment or variant of any of these sequences, or
at least one coding sequence comprises a codon modified coding sequence comprising a nucleic acid sequence being identical or at least 70%, 80%, 85%, 86%, 87%, 88%, 89%, 90%, 91%, 92%, 93%, 94%, 95%, 96%, 97%, 98%, or 99% identical to any one SEQ ID NOs: 22981-23044, 23077-23108 (encoding GPCmut2) or a fragment or variant of any of these sequences, or
at least one coding sequence comprises a codon modified coding sequence comprising a nucleic acid sequence being identical or at least 70%, 80%, 85%, 86%, 87%, 88%, 89%, 90%, 91%, 92%, 93%, 94%, 95%, 96%, 97%, 98%, or 99% identical to any one SEQ ID NOs: 24677-24740, 24773-24804 (encoding GPCmut3) or a fragment or variant of any of these sequences, or
at least one coding sequence comprises a codon modified coding sequence comprising a nucleic acid sequence being identical or at least 70%, 80%, 85%, 86%, 87%, 88%, 89%, 90%, 91%, 92%, 93%, 94%, 95%, 96%, 97%, 98%, or 99% identical to any one SEQ ID NOs: 26373-26436, 26469-26500 (encoding GPCmut4) or a fragment or variant of any of these sequences, or
at least one coding sequence comprises a codon modified coding sequence comprising a nucleic acid sequence being identical or at least 70%, 80%, 85%, 86%, 87%, 88%, 89%, 90%, 91%, 92%, 93%, 94%, 95%, 96%, 97%, 98%, or 99% identical to any one SEQ ID NOs: 28069-28132, 28165-28196 (encoding GPCmut5) or a fragment or variant of any of these sequences, or
at least one coding sequence comprises a codon modified coding sequence comprising a nucleic acid sequence being identical or at least 70%, 80%, 85%, 86%, 87%, 88%, 89%, 90%, 91%, 92%, 93%, 94%, 95%, 96%, 97%, 98%, or 99% identical to any one SEQ ID NOs: 29765-29828, 29861-29892 (encoding GPCmut6) or a fragment or variant of any of these sequences, or
at least one coding sequence comprises a codon modified coding sequence comprising a nucleic acid sequence being identical or at least 70%, 80%, 85%, 86%, 87%, 88%, 89%, 90%, 91%, 92%, 93%, 94%, 95%, 96%, 97%, 98%, or 99% identical to any one SEQ ID NOs: 31461-31524, 31557-31588 (encoding GPCmut7) or a fragment or variant of any of these sequences, or
at least one coding sequence comprises a codon modified coding sequence comprising a nucleic acid sequence being identical or at least 70%, 80%, 85%, 86%, 87%, 88%, 89%, 90%, 91%, 92%, 93%, 94%, 95%, 96%, 97%, 98%, or 99% identical to any one SEQ ID NOs: 33157-33220, 33253-33284 (encoding GPCmut8) or a fragment or variant of any of these sequences, or
at least one coding sequence comprises a codon modified coding sequence comprising a nucleic acid sequence being identical or at least 70%, 80%, 85%, 86%, 87%, 88%, 89%, 90%, 91%, 92%, 93%, 94%, 95%, 96%, 97%, 98%, or 99% identical to any one SEQ ID NOs: 34853-34916, 34949-34980 (encoding GPCmut9) or a fragment or variant of any of these sequences, or
at least one coding sequence comprises a codon modified coding sequence comprising a nucleic acid sequence being identical or at least 70%, 80%, 85%, 86%, 87%, 88%, 89%, 90%, 91%, 92%, 93%, 94%, 95%, 96%, 97%, 98%, or 99% identical to any one SEQ ID NOs: 36549-36612, 36645-36676 (encoding GPCmut10) or a fragment or variant of any of these sequences, or
at least one coding sequence comprises a codon modified coding sequence comprising a nucleic acid sequence being identical or at least 70%, 80%, 85%, 86%, 87%, 88%, 89%, 90%, 91%, 92%, 93%, 94%, 95%, 96%, 97%, 98%, or 99% identical to any one SEQ ID NOs: 38245-38308, 38341-38372 (encoding GPCmut11) or a fragment or variant of any of these sequences, or
at least one coding sequence comprises a codon modified coding sequence comprising a nucleic acid sequence being identical or at least 70%, 80%, 85%, 86%, 87%, 88%, 89%, 90%, 91%, 92%, 93%, 94%, 95%, 96%, 97%, 98%, or 99% identical to any one SEQ ID NOs: 39941-40004, 40037-40068 (encoding GPCmut12) or a fragment or variant of any of these sequences, or
at least one coding sequence comprises a codon modified coding sequence comprising a nucleic acid sequence being identical or at least 70%, 80%, 85%, 86%, 87%, 88%, 89%, 90%, 91%, 92%, 93%, 94%, 95%, 96%, 97%, 98%, or 99% identical to any one SEQ ID NOs: 41637-41700, 41733-41764 (encoding GPCmut13) or a fragment or variant of any of these sequences, or
at least one coding sequence comprises a codon modified coding sequence comprising a nucleic acid sequence being identical or at least 70%, 80%, 85%, 86%, 87%, 88%, 89%, 90%, 91%, 92%, 93%, 94%, 95%, 96%, 97%, 98%, or 99% identical to any one SEQ ID NOs: 8049-8299, 9053-9805 (encoding NP) or a fragment or variant of any of these sequences, or
at least one coding sequence comprises a codon modified coding sequence comprising a nucleic acid sequence being identical or at least 70%, 80%, 85%, 86%, 87%, 88%, 89%, 90%, 91%, 92%, 93%, 94%, 95%, 96%, 97%, 98%, or 99% identical to any one SEQ ID NOs: 18002-18035, 18070-18103, 19362-19395, 19430-19463, 20723-20756, 20791-20824 (encoding SP_NP) or a fragment or variant of any of these sequences, or
at least one coding sequence comprises a codon modified coding sequence comprising a nucleic acid sequence being identical or at least 70%, 80%, 85%, 86%, 87%, 88%, 89%, 90%, 91%, 92%, 93%, 94%, 95%, 96%, 97%, 98%, or 99% identical to any one SEQ ID NOs: 11530-11711, 12258-12803 (encoding Z) or a fragment or variant of any of these sequences.

12. RNA according to any one of the preceding claims, wherein the RNA comprises a 5′-cap structure, preferably m7G(5′), m7G(5′)ppp(5′)(2′OMeA), or m7G(5′)ppp(5′)(2′OMeG), wherein cap1 (m7G(5′)ppp(5′)(2′OMeA), or m7G(5′)ppp(5′)(2′OMeG) is particularly preferred.

13. RNA according to any one of the preceding claims, wherein the RNA comprises at least one poly(A) sequence, preferably comprising 30 to 200 adenosine nucleotides, preferably about 64 adenosine nucleotides (A64), about 100 adenosine nucleotides (A100) or about 150 adenosine nucleotides.

14. RNA according to any one of the preceding claims, wherein the RNA comprises at least one histone stem-loop, wherein the histone stem-loop preferably comprises a nucleic acid sequence according to SEQ ID NOs: 13842 or 13843 or a fragment or variant thereof.

15. RNA according to any one of the preceding claims comprising the following elements:
a) 5′-cap structure, preferably as defined in claim 12;
b) 5′-UTR and/or 3′-UTR as defined in claims 1 to 3;
c) at least one coding sequence, preferably as defined by any one of claims 7 to 11 or encoding a protein as defined by any one of claims 4 to 6 or;
d) optionally, a poly(A) sequence, preferably as defined by claim 13;
e) optionally, a poly(C) sequence, preferably as defined by claim 13;
f) optionally, a histone stem-loop, preferably as defined by any one of claim 14;
g) optionally, a 3′-terminal sequence according to SEQ ID NOs: 13848-13867, 13873-13879.

16. RNA according claims to any one of the preceding claims comprising the following elements, preferably in 5′- to 3′-direction:
a) 5′-cap structure, preferably as defined in claim 12;
b) 5′-UTR and/or 3′-UTR according to a-1, a-2, b-4, i-2, or i-3;
c) at least one coding sequence as defined by any one of claims 7 to 11 wherein said coding sequence is located between said 5′-UTR and said 3′-UTR, preferably downstream of said 5′-UTR and upstream of said 3′-UTR;
d) optionally, a poly(A) sequence, preferably as defined by claim 13;
e) optionally, poly(C) sequence, preferably as defined by claim 13;
f) optionally, histone stem-loop, preferably as defined by any one of claim 14;
g) optionally, a 3′-terminal sequence according to SEQ ID NOs: 13848-13867, 13873-13879.

17. RNA according to any one of the preceding claims wherein
said RNA comprises or consists of an RNA sequence which is identical or at least 70%, 80%, 85%, 86%, 87%, 88%, 89%, 90%, 91%, 92%, 93%, 94%, 95%, 96%, 97%, 98%, or 99% identical to a nucleic acid sequence selected from the group consisting of SEQ ID NOs: 2287-3566, 14056-15207 (encoding GPC) or a fragment or variant of any of these sequences;
said RNA comprises or consists of an RNA sequence which is identical or at least 70%, 80%, 85%, 86%, 87%, 88%, 89%, 90%, 91%, 92%, 93%, 94%, 95%, 96%, 97%, 98%, or 99% identical to a nucleic acid sequence selected from the group consisting of SEQ ID NOs: 6107-7546, 15208-16743 (encoding GPCmut1) or a fragment or variant of any of these sequences;
said RNA comprises or consists of an RNA sequence which is identical or at least 70%, 80%, 85%, 86%, 87%, 88%, 89%, 90%, 91%, 92%, 93%, 94%, 95%, 96%, 97%, 98%, or 99% identical to a nucleic acid sequence selected from the group consisting of SEQ ID NOs: 23109-24644 (encoding GPCmut2) or a fragment or variant of any of these sequences;
said RNA comprises or consists of an RNA sequence which is identical or at least 70%, 80%, 85%, 86%, 87%, 88%, 89%, 90%, 91%, 92%, 93%, 94%, 95%, 96%, 97%, 98%, or 99% identical to a nucleic acid sequence selected from the group consisting of SEQ ID NOs: 24805-26340 (encoding GPCmut3) or a fragment or variant of any of these sequences;
said RNA comprises or consists of an RNA sequence which is identical or at least 70%, 80%, 85%, 86%, 87%, 88%, 89%, 90%, 91%, 92%, 93%, 94%, 95%, 96%, 97%, 98%, or 99% identical to a nucleic acid sequence selected from the group consisting of SEQ ID NOs: 26501-28036 (encoding GPCmut4) or a fragment or variant of any of these sequences;
said RNA comprises or consists of an RNA sequence which is identical or at least 70%, 80%, 85%, 86%, 87%, 88%, 89%, 90%, 91%, 92%, 93%, 94%, 95%, 96%, 97%, 98%, or 99% identical to a nucleic acid sequence selected from the group consisting of SEQ ID NOs: 28197-29732 (encoding GPCmut5) or a fragment or variant of any of these sequences;
said RNA comprises or consists of an RNA sequence which is identical or at least 70%, 80%, 85%, 86%, 87%, 88%, 89%, 90%, 91%, 92%, 93%, 94%, 95%, 96%, 97%, 98%, or 99% identical to a nucleic acid sequence selected from the group consisting of SEQ ID NOs: 29893-31428 (encoding GPCmut6) or a fragment or variant of any of these sequences;
said RNA comprises or consists of an RNA sequence which is identical or at least 70%, 80%, 85%, 86%, 87%, 88%, 89%, 90%, 91%, 92%, 93%, 94%, 95%, 96%, 97%, 98%, or 99% identical to a nucleic acid sequence selected from the group consisting of SEQ ID NOs: 31589-33124 (encoding GPCmut7) or a fragment or variant of any of these sequences;
said RNA comprises or consists of an RNA sequence which is identical or at least 70%, 80%, 85%, 86%, 87%, 88%, 89%, 90%, 91%, 92%, 93%, 94%, 95%, 96%, 97%, 98%, or 99% identical to a nucleic acid sequence selected from the group consisting of SEQ ID NOs: 33285-34820 (encoding GPCmut8) or a fragment or variant of any of these sequences;
said RNA comprises or consists of an RNA sequence which is identical or at least 70%, 80%, 85%, 86%, 87%, 88%, 89%, 90%, 91%, 92%, 93%, 94%, 95%, 96%, 97%, 98%, or 99% identical to a nucleic acid sequence selected from the group consisting of SEQ ID NOs: 34981-36516 (encoding GPCmut9) or a fragment or variant of any of these sequences;
said RNA comprises or consists of an RNA sequence which is identical or at least 70%, 80%, 85%, 86%, 87%, 88%, 89%, 90%, 91%, 92%, 93%, 94%, 95%, 96%, 97%, 98%, or 99% identical to a nucleic acid sequence selected from the group consisting of SEQ ID NOs: 36677-38212 (encoding GPCmut10) or a fragment or variant of any of these sequences;
said RNA comprises or consists of an RNA sequence which is identical or at least 70%, 80%, 85%, 86%, 87%, 88%, 89%, 90%, 91%, 92%, 93%, 94%, 95%, 96%, 97%, 98%, or 99% identical to a nucleic acid sequence selected from the group consisting of SEQ ID NOs: 38373-39908 (encoding GPCmut11) or a fragment or variant of any of these sequences;
said RNA comprises or consists of an RNA sequence which is identical or at least 70%, 80%, 85%, 86%, 87%, 88%, 89%, 90%, 91%, 92%, 93%, 94%, 95%, 96%, 97%, 98%, or 99% identical to a nucleic acid sequence selected from the group consisting of SEQ ID NOs: 40069-41604 (encoding GPCmut12) or a fragment or variant of any of these sequences;
said RNA comprises or consists of an RNA sequence which is identical or at least 70%, 80%, 85%, 86%, 87%, 88%, 89%, 90%, 91%, 92%, 93%, 94%, 95%, 96%, 97%, 98%, or 99% identical to a nucleic acid sequence selected from the group consisting of SEQ ID NOs: 41765-43300 (encoding GPCmut13) or a fragment or variant of any of these sequences;
said RNA comprises or consists of an RNA sequence which is identical or at least 70%, 80%, 85%, 86%, 87%, 88%, 89%, 90%, 91%, 92%, 93%, 94%, 95%, 96%, 97%, 98%, or 99% identical to a nucleic acid sequence selected from the group consisting of SEQ ID NOs: 9806-11165, 16744-17967 (encoding NP) or a fragment or variant of any of these sequences;
said RNA comprises or consists of an RNA sequence which is identical or at least 70%, 80%, 85%, 86%, 87%, 88%, 89%, 90%, 91%, 92%, 93%, 94%, 95%, 96%, 97%, 98%, or 99% identical to a nucleic acid sequence selected from the group consisting of SEQ ID NOs: 18104-19327, 19464- 20687, 20825-22048 (encoding SP-NP) or a fragment or variant of any of these sequences;
said RNA comprises or consists of an RNA sequence which is identical or at least 70%, 80%, 85%, 86%, 87%, 88%, 89%, 90%, 91%, 92%, 93%, 94%, 95%, 96%, 97%, 98%, or 99% identical to a nucleic acid sequence selected from the group consisting of SEQ ID NOs: 12804-13803, 22049-22948 (encoding Z) or a fragment or variant of any of these sequences.

18. A composition comprising at least one RNA as defined in any one of claims 1 to 17, wherein the composition optionally comprises at least one pharmaceutically acceptable carrier.

19. Composition according to claim 18, wherein the composition comprises more than one or a plurality, preferably 2, 3, 4, 5, 6, 7, 8, 9, 10, 11, 12, 13, 14, 15 of different RNAs each defined in any one of claims 1 to 18.

20. Composition according to claim 19, wherein each of the different RNAs encodes a different antigenic peptide or protein derived from the same LASV, or wherein each of the RNAs encodes a different antigenic peptide or protein derived from different proteins of the same LASV, or wherein each of the RNAs encodes a different antigenic peptide or protein derived from different proteins of different LASV.

21. Composition according to claim 19 or 20, wherein the composition comprises at least one RNA encoding at least one antigenic peptide or protein derived from GPC or prefusion-stabilized GPC or a variant or fragment thereof and at least one additional RNA encoding at least one antigenic peptide or protein derived from NP (or SP-NP) or a variant or fragment thereof, and/or at least one additional RNA encoding at least one antigenic peptide or protein derived from Z or a variant or fragment thereof.

22. Composition according to claims 19 to 21, wherein the composition comprises at least one RNA encoding at least one antigenic peptide or protein derived from GPC or prefusion-stabilized GPC or a variant or fragment thereof and at least one additional RNA encoding at least one antigenic peptide or protein derived from NP (or SP-NP) or a variant or fragment thereof.

23. Composition according to claims 19 to 22, wherein said antigenic peptides or proteins are derived from the same LASV or from different LASV or combinations thereof.

24. Composition according to claim 23, wherein the different LASV belong to different LASV clades or different LASV lineages, preferably to the LASV clades I, II, III, IV, V, and VI or to the LASV lineages I, II, III, IV, V, and VI.

25. Composition according to claims 18 to 24, wherein at least one RNA is complexed or associated with or at least partially complexed or partially associated with one or more cationic or polycationic compound, preferably cationic or polycationic polymer, cationic or polycationic polysaccharide, cationic or polycationic lipid, cationic or polycationic protein, cationic or polycationic peptide, or any combinations thereof.

26. Composition according to claim 25, wherein the at least one RNA is complexed or associated with one or more lipids, thereby forming liposomes, lipid nanoparticles, lipoplexes, and/or nanoliposomes.

27. Composition according to claim 26, wherein the at least one RNA is complexed with one or more lipids thereby forming lipid nanoparticles (LNP).

28. Composition according to claim 26 or 27, wherein the LNP comprises a cationic lipid with the formula III: [chemical structure]
or a pharmaceutically acceptable salt, tautomer, prodrug or stereoisomer thereof, wherein:
L¹ or L² is each independently —O(C═O)—, —(C═O)O—, —C(═O)—, —O—, —S(O)ₓ—, —S—S—, —C(═O)S—, —SC(═O)—, —NR^{a}C(═O)—, —C(=O)NR^{a}—, —NR^{a}C(═O)NR^{a}—, —OC(=O)NR^{a}— or —NR^{a}C(═O)O—, preferably L¹ or L² is —O(C═O)—or
—(C═O)O—;
G¹ and G² are each independently unsubstituted C₁-C₁₂ alkylene or C₁-C₁₂ alkenylene;
G³ is C₁-C₂₄ alkylene, alkenylene, C₃-C₈ cycloalkylene, or C₃-C₈ cycloalkenylene;
R^{a} is H or C₁-C₁₂ alkyl;
R¹ and R² are each independently C₆-C₂₄ alkyl or C₆-C₂₄ alkenyl;
R³ is H, OR⁵, CN, —C(═O)OR⁴, —OC(═O)R⁴ or —NR⁵C(═O)R⁴;
R⁴ is C₁-C₁₂ alkyl;
R⁵ is H or C₁-C₆ alkyl; and
x is 0, 1 or 2;

29. Composition according to claim 28, wherein the cationic lipid is a compound of formula III, and wherein:
L¹ and L² are each independently —O(C═O)— or (C═O)—O—;
G³ is C₁-C₂₄ alkylene or C₁-C₂₄ alkenylene; and
R³ is H or OR⁵.

30. Composition according to any one of claims 28 to 29, wherein the cationic lipid is a compound of formula III, and wherein:
L¹ and L² are each independently —O(C═O)— or (C═O)—O—; and
R¹ and R² each independently have one of the following structures:

[chemical structure]

31. Composition according to any one of claims 28 to 30, wherein the cationic lipid is a compound of formula III, and wherein R³ is OH.

32. Composition according to any one of claims 28 to 31, wherein the cationic lipid is selected from structures III-1 to III-36:

| No. | Structure |
|---|---|
| III-1 | [chemical structure] |
| III-2 | [chemical structure] |
| III-3 | [chemical structure] |
| III-4 | [chemical structure] |
| III-5 | [chemical structure] |
| III-6 | [chemical structure] |
| III-7 | [chemical structure] |
| III-8 | [chemical structure] |
| III-9 | [chemical structure] |
| III-10 | [chemical structure] |
| III-11 | [chemical structure] |
| III-12 | [chemical structure] |
| III-13 | [chemical structure] |
| III-14 | [chemical structure] |
| III-15 | [chemical structure] |
| III-16 | [chemical structure] |
| III-17 | [chemical structure] |
| III-18 | [chemical structure] |
| III-19 | [chemical structure] |
| III-20 | [chemical structure] |
| III-21 | [chemical structure] |
| III-22 | [chemical structure] |
| III-23 | [chemical structure] |
| III-24 | [chemical structure] |
| III-25 | [chemical structure] |
| III-26 | [chemical structure] |
| III-27 | [chemical structure] |
| III-28 | [chemical structure] |
| III-29 | [chemical structure] |
| III-30 | [chemical structure] |
| III-31 | [chemical structure] |
| III-32 | [chemical structure] |
| III-33 | [chemical structure] |
| III-34 | [chemical structure] |
| III-35 | [chemical structure] |
| III-36 | [chemical structure] |

33. Composition according to any one of claims 28 to 32, wherein the cationic lipid is

[chemical structure]

34. Composition according to any one of claims 27 to 33, wherein the LNP comprises a PEG lipid with the formula (IV): [chemical structure]
wherein R⁸ and R⁹ are each independently a straight or branched, saturated or unsaturated alkyl chain containing from 10 to 30 carbon atoms, wherein the alkyl chain is optionally interrupted by one or more ester bonds;
and w has a mean value ranging from 30 to 60.

35. Composition according to claim 34, wherein in the PEG lipid R⁸ and R⁹ are saturated alkyl chains.

36. Composition according to claim 34 or 35, wherein the PEG lipid is [chemical structure]
wherein n has a mean value ranging from 30 to 60, preferably wherein n has a mean value of about 45, 46, 47, 48, 49, 50, 51, 52, 53, 54, most preferably wherein n has a mean value of 49.

37. Composition according to any one of claims 27 to 36, wherein the LNP comprises one or more neutral lipids and/or a steroid or steroid analogues.

38. Composition according to claim 37, wherein the neutral lipid is selected from the group comprising distearoylphosphatidylcholine (DSPC), dioleoylphosphatidylcholine (DOPC), dipalmitoylphosphatidylcholine (DPPC), dioleoylphosphatidylglycerol (DOPG), dipalmitoylphosphatidylglycerol (DPPG), dioleoyl-phosphatidylethanolamine (DOPE), palmitoyloleoylphosphatidylcholine (POPC), palmitoyloleoyl-phosphatidylethanolamine (POPE) and dioleoyl-phosphatidylethanolamine 4-(N-maleimidomethyl)-cyclohexane-1carboxylate (DOPE-mal), dipalmitoyl phosphatidyl ethanolamine (DPPE), dimyristoylphosphoethanolamine (DMPE), distearoyl-phosphatidylethanolamine (DSPE), 16-O-monomethyl PE, 16-O-dimethyl PE, 18-1-trans PE, 1-stearioyl-2-oleoylphosphatidyethanol amine (SOPE), and 1,2-dielaidoyl-sn-glycero-3-phophoethanolamine (transDOPE).

39. Composition according to claim 37 or 38, wherein the neutral lipid is 1,2-distearoyl-sn-glycero-3-phosphocholine (DSPC), and wherein the molar ratio of the cationic lipid to DSPC is optionally in the range from about 2:1 to 8:1.

40. Composition according to claim 37, wherein the steroid is cholesterol, and wherein the molar ratio of the cationic lipid to cholesterol is optionally in the range from about 2:1 to 1:1

41. Composition according to any one of claims 27 to 40, wherein the LNP essentially consists of
(i) at least one cationic lipid, preferably as defined in any one of claims 28 to 33;
(ii) a neutral lipid, preferably as defined in any one of claims 37 to 39;
(iii) a steroid or steroid analogue, preferably as defined in claim 40; and
(iv) a PEG-lipid, e.g. PEG-DMG or PEG-cDMA, preferably as defined in any one of claims 34 to 36,
wherein (i) to (iv) are in a molar ratio of about 20-60% cationic lipid, 5-25% neutral lipid, 25-55% sterol, and 0.5-15% PEG-lipid.

42. A vaccine comprising at least one RNA as defined in any one of claims 1 to 17, or the composition as defined in any one of claims 18 to 41.

43. Vaccine according to claim 42, wherein the at least one RNA as defined in any one of claims 1 to 17, or the composition as defined in any one of claims 18 to 41 elicits an adaptive immune response.

44. A Kit or kit of parts comprising at least one RNA as defined in any one of claims 1 to 17, the composition as defined in any one of claims 18 to 41, and/or the vaccine as defined in any one of claim 42 or 43, optionally comprising a liquid vehicle for solubilising, and optionally technical instructions providing information on administration and dosage of the components.

45. Kit or kit of parts according to claim 44 comprising at least the following components
a) at least one RNA as defined in any one of claims 1 to 17 encoding at least one antigenic peptide or protein derived from a LASV, preferably derived from GPC or prefusion-stabilized GPC, wherein said RNA is preferably complexed with one or more lipids thereby forming lipid nanoparticles (LNP); and
b) at least one, two or more further RNA species as defined in any one of claims 1 to 17 each encoding an antigenic peptide or protein derived from a LASV, preferably derived from NP or Z, wherein each of said further RNA species are preferably complexed with one or more lipids thereby forming lipid nanoparticles (LNP),
wherein components a) and b) are provided as separate entities or as a single entity.

46. Kit or kit of parts according to claim 45 or 46 further comprising Ringer lactate solution.

47. RNA as defined in any one of claims 1 to 17, the composition as defined in any one of claims 18 to 41, the vaccine as defined in any one of claim 42 or 43, or the kit or kit of parts as defined in claims 44 to 46 for use as a medicament.

48. RNA as defined in any one of claims 1 to 17, the composition as defined in any one of claims 18 to 41, the vaccine as defined in any one of claim 42 or 43, or the kit or kit of parts as defined in claims 44 to 46 for use in the treatment or prophylaxis of an infection with a virus, preferably with LASV, or a disorder related to such an infection.

49. A method of treating or preventing an infection with a LASV, or a disorder related to such an infection, wherein the method comprises applying or administering to a subject in need thereof the at least one RNA as defined in any one of claims 1 to 17, the composition as defined in any one of claims 18 to 41, the vaccine as defined in any one of claim 42 or 43, or the kit or kit of parts as defined in claim 44 to 46.
